(19) United States
(12) Patent Application Publication
(10) Pub. No.: US 2007/0027634 A1
(43) Pub. Date: Feb. 1, 2007

(54) Molecular hepatotoxicology modeling

(76) Inventors: Donna L. Mendrick, Gaithersburg, MD (US); Mark W. Porter, Gaithersburg, MD (US); Kory R. Johnson, Gaithersburg, MD (US); Brandon Higgs, Gaithersburg, MD (US); Arthur L. Castle, Gaithersburg, MD (US); Michael Elashoff, Gaithersburg, MD (US)

Correspondence Address: MORGAN LEWIS & BOCKIUS LLP, 1111 PENNSYLVANIA AVENUE NW, WASHINGTON, DC, 20004, US

(21) Appl. No.: 10/501,933

(22) PCT Filed: Jan. 31, 2003
(86) PCT No.: PCT/US03/03194

§ 371 Date: Oct. 27, 2004

Related U.S. Application Data
(60) Provisional application No. 60/364,055, filed on Mar. 15, 2002.
(60) Provisional application No. 60/364,045, filed on Mar. 15, 2002.
(60) Provisional application No. 60/436,643, filed on Dec. 30, 2002.

(30) Foreign Application Priority Data
Jan. 31, 2002 (US) 10/060087

(51) Int. Cl. C12Q 1/68; G06F 19/00; G01N 33/48; G01N 33/50

(52) U.S. Cl. 702/20; 435/6

(57) ABSTRACT

The present invention is based on the elucidation of the global changes in gene expression and the identification of toxicity markers in liver tissues or cells exposed to a known toxin. The genes may be used as toxicity markers in drug screening and toxicity assays. The invention includes a database of genes characterized by liver toxin-induced differential expression that is designed for use with microarrays and other solid-phase probes.

### RELATED APPLICATIONS

[0001] This application claims priority to U.S. Provisional Application 60/364,045 filed on Mar. 15, 2002, 60/364,055 filed on Mar. 15, 2002, and 60/436,643 filed on Dec. 30, 2002, and is a continuation-in-part of pending U.S. application Ser. No. 10/060,087 filed Jan. 31, 2002. In addition, this application is related to U.S. Provisional Application 60/222,040, 60/244,880, 60/290,029, 60/290,645, 60/292,336, 60/295,798, 60/297,457, 60/298,884, 60/303,459, and 60/331,273, as well as to pending U.S. application Ser. No. 09/917,800, filed Jul. 31, 2001, all of which are herein incorporated by reference in their entirety.

### SEQUENCE LISTING SUBMISSION ON COMPACT DISC

[0002] The Sequence Listing submitted concurrently herewith on compact disc is herein incorporated by reference in its entirety. Four copies of the Sequence Listing, one on each of four compact discs are provided. Copies 1, 2, and 3 are identical. Copies 1, 2, and 3 are also identical to the CRF. Each electronic copy of the Sequence Listing was created on Jan. 30, 2003 with a file size of 5795 KB. The file names are as follows: Copy 1-g15038us01.txt; Copy 2-g15038us01.txt; Copy 3-g15038us01.txt; and CRF-g15038us01.txt.

### BACKGROUND OF THE INVENTION

[0003] The need for methods of assessing the toxic impact of a compound, pharmaceutical agent or environmental pollutant on a cell or living organism has led to the development of procedures which utilize living organisms as biological monitors. The simplest and most convenient of these systems utilize unicellular microorganisms such as yeast and bacteria, since they are most easily maintained and manipulated. Unicellular screening systems also often use easily detectable changes in phenotype to monitor the effect of test compounds on the cell. Unicellular organisms, however, are inadequate models for estimating the potential effects of many compounds on complex multicellular animals, as they do not have the ability to carry out biotransformations to the extent or at levels found in higher organisms.

[0004] The biotransformation of chemical compounds by multicellular organisms is a significant factor in determining the overall toxicity of agents to which they are exposed. Accordingly, multicellular screening systems may be preferred or required to detect the toxic effects of compounds. The use of multicellular organisms as toxicology screening tools has been significantly hampered, however, by the lack of convenient screening mechanisms or endpoints, such as those available in yeast or bacterial systems. In addition, previous attempts to produce toxicology prediction systems have failed to provide the necessary modeling data and statistical information to accurately predict toxic responses (e.g., WO 00/12760, WO 00/47761, WO 00/63435, WO 01/32928 and WO 01/38579).

### SUMMARY OF THE INVENTION

[0005] The present invention is based on the elucidation of the global changes in gene expression in tissues or cells exposed to known toxins, in particular hepatotoxins, as compared to unexposed tissues or cells as well as the identification of individual genes that are differentially expressed upon toxin exposure.

[0006] In various aspects, the invention includes methods of predicting at least one toxic effect of a compound, predicting the progression of a toxic effect of a compound, and predicting the hepatoxicity of a compound. The invention also includes methods of identifying agents that modulate the onset or progression of a toxic response. Also provided are methods of predicting the cellular pathways that a compound modulates in a cell. The invention includes methods of identifying agents that modulate protein activities.

[0007] In a further aspect, the invention provides probes comprising sequences that specifically hybridize to genes in Tables 1-5WWW. Also provided are solid supports comprising at least two of the previously mentioned probes. The invention also includes a computer system that has a database containing information identifying the expression level in a tissue or cell sample exposed to a hepatotoxin of a set of genes comprising at least two genes in Tables 1-5WWW.

[0008] The invention further provides a core set of genes in Tables 5A-5WWW from which probes can be made and attached to solid supports. These core genes serve as a preferred set of markers of liver toxicity and can be used with the methods of the invention to predict or monitor a toxic effect of a compound or to modulate the onset or progression of a toxic response.

### DETAILED DESCRIPTION

[0009] Many biological functions are accomplished by altering the expression of various genes through transcriptional (e.g. through control of initiation, provision of RNA precursors, RNA processing, etc.) and/or translational control. For example, fundamental biological processes such as cell cycle, cell differentiation and cell death are often characterized by the variations in the expression levels of groups of genes.

[0010] Changes in gene expression are also associated with the effects of various chemicals, drugs, toxins, pharmaceutical agents and pollutants on an organism or cells. For example, the lack of sufficient expression of functional tumor suppressor genes and/or the over expression of oncogene/protooncogenes after exposure to an agent could lead to tumorgenesis or hyperplastic growth of cells (Marshall (1991) Cell 64: 313-326; Weinberg (1991) Science 254:1138-1146). Thus, changes in the expression levels of particular genes (e.g. oncogenes or tumor suppressors) may serve as signposts for the presence and progression of toxicity or other cellular responses to exposure to a particular compound.

[0011] Monitoring changes in gene expression may also provide certain advantages during drug screening and development. Often drugs are screened for the ability to interact with a major target without regard to other effects the drugs have on cells. These cellular effects may cause toxicity in the whole animal, which prevents the development and clinical use of the potential drug.

[0012] The present inventors have examined tissue from animals exposed to the known hepatotoxins which induce detrimental liver effects, to identify global changes in gene expression induced by these compounds. These global changes in gene expression, which can be detected by the production of gene expression profiles, provide useful toxicity markers that can be used to monitor toxicity and/or toxicity progression by a test compound. Some of these markers may also be used to monitor or detect various disease or physiological states, disease progression, drug efficacy and drug metabolism.

Identification of Toxicity Markers

[0013] To evaluate and identify gene expression changes that are predictive of toxicity, studies using selected compounds with well characterized toxicity have been conducted by the present inventors to catalogue altered gene expression during exposure in vivo. In the present study, acetominophen, 2-acetylaminofluorene (2-AAF), acyclovir, ANIT, AY-25329, BI liver toxin, chloroform, bicalutamide, carbon tetrachloride, chloroform, CI-1000, clofibrate, colchicine, CPA, diclofenac, diflunisal, dimethylnitrosamine (DMN), dioxin, 17α-ethinylestradiol, gemfibrozil, hydrazine, indomethacin, LPS, menadione, phenobarbital, tacrine, thioacetamide, valproate, Wy-14643, and zileuton were selected as known hepatotoxins.

[0014] Aromatic and aliphatic isothiocyanates are commonly used soil fumigants and pesticides (Shaaya et al. (1995) Pesticide Science 44(3):249-253; Cairns et al. (1988) J Assoc Official Analytical Chemists 71(3):547-550). These compounds are also environmental hazards, because they remain as toxic residues in plants (Cemy et al. (1996) J Agricultural and Food Chemistry 44(12):3835-3839) and because they are released from the soil into the surrounding air (Gan et al. (1998) J Agricutural and Food Chemistry 46(3):986-990).

[0015] Exposure to α-naphthylisothiocyanate (ANIT) has been shown to increase serum levels of total bilirubin, alkaline phosphatase, serum glutamic oxaloacetic transaminase and serum glutamic pyruvic transaminase, while total bile flow was reduced, all of which are indications of severe biliary dysfunction. ANIT also induces jaundice and cholestatis (the condition caused by failure to secrete bile, resulting in plasma accumulation of bile substances, liver cell necrosis and bile duct obstruction) (Tanaka et al. (1993) Clinical and Experimental Pharmacology and Physiology 20:543-547). ANIT fails to produce extensive necrosis, but was found to produce inflammation and edema in the portal tract of the liver (Maziasa et al. (1991) Toxicol Appl Pharmacol 110:365-373). ANIT-induced hepatotoxicity may also characterized by cholangiolitic hepatitis and bile duct damage. Acute hepatotoxicity caused by ANIT in rats is manifested as neutrophil-dependent necrosis of bile duct epithelial cells (BDECs) and hepatic parenchymal cells. These changes mirror the cholangiolitic hepatitis found in humans (Hill (1999) Toxicol Sci 47:118-125).

[0016] Histological changes include an infiltration of polymorphonuclear neutrophils and elevated number of apoptotic hepatocytes (Calvo et al. (2001) J Cell Biochem 80(4):461-470). Other known hepatotoxic effects of exposure to ANIT include a damaged antioxidant defense system, decreased activities of superoxide dismutase and catalase (Ohta et al. (1999) Toxicology 139(3):265-275), and the release of proteases from the infiltrated neutrophils, alanine aminotransferase, cathepsin G, elastase, which mediate hepatocyte killing (Hill et al. (1998) Toxicol Appl Pharmacol 148(1):169-175).

[0017] The effects of the model compound 2-acetylaminofluorene (2-AAF), a strong carcinogen and liver tumor inducer, have been studied in rat livers. 2-AAF has been shown to cause changes in the mitochondria which trigger apoptosis and regenerative cell proliferation. These in turn, cause cirrhosis-like changes in the liver. Exposure to 2-AAF also produces elevated levels of ALT and AST, hemoglobin adducts and foci containing the placental form of glutathione S-transferase. Chromosome aberrations, micronuclei and sister-chromatid exchanges have also been observed (Bitsch et al. (2000) Toxicol Sci 55(1):44-51; Lorenzini et al. (1996) Carcinogenesis 17:1323-1329; Sawada et al. (1991) Mutat Res 251(1):59-69).

[0018] Acyclovir (9-[(2-hydroxyethyl)methyl]guanine, Zovirax®), an anti-viral guanosine analogue, is used to treat herpes simplex virus (HSV), varicella zoster virus (VZV) and Epstein-Barr virus (EBV) infections. The most common adverse effect of acyclovir treatment is damage to various parts of the kidney, particularly the renal tubules, although the drug can also cause damage to the liver and nervous system. Crystalluria, or the precipitation of crystals of acyclovir in the lumina of the renal tubules can occur (Fogazzi (1996) Nephrol Dial Transplant 11(2):379-387). If the drug crystallizes in the renal collecting tubules, obstructive nephropathy and tubular necrosis can result (Richardson (2000) Vet Hum Toxicol 42(6):370-371). Examination of biopsy tissues from affected patients showed dilation of the proximal and distal renal tubules, with loss of the brush border, flattening of the lining cells and focal nuclear loss (Becker et al. (1993) Am J Kidney Dis 22(4):611-615).

[0019] Liver damage in patients taking acyclovir is indicated clinically by abnormal liver function tests (http://www.hopkins-aids.edu/publications/book/ch6_acyclovir.html). Adverse effects in the liver include hepatitis, hyperbilirubinemia and jaundice (Physicians' Desk Reference, 56^{th} ed., p. 1707, Medical Economics Co. Inc., Montvale, N.J., 2002), although findings of hepatotoxicity in animals have not yet been published. Studies by the present inventors on rats treated with acyclovir have found elevated serum levels of BUN and creatinine. Decreased levels of ALT, AST and triglycerides (indicators of liver function) have also been found, but these may be attributed to kidney damage as well as to liver damage. While classic signs of hepatotoxicity in rats due to acyclovir administration have not been published, gene expression changes can be used to predict that the drug will be a liver toxin in humans.

[0020] Acetominophen (APAP) is a widely used analgesic and antipyretic agent that is an effective substitute for aspirin. Although acetaminophen does not have anti-inflammatory properties, it is preferably given to patients with ulcers or patients in whom prolonged clotting times would not be desirable. It also preferably taken by people who do not tolerate aspirin well.

[0021] Acetominophen is metabolized to N-acetyl-p-benzoquinoneimine (NAPQI) by N-hydroxylation in a cytochrome P450-mediated process. This highly reactive intermediate, which reacts with sulfhydryl groups in glutathione, and in other liver proteins following the depletion of glutathione, can cause centrilobular hepatic necrosis (particularly in zone 3), renal tubular necrosis, and hepatic and renal failure (Goodman and Gilman's The Pharmacological Basis of Therapeutics, Ninth Ed., Hardman et al., eds., pp. 631-633, McGraw-Hill, New York, 1996; Chanda et al. (1995) Hepatology 21(2):477-486). Less serious side effects include skin rashes (erythemas and urticarias) and allergic reactions.

[0022] Upon treatment of rats with acetaminophen, hepatotoxicity can be observed 24 hours after dosing, as determined by statistically significant elevations of ALT and AST in the serum and by hepatocellular necrosis visualized at the light microscopic level (Hessel et al. (1996) Braz J Med Biol Res 29(6):793-796; Bruck et al. (1999) Dig Dis Sci 44(6):1228-1235). High, but non-lethal, doses of acetaminophen given to rats also produced elevated levels of genes involved in hepatic acute phase response and liver cell maintenance and repair: arginase, beta-fibrinogen, alpha 1-acid glycoprotein, alpha-tubulin, histone 3, TGF beta and cyclin d. Expression levels of genes regulated by the cell cycle were decreased (Tygstrup et al. (1996) J Hepatol 25(2):183-190; Tygstrup et al. (1997) J Hepatol 27(1):156-162). In mice, expression levels of genes that encode growth arrest and cell cycle regulatory proteins were increased, along with expression levels of stress-induced genes, transcription factor LRG-21, SOCS-2 (cytokine signaling repressor) and PAI-1 (plasminogen activator inhibitor-1) (Reilly et al. (2001) Biochem Biophys Res Comm 282(1):321-328).

[0023] AY-25329, a proprietary compound, is a phenothiazine that has been shown to be toxic in liver and in kidney tissue, where it can cause nephrosis. Phenothiazines are a class of psychoactive drugs that are used to treat schizophrenia, paranoia, mania, hyperactivity in children, some forms of senility, and anxiety (http://www.encyclopedia.com/articlesnew/36591.html). Side effects associated with prolonged use of these drugs are reduced blood pressure, Parkinsonism, reduction of motor activity, and visual impairment.

[0024] The present inventors have noted indications of liver and renal effects of AY-25329 by changes in serum chemistry. As early as 6 hours after the first dose, statistically significant increases in serum levels of creatinine, BUN, ALT, triglycerides and cholesterol were observed. Most of these markers of renal and liver dysfunction remained altered throughout the 14 day study period. Light microscopic analysis revealed effects in the liver as early as 6 and 24 hours, as evidenced by an increased number of hepatocytic mitotic figures and decreased glycogen content. Following 14 days of repeated dosing, nephrosis and alterations in the peripheral lobes of the liver and in the cytoplasm of hepatocytes were evident in rats dosed with 250 mg/kg/day of AY-25329.

[0025] BI liver toxin, a model compound, produces cardiac changes (QT_{C} prolongation) in dogs and liver and cardiac changes in rats. Liver samples collected from rats over a four-week period showed that this compound induces sedation, lowers body weight, increases liver weight, and slightly increases serum levels of AST, ALP and BUN. Over a three-month period, cardiovascular effects are observed as well.

[0026] The toxicological profile of bicalutamide, a drug for treating prostate-cancer, is closely associated with the drug's non-steroidal anti-androgenic activity. Bicalutamide produces typical effects of an anti-androgen, including atrophy of the prostate, testis and seminal vesicles and Leydig cell hyperplasia resulting from inhibition of pituitary feedback by testosterone. Benign Leydig cell tumors and elevated levels of CYP3A1 were seen in rats, but not in humans, although liver toxicity in humans has been observed. Bicalutamide causes liver enlargement and is a mixed function oxidase inducer in rodents and dogs. These effects lead to thyroid hypertrophy and adenoma in the rat and hepatocellular carcinoma in the male mouse (Iswaran et al. (1997) J Toxicol Sci 22(2):75-88; Oh et al. (2002) Urology 60(3 Suppl 1):87-93; McKillop et al. (1998) Xenobiotica 28(5):465-478). In prostate cancer patients treated with bicalutamide, elevated levels of the liver enzymes glutamic-oxalacetic transaminase (GOT), glutamic-pyruvic transaminase (GPT), alkaliphosphatase (AL-P) and gamma guanosine 5′-triphosphate (gamma-GTP) have been noted, along with breast pain, gynecomastia and hot flashes (Kotake et al. (1996) Hinyokika Kiyo 42(2):143-153).

[0027] The pathogenesis of acute carbon tetrachloride (CCl₄)-induced hepatotoxicity follows a well-characterized course in humans and experimental animals resulting in centrilobular necrosis and steatosis, followed by hepatic regeneration and tissue repair. Severity of the hepatocellular injury is also dose-dependent and may be affected by species, age, gender and diet.

[0028] Differences in susceptibility to CCl₄ hepatotoxicity are primarily related to the ability of the animal model to metabolize CCl₄ to reactive intermediates. CCl₄-induced hepatotoxicity is dependent on CCl₄ bioactivation to trichloromethyl free radicals by cytochrome P450 enzymes (CYP2E1), localized primarily in centrizonal hepatocytes. Formation of the free radicals leads to membrane lipid peroxidation and protein denaturation resulting in hepatocellular damage or death.

[0029] The onset of hepatic injury is rapid following acute administration of CCl₄ to male rats. Morphologic studies have shown cytoplasmic accumulation of lipids in hepatocytes within 1 to 3 hours of dosing, and by 5 to 6 hours, focal necrosis and hydropic swelling of hepatocytes are evident. Centrilobular necrosis and inflammatory infiltration peak by 24 to 48 hours post dose. The onset of recovery is also evident within this time frame by increased DNA synthesis and the appearance of mitotic figures. Removal of necrotic debris begins by 48 hours and is usually completed by one week, with full restoration of the liver by 14 days.

[0030] Increases in serum transaminase levels also parallel CCl₄-induced hepatic histopathology. In male Sprague Dawley (SD) rats, alanine aminotrasferase (ALT) and aspartate aminotransferase (AST) levels increase within 3 hours of CCl₄ administration (0.1, 1, 2, 3, 4 mL/kg, ip; 2.5 mL/kg, po) and reach peak levels (approximately 5-10 fold increases) within 48 hours post dose. Significant increases in serum α-glutathione s-transferase (α-GST) levels have also been detected as early as 2 hours after CCl₄ administration (25 μL/kg, po) to male SD rats.

[0031] At the molecular level, induction of the growth-related proto-oncogenes, c-fos and c-jun, is reportedly the earliest event detected in an acute model of CCl₄-induced hepatotoxicity (Schiaffonato et al. (1997) Liver 17:183-191). Expression of these early-immediate response genes has been detected within 30 minutes of a single dose of CCl₄ to mice (0.05-1.5 mL/kg, ip) and by 1 to 2 hours post dose in rats (2 mL/kg, po; 5 mL/kg,po) (Schiaffonato et al., supra, and Hong et al. (1997) Yonsei Medical J 38:167-177). Similarly, hepatic c-myc gene expression is increased by 1 hour following an acute dose of CCl₄ to male SD rats (5 mL/kg, po) (Hong et al., supra). Expression of these genes following exposure to CCl₄ is rapid and transient. Peak hepatic mRNA levels for c-fos, c-jun, and c-myc, after acute administration of CCl₄ have been reported at 1 to 2 hours, 3 hours, and 1 hour post dose, respectively.

[0032] The expression of tumor necrosis factor-α (TNF-α) is also increased in the livers of rodents exposed to CCl₄, and TNF-α has been implicated in initiation of the hepatic repair process. Pre-treatment with anti-TNF-α antibodies has been shown to prevent CCl₄-mediated increases in c-jun and c-fos gene expression, whereas administration of TNF-α induced rapid expression of these genes (Bruccoleri et al. (1997) Hepatol 25:133-141). Up-regulation of transforming growth factor-β (TGF-β) and transforming growth factor receptors (TBRI-III) later in the repair process (24 and 48 hours after CCl₄ administration) suggests that TGF-β may play a role in limiting the regenerative response by induction of apoptosis (Grasl-Kraupp et al. (1998) Hepatol 28:717-7126).

[0033] Chloroform (CHCl₃) is an obsolete anesthetic that was abandoned due to its hepatotoxicity. The pathogenesis of acute CHCl₃-induced hepatotoxicity follows a well-characterized course in humans and experimental animals resulting in centrilobular necrosis and steatosis, followed by hepatic regeneration and tissue repair. Severity of the hepatocellular injury is dose-dependent and may be affected by the animal species, strain, age, gender, diet, vehicle and/or route of administration (Lilly et al. (1997) Fund Appl Toxicol 40:101-110 and Raymond et al. (1997) J Toxicol Environ Health 52:463-476).

[0034] Differences in susceptibility to CHCl₃ toxicity are considered related to differential metabolism. CHCl₃-induced hepatotoxicity is primarily mediated by formation of reactive species, such as phosgene and trichloromethyl free radicals, by cytochrome P450 enzymes (CYP2E1). CHCl₃ hepatotoxicity is also increased by exposure to agents that induce cytochrome P450 (i.e., ethanol, phenobarbital), and deplete hepatic glutathione (GSH). Formation of the free radicals leads to membrane lipid peroxidation and protein denaturation resulting in hepatocellular damage or death.

[0035] Chronic administration of CHCl₃ to rodents induces an increased incidence of hepatic and renal carcinomas by a nongenotoxic-cytotoxic mode of action. Carcinogenicity of CHCl₃ is considered secondary to chemically-induced cytotoxicity with subsequent compensatory cell proliferation, rather than to direct interaction of CHCl₃ or its metabolites with DNA.

[0036] The onset of hepatic toxicity is rapid following acute administration of CHCl₃ to male rats. Morphologic studies have shown cytoplasmic accumulation of lipids in hepatocytes within 1 to 3 hours of dosing, and by 5 to 6 hours, focal necrosis and hydropic swelling of hepatocytes are evident. Centrilobular necrosis and inflammatory infiltration peak by 24 to 48 hours post dose. The onset of recovery is also evident within this time frame by increased DNA synthesis and the appearance of mitotic figures. Removal of necrotic debris begins by 48 hours and is usually completed by one week, with full restoration of the liver by 14 days.

[0037] In studies on rats and mice, significant changes in clinical parameters included increased levels of BUN and serum creatinine and decreased levels of phosphatidyl-ethanolamine and tissue glutathione (GSH). There is a strong correlation between the formation of the phospholipid adducts, GSH depletion and liver toxicity (Di Consiglio et al. (2001) Toxicology 159(1-2):43-53). Experiments on mice have shown that exposure to chloroform also increases the liver weight:body weight ratio and the proliferating cell nuclear antigen-labeling index. Decreased levels of 5-methylcytosine and of the methylated c-myc gene (associated with increased carcinogenic activity) were also found (Coffin et al. (2000) Toxicol Sci 58(2):243-252). Other studies on mice have noted that elevated levels of the P450 cytochromes, such as P450 2E1 and CYP2A5, are involved in cytotoxic metabolic conversions (Constan et al. (1999) Toxicol Appl Pharmacol 160(2):120-126; Camus-Randon et al. (1996) Toxicol Appl Pharmacol 138(1):140-148).

[0038] Studies of chloroform poisoning in humans have noted hepatocellular necrosis characterized by decreased levels of serum biomarkers (AST, ALT, alkaline phosphatase and lactate dehydrogenase) and increased levels of markers of hepatocellular regeneration (alpha-fetoprotein, retinol-binding protein, gamma-glutamyl transferase and des-gamma-carboxyprothrombin) (Horn et al. (1999) Am J Clin Pathol 112(3):351-357).

[0039] At the molecular level, CHCl₃-induced changes in mRNA levels of 2 known genes, MUSTI21 (a mouse primary response gene induced by growth factors and tumor promoters) and MUSMRNAH (a gene highly homologous to a gene isolated from a prostate carcinoma cell line), and 2 novel genes (MUSFRA and MUSFRB) have been identified by differential display in regenerating mouse liver (Kegelmeyer et al. (1997) Molecul Carcin 20:288-297). These genes have been postulated to play a role in hepatic regeneration or possibly CHCl₃-induced hepatocarcinogenesis.

[0040] CI-1000 (4H-pyrrolo:3,2-d:pyrimidin-4-one, 2-amino-3,5-dihydro-7-(3-thienylmethyl)-monohydrochloride monohydrate) is a compound with anti-inflammatory properties. After treatment with CI-1000, increased serum ALT levels, a standard marker of liver toxicity, were observed in dogs.

[0041] Clofibrate, a halogenated phenoxypropanoic acid derivative (ethyl ester of clofibric acid), is an antilipemic agent. The exact mechanism by which clofibrate lowers serum concentrations of triglycerides and low-density lipoprotein (LDL) cholesterol, as well as raising high-density lipoprotein (HDL) cholesterol is uncertain. The drug has several antilipidemic actions, including activating lipoprotein lipase, which enhances the clearance of triglycerides and very-low-density lipoprotein (VLDL) cholesterol, inhibition of cholesterol and triglyceride biosynthesis, mobilization of cholesterol from tissues, increasing fecal excretion of neutral steroids, decreasing hepatic lipoprotein synthesis and secretion, and decreasing free fatty acid release.

[0042] Clofibrate has a number of effects on the rat liver, including hepatocellular hypertrophy, cellular proliferation, hepatomegaly, induction of CYP450 isozymes, and induction of palmitoyl CoA oxidation. Long term administration of clofibrate causes increased incidence of hepatocellular carcinoma, benign testicular Leydig cell tumors, and pancreatic acinar adenomas in rats. Clofibrate induces proliferation of peroxisomes in rodents and this effect, rather than genotoxic damage, is believed to be the causative event in rodent carcinogenesis (AHFS Drug Information Handbook 2001, McEvoy, ed., pp. 1735-1738; Electronic Physicians' Desk Reference-Atromid-S (clofibrate) at www.pdr.net; Brown and Goldstein, “Drugs used in the treatment of hyperliproteinemias,” in Goodman and Gilman's The Pharmacological Basis of Therapeutics, Eighth ed., Goodman et al., eds., pp. 874-896, Pergamon Press, New York, 1990).

[0043] Clofibrate also increases hepatic lipid content and alters its normal composition by significantly increasing levels of phosphatidylcholine and phosphatidyl-ethanolamine (Adinehzadeh et al. (1998) Chem Res Toxicol 11(5):428-440). A rat study of liver hyperplasia and liver tumors induced by peroxisome proliferators revealed that administration of clofibrate increased levels of copper and altered copper-related gene expression in the neoplastic liver tissues. Down-regulation of the ceruloplasmin gene and of the Wilson's Disease gene (which encodes P-type ATPase), along with up-regulation of the metallothionein gene, were noted in these tissues (Eagon et al. (1999) Carcinogenesis 20(6): 1091-1096). Clofibrate-induced peroxisome proliferation and carcinogenicity are believed to be rodent-specific, and have not been demonstrated in humans.

[0044] Colchicine, an alkoloid of Colchicum autumale, is an antiinflammatory agent used in the treatment of gouty arthritis (Goodman & Gilman's The Pharmacological Basis of Therapeutics 9^{th} ed., p. 647, J. G. Hardman et al., Eds., McGraw Hill, New York, 1996). An antimitotic agent, colchicine binds to tubulin which leads to depolymerization and disappearance of the fibrillar microtubules in granulocytes and other motile cells. As a result, the migration of granulocytes into the inflamed area is inhibited, thereby suppressing the inflammatory response.

[0045] Some common, mild side effects associated with colchicine treatment are gastrointestinal disturbances, loss of appetite and hair loss. More serious side effects include hepatotoxicity, nausea, vomiting, and severe diarrhea and/or abdominal pain. Colchicine overdose can induce convulsions, coma, and multiorgan failure with a high incidence of mortality. Renal failure is multifactorial and related to prolonged hypotension, hypoxemia, sepsis, and rhabdomyolysis. In rats, less dramatic doses have been shown to inhibit the secretion of many endogenous proteins such as insulin and parathyroid hormone. Signs of liver damage are leakage of marker compounds, such as lactate dehydrogenase and albumin, into plasma and bile (Dvorak et al. (2002) Toxicol In Vitro 16(3):219-227; Crocenzi et al. (1997) Toxicology 121(2):127-142).

[0046] Cyproterone acetate (CPA) is a potent androgen antagonist and has been used to treat acne, male pattern baldness, precocious puberty, and prostatic hyperplasia and carcinoma (Goodman & Gilman's The Pharmacological Basis of Therapeutics 9^{th} ed., p. 1453, J. G. Hardman et al., Eds., McGraw Hill, New York, 1996). Additionally, CPA has been used clinically in hormone replacement therapy to protect the endometrium and decrease menopausal symptoms and the risk of osteoporotic fracture (Schneider, “The role of antiandrogens in hormone replacement therapy,” Climacteric 3 (Suppl. 2): 21-27 (2000)).

[0047] In experiments with rats, CPA was shown to induce unscheduled DNA synthesis in vitro. After a single oral dose, continuous DNA repair activity was observed after 16 hours. CPA also increased the occurrence of S phase cells, which corroborated the mitogenic potential of CPA in rat liver (Kasper et al. (1996) Carcinogenesis 17(10): 2271-2274). CPA has also been shown to produce cirrhosis in humans (Garty et al. (1999) Eur J Pediatr 158(5): 367-370).

[0048] Diclofenac, a non-steroidal anti-inflammatory drug, has been frequently administered to patients suffering from rheumatoid arthritis, osteoarthritis, and ankylosing spondylitis. Following oral administration, diclofenac is rapidly absorbed and then metabolized in the liver by cytochrome P450 isozyme of the CYC2C subfamily (Goodman & Gilman's The Pharmacological Basis of Therapeutics 9^{th} ed., p. 637, J. G. Hardman et al., eds., McGraw Hill, New York, 1996). In addition, diclofenac has been applied topically to treat pain due to corneal damage (Jayamanne et al., (1997) Eye 11(Pt. 1): 79-83; Domic et al. (1998) Am J Ophthalmol 125(5): 719-721).

[0049] Although diclofenac has numerous clinical applications, adverse side-effects have been associated with the drug, such as corneal complications, including corneal melts, ulceration, and severe keratopathy (Guidera et al. (2001) Ophthalmology 108(5): 936-944). Another study investigated 180 cases of patients who had reported adverse reactions to diclofenac to the Food and Drug Administration (Banks et al. (1995) Hepatology 22(3): 820-827). Of the 180 reported cases, the most common symptom was jaundice (75% of the symptomatic patients). Liver sections were taken and analyzed, and hepatic injury was apparent one month after drug treatment. An additional report showed that a patient developed severe hepatitis five weeks after beginning diclofenac treatment for osteoarthritis (Bhogaraju et al. (1999) South Med J 92(7): 711-713).

[0050] In one study on diclofenac-treated Wistar rats (Ebong et al. (1998) Afr J Med Sci 27(3-4): 243-246), diclofenac treatment induced an increase in serum chemistry levels of alanine aminotransferase, aspartate aminotransferase, methaemoglobin, and total and conjugated bilirubin. Additionally, diclofenac enhanced the activity of alkaline phosphatase and 5′nucleotidase. A study on humans revealed elevated levels of hepatic transaminases and serum creatine when compared to the control group (McKenna et al. (2001) Scand J Rheumatol 30(1): 11-18).

[0051] Diflunisal, a non-steroidal anti-inflammatory drug (NSAID), is a difluorophenyl derivative of salicylic acid (Goodman & Gilman's The Pharmacological Basis of Therapeutics 9^{th} ed., p. 631, J. G. Hardman et al., Eds., McGraw Hill, New York, 1996). It is most frequently used in the treatment of osteoarthritis and musculoskeletal strains. NSAIDs have analgesic, antipyretic and anti-inflammatory actions, however, hepatotoxicity is known to be an adverse side effect of NSAID treatment (Masubuchi et al. (1998) J Pharmacol Exp Ther 287:208-213). Diflunisal has been shown to be less toxic than other NSAIDs, but it can eventually have deleterious effects on platelet or kidney function (Bergamo et al. (1989) Am J Nephrol 9:460-463). Other side effects that have been associated with diflunisal treatment are diarrhea, dizziness, drowsiness, gas or heartburn, headache, nausea, vomiting, and insomnia (http://arthritisinsight.com/medical/meds/dolobid.html).

[0052] In a comparative hepatotoxicity study of 18 acidic NSAIDs, diflunisal was shown to increase LDH leakage in rat hepatocytes, a marker for cell injury, when compared to control samples. Additionally, treatment with diflunisal led to decreased intracellular ATP concentrations. In a study comparing the effects of diflunisal and ibuprofen, (Muncie and Nasrallah (1989) Clin Ther 11:539-544) both drugs appeared to cause abdominal cramping, even during short-term usage. Because the toxic dosages were selected to be below the level at which gastric ulceration occurs, more severe gastrointestinal effects were not detected. But, increased serum levels of creatinine, a sign of renal injury, were also observed (Muncie et al. (1989) Clin Ther 11:539-544).

[0053] Dioxin, an environmental and workplace toxin, is the name given to a class of compounds that are bi-products in the manufacture of chlorinated herbicides, pesticides and plastics. The most toxic and carcinogenic of these is 2,3,7,8-tetrachlorodibenzo-p-dioxin (2,3,7,8-TCDD). Exposure to dioxin increases expression of the aromatic hydrocarbon (Ah) receptor and also increases the production of reactive oxygen species in the mitochondria. Dioxin also increases mitochondrial levels of CYP1A1, CYP1A2 and glutathione, as well as hepatocyte levels of SOD and enzymes associated with oxidative stress (Senft et al. (2002) Free Radic Biol Med 33: 1268-1278; Kern et al. (2002) Toxicology 171: 117-1125.

[0054] Another model compound, dimethylnitrosamine (DMN), is a known carcinogen and inducer of liver fibrosis and lipid peroxidation. DMN causes oxidative stress in liver cells, which may be the link between chronic liver damage and liver fibrosis. Rats treated with DMN showed diffuse fibronectin deposition, elevated hydroxyproline levels (an indicator of fibrosis), increased levels of collagens, fibrous septa, and impaired oxidative balance. Serum levels of ALT and malondialdehyde (MDA) were increased, while serum levels of SOD were decreased (Vendemiale et al. (2001) Toxicol Appl Pharmacol 175: 130-139; Liu et al. (2001) Zhonghua Gan Zang Bing Za Zhi 9 Suppl: 18-20). Other studies in rats have noted severe centrilobular congestion and haemorrhagic necrosis several days after a three-day period of DMN administration. Following additional periods of DMN treatment, the rats developed centrilobular necrosis and intense neutrophilic infiltration, which progressed to severe centrilobular necrosis, fiber deposition, focal fatty deposits, bile duct proliferation, bridging necrosis and fibrosis around the central veins (cirrhosis-like symptoms). A decrease in total protein and increase in DNA were also observed (George et al. (2001) Toxicology 156: 129-138).

[0055] 17α-ethinylestradiol, a synthetic estrogen, is a component of oral contraceptives, often combined with the progestational compound norethindrone. It is also used in post-menopausal estrogen replacement therapy (PDR 47^{th} Ed., pp. 2415-2420, Medical Economics Co., Inc., Montvale, N.J., 1993; Goodman & Gilman's The Pharmalogical Basis of Therapeutics 9^{th} Ed., pp. 1419-1422, J. G. Hardman et al. Eds., McGraw Hill, New York, 1996).

[0056] The most frequent adverse effects of 17α-ethinylestradiol usage are increased risks of cardiovascular disease: myocardial infarction, thromboembolism, vascular disease and high blood pressure, and of changes in carbohydrate metabolism, in particular, glucose intolerance and impaired insulin secretion. There is also an increased risk of developing benign hepatic neoplasia. Because this drug decreases the rate of liver metabolism, it is cleared slowly from the liver, and carcinogenic effects, such as tumor growth, may result.

[0057] 17α-ethinylestradiol has been shown to cause a reversible intrahepatic cholestasis in male rats, mainly by reducing the bile-salt-independent fraction of bile flow (BSIF) (Koopen et al. (1998) Hepatology 27: 537-545). Plasma levels of bilirubin, bile salts, aspartate aminotransferase (AST) and alanine aminotransferase (ALT) in this study were not changed. This study also showed that 17α-ethinylestradiol produced a decrease in plasma cholesterol and plasma triglyceride levels, but an increase in the weight of the liver after 3 days of drug administration, along with a decrease in bile flow. Further results from this study are as follows. The activities of the liver enzymes leucine aminopeptidase and alkaline phosphatase initially showed significant increases, but enzyme levels decreased after 3 days. Bilirubin output increased, although glutathione (GSH) output decreased. The increased secretion of bilirubin into the bile without affecting the plasma level suggests that the increased bilirubin production must be related to an increased degradation of heme from heme-containing proteins. Similar results were obtained in another experiment (Bouchard et al., (1993) Liver 13: 193-202) in which the livers were also examined by light and electron microscopy. Daily doses of 17α-ethinylestradiol have been shown to cause cholestasis as well, although, following drug treatment, bile flow rates gradually returned to normal (Hamada et al. (1995) Hepatology 21: 1455-1464). Liver hyperplasia, possibly in response to the effects of tumor promoters, has also been observed (Mayol (1992) Carcinogenesis 13: 2381-2388).

[0058] The lipid-lowering drug gemfibrozil is a know peroxisome proliferator in liver tissue, causing both hyperplasia and enlargement of liver cells. Upon exposure to gemfibrozil, hepatocarcinogenesis has been observed in rats and mice, and a decrease in alpha-tocopherol and an increase in DT-diaphorase activity have been observed in rats and hamsters (impaired antioxidant capability). Peroxisome proliferators increase the activities of enzymes involved in peroxisomal beta-oxidation and omega-hydroxylation of fatty acids, which results in oxidative stress (O'Brien et al. (2001) Toxicol Sci 60: 271-278; Carthew et al. (1997) J Appl Toxicol 17: 47-51).

[0059] Hydrazine (NH₂═NH₂), is a component of many industrial chemicals, such as aerospace and airplane fuels, corrosion inhibitors, dyes and photographic chemicals. Its derivatives are used in pharmaceuticals such as hydrazine sulphate, used to treat cachexia in cancer patients, isoniazid, an anti-tuberculosis drug, and hydralazine, an anti-hypertensive. These drugs are metabolized in vivo to produce hydrazine, among other by-products. Consequently, exposure to hydrazine is by direct contact, e.g., among military and airline personnel, or the result of its production in the body, e.g., in patients with cancer or high blood pressure.

[0060] Studies on rat hepatocytes have shown that hydrazine causes a dose-dependent loss of viability, leakage of LDH, depletion of GSH and ATP and a decreased rate of protein synthesis (Delaney et al. (1995) Xenobiotica 25: 1399-1410). When administered to rats, hepatotoxic changes, characterized by GSH and ATP depletion and induction of fatty liver (increases in liver weight and triglycerides, with the appearance of fatty droplets, swelling of mitochondria and appearance of microbodies) were also found to be dose-dependent (Jenner et al. (1994) Arch Toxicol 68: 349-357; Scales et al. (1982) J Toxicol Environ Health 10: 941-953). The hepatoxicity, as well as renal toxicity, associated with hydrazine exposure has been linked to free radical damage resulting from oxidative metabolism by cytochrome P4502E1 (CYP2E1), which catalyzes the conjugation of free radicals with reduced glutathione. Although exposure to hydrazine and several hydrazine derivatives increased enzyme levels in kidney tissue, increased enzyme levels were not detected in liver tissue (Runge-Morris et al. (1996) Drug Metab Dispos 24: 734-737).

[0061] The mutagenic and hepatocarcinogenic effects of hydrazine were examined in hamster livers. In vivo, hydrazine reacts with formaldehyde to form formaldehyde hydrazone (CH₂═N—NH₂), an alkylating intermediate that methylates guanine in DNA. Upon treatment with hydrazine, liver DNA showed the presence of methylated guanine, DNA adducts and the impairment of maintenance methylation (impaired methylation of deoxycytosine). Hepatic adenomas and carcinomas also developed in a dose-dependent manner and could be correlated with decreased maintenance methylation (FitzGerald et al. (1996) Carcinogenesis 17: 2703-2709).

[0062] Indomethacin is a non-steroidal antiinflammatory, antipyretic and analgesic drug commonly used to treat rheumatoid arthritis, osteoarthritis, ankylosing spondylitis, gout and a type of severe, chronic cluster headache characterized by many daily occurrences and jabbing pain. This drug acts as a potent inhibitor of prostaglandin synthesis; it inhibits the cyclooxygenase enzyme necessary for the conversion of arachidonic acid to prostaglandins (PDR 47^{th} Ed., Medical Economics Co., Inc., Montvale, N.J., 1993; Goodman & Gilman's The Pharmalogical Basis of Therapeutics 9^{th} Ed., J. G. Hardman et al. eds., pp. 1074-1075, 1089-1095, McGraw Hill, New York, 1996; Cecil Textbook of Medicine, 20^{th} Ed., part XII, pp. 772-773, 805-808, J. C. Bennett and F. Plum Eds., W.B. Saunders Co., Philadelphia, 1996).

[0063] The most frequent adverse effects of indomethacin treatment are gastrointestinal disturbances, usually mild dyspepsia, although more severe conditions, such as bleeding, ulcers and perforations can occur. Hepatic involvement is uncommon, although some fatal cases of hepatitis and jaundice have been reported. Renal toxicity can also result, particularly after long-term administration. Renal papillary necrosis has been observed in rats, and interstitial nephritis with hematuria, proteinuria and nephrotic syndrome have been reported in humans. Patients suffering from renal dysfunction risk developing a reduction in renal blood flow, because renal prostaglandins play an important role in renal perfusion.

[0064] In rats, although indomethacin produces more adverse effects in the gastrointestinal tract than in the liver, it has been shown to induce changes in hepatocytic cytochrome P450. In one study, no widespread changes in the liver were observed, but a mild, focal, centrilobular response was noted. Serum levels of albumin and total protein were significantly reduced, while the serum level of urea was increased. No changes in creatinine or aspartate aminotransferase (AST) levels were observed (Falzon et al. (1985) Br J exp Path 66: 527-534). In another rat study, a single dose of indomethacin was shown to reduce liver and renal microsomal enzymes, including CYP450, and cause lesions in the GI tract (Fracasso et al. (1990) Agents Actions 31: 313-316).

[0065] Menadione (vitamin K₃) is a fat-soluble vitamin precursor that is converted into menaquinone in the liver. The primary known function of vitamin K is to assist in normal blood clotting, but it may also play a role in bone calcificaton. Menadione is a quinone compound that induces oxidative stress. It has been used as an anticancer agent and radiosensitizer and can produce toxicity in the kidney, lung, heart, and liver. In the kidney, signs of toxicity are dose-dependent, ranging from minor degranulation of tubular cells at lower doses to tubular dilatation, formation of protein casts in the renal tubules, calcium mineralization, vacuolization in the proximal and distal renal tubules, granular degeneration in the cortex and necrosis and apoptosis (Chiou et al. (1997) Toxicology 124: 193-202). Toxic effects in the liver include depletion of glutathione, increased levels of Ca²⁺, increased lipid peroxidation and protein thiol oxidation, DNA strand breaks, and plasma membrane protrusions (blebs), which lead to cell degeneration. Oxidative stress induced by menadione also causes cytoskeletal abnormalities, which are related to the surface blebs (Chiou et al. (1998) Proc Natl Sci Counc Repub China B 22: 13-21; Mirabelli et al. (1988) Arch Biochem Biophys 264: 261-269).

[0066] Phenobarbital is used as an anti-epileptic, sedative or hypnotic drug and can also be used to treat neuroses with related tension states, such as hypertension, coronary artery disease, gastrointestinal disturbances and preoperative apprehension. Phenobarbital is also found in medications to treat insomnia and headaches (Remington: The Science and Practice of Pharmacy, 19th Ed., A. R. Gennaro ed., pp. 1164-1165, Mack Publishing Co., Easton, Pa., 1995). Although liver toxicity is not a common side effect, the drug produces elevated levels of CYP2B1, and incidences of cholestasis and hepatocellular injury have been found (Selim et al. (1999) Hepatology 29: 1347-135; Gut et al. (1996) Environ Health Perspect 104: 1211-1218).

[0067] Tacrine (1,2,3,4-tetrahydro-9-aminoacridine-hydrochloride), a strong acetylcholinesterase (AChE) inhibitor, is used in the treatment of mild to moderate cases Alzheimer's dimentias. Alzheimer's patients have synaptic loss, neuronal atrophy and degeneration of cholinergic nuclei in the forebrain, which are associated with reduced oxidative metabolism of glucose and decreased levels of ATP and acetyl CoA. Administration of AChE inhibitors, such as tacrine, is designed to increase cholinergic activity to combat this loss (Weinstock (1995) Neurodegeneration 4: 349-356). The effect seen in the patients is a reversal of the cognitive and functional decline, but the drug does not appear to change the neurodegenerative process (Goodman & Gilman's The Pharmacological Basis of Therapeutics 9^{th} Ed., Hardman et al. eds., p. 174, McGraw Hill, New York, 1996).

[0068] Hepatotoxicty caused by tacrine is typically reversible, although cases of severe hepatotoxicity have been seen (Blackard et al. (1998) J Clin Gastroenterol 26: 57-59). The toxicity is characterized by decreased levels of protein synthesis and the release of lactate dehydrogenase, as well as by increased transaminase levels and decreased levels of ATP, glycogen and glutathione. The decrease in protein synthesis may represent a signal leading to cell death (Lagadic-Gossmann et al. (1998) Cell Biol Toxicol 14: 361-373).

[0069] Preclinical studies have failed to detect adverse hepatic events, although tacrine displayed cytotoxicity to human hepatoma cell lines and primary rat hepatocytes (Viau et al. (1993) Drug Chem Toxicol 16: 227-239). While hepatotoxicity has been found in humans, in vivo rat studies have not shown a correlation between tacrine exposure and hepatotoxicity, and the mechanism of action is not completely understood. An in vitro study comparing the reaction of human and rat liver microsomal preparations to tacrine (Woolf et al. (1993) Drug Metab Dispos 21: 874-882) showed that the two species reacted differently to the drug, suggesting that the rat may not be the best model for monitoring tacrine-induced elevations in liver marker enzymes (Woolf et al. (1993) Drug Metab Dispos 21: 874-882).

[0070] While tacrine does not reveal classic signs of hepatotoxicity in rats, gene expression changes due to tacrine administration can be used to predict that the drug will be a liver toxin in humans. This suggests that toxicogenomics might be able to detect drugs that prove to be toxic in the clinic even when classical but more crude measures in preclinical screening fail to detect toxicity.

[0071] Thioacetamide's only significant commercial use is as a replacement for hydrogen sulfide in qualitative analyses (IARC, Vol. 7, 1974). It has also been used as a fungicide, an organic solvent in the leather, textile and paper industries, as an accelerator in the vulcanization of buna rubber, and as a stabilizer of motor fuel. The primary routes of human exposure are inhalation and skin contact with products in which thioacetamide was used as a solvent (9th Report on Carcinogens, U.S. Dept. of Health and Human Services, Public Health Service, National Toxicology Program, http://ehp.niehs.nih.gov/roc/toc9.html). Thioacetamide is metabolized to a nonionic electrophile, leading to oxidative stress and other injurious events; both cytochrome P4502E1 and the flavin-containing monooxygenase system have been implicated in this bioactivation (R. Snyder & L. S. Andrews, Toxic Effects of Solvents and Vapors, in Casarett & Doull's Toxicology: The Basic Science of Poisons, Klaasen, ed., p. 737, McGraw-Hill, New York, 1996; Smith et al. (1983) Toxicol Appl Pharmacol 70: 467-479; Jurima-Romet et al. (1993) Biochem Pharmacol 14:46(12):2163-2170).

[0072] In exposed rats, thioacetamide was shown to accumulate in the liver and kidney, resulting in elevated levels of serum total bilirubin, aspartate aminotransferase, alanine aminotransferase, BUN, creatinine and TNFα. Impaired clearance of the toxin and increased secretion of TNFα are related to the progression of toxic effects in the liver and kidney (Nakatani et al. (2001) Liver 21(1):64-70). Additional histological changes in kidney tissue include glomerular tuft collapse and interstitial haemorrhage (Caballero et al. (2001) Gut 48: 34-40).

[0073] In the liver, low acute doses of thioacetamide induce apoptosis, while high acute doses induce necrosis (Casarett & Doull's Toxicology, supra). Long term exposure induces cirrhosis and tumors (Risteli et al. (1976) Biochem J 158: 361-367). The acute liver injury is characterized by severe penvenous necrosis, immediately followed by hepatocellular regeneration and this necrosis. Nitric oxide synthase activity and nitric oxide release are thought to play a role in the pathophysiological mechanisms that trigger liver regeneration following thioacetamide exposure (Ala-Kokko et al. (1987) Biochem J 244: 75-79). Exposure to thioacetamide also decreases levels of antioxidants, such as SOD, glutathione peroxidase and uric acid. It also increases apoptosis, along with caspase-3 activity, and has been observed to affect hepatic nitrogen metabolism. Rates of urea production and excretion were decreased, as well as glutamate dehydrogenase activity and glutamine synthetase activity. Mitogenic activity and DNA synthesis, however, were observed to increase (Abul et al. (2002) Anat Histo Embryol 31: 66-71; Hayami et al. (1999) Biochem Pharmacol 58: 1941-1943; Masumi et al. (1999) Toxicology 135: 21-31; Maier et al. (1991) Arch Toxicol 65: 454-464).

[0074] Valproate (n-dipropylacetic acid, Depakene®) is routinely used to treat several types of epileptic seizures-absence seizures, myoclonic seizures and tonic-clonic seizures. Most other anti-epileptics are effective against only one type. Valproate acts on neurons to inhibit the sustained repetitive firing caused by depolarization of cortical or spinal cord neurons, and a prolonged recovery of inactivated voltage-activated Na⁺ channels follows. The drug also acts by reducing the low-threshold Ca²⁺ current and its multiple mechanisms contribute to its use in multiple types of seizures. Although valproate does not affect neuronal responses to GABA, it does increase the activity of the GABA synthetic enzyme, glutamic acid decarboxylase, and it inhibits enzymes that degrade GABA, GABA transaminase and succinic semialdehyde dehydrogenase (Goodman and Gilman's The Pharmacological Basis of Therapeutics. 9th Ed., Hardman et al., eds., pp. 462, 476 and 477, McGraw-Hill, New York, 1996).

[0075] The most common side effects are gastrointestinal symptoms, including anorexia, nausea and vomiting. Effects on the CNS include sedation, ataxia and tremor. Rash, hair loss, increased appetite and teratogenic effects have also been observed (Briggs et al., A Reference Guide to Fetal and Neonatal Risk. Drugs in Pregnancy and Lactation. 4th ed., p. 869, Williams & Wilkins, Baltimore, 1994). With respect to liver toxicity, valproate produces elevated levels of hepatic enzymes in about 40% of patients, which may be an asymptomatic condition, and elevated levels of hepatic lipids. Fulminant hepatitis, microvesicular steatosis (fatty degeneration), hepatocyte necrosis and hepatic failure can also result. It is believed that hepatoxicity is caused by an accumulation of unsaturated metabolites of valproate, in particular 4-en-valproate, which is structurally similar to two known hepatotoxins, 4-en-pentanoate and methylenecyclopropylacetic acid (Eadie et al. (1988) Med Toxicol Adverse Drug Exp 3: 85-106).

[0076] In a study on rats, microvesicular steatosis caused by valproate was found to be accompanied by myeloid bodies, lipid vacuoles and mitochondrial abnormalities (Kesterson et al. (1984) Hepatology 4: 1143-1152). Experiments on cultured rat hepatocytes have shown that valproate produces a dose-dependent leakage of lactic acid dehydrogenase and increased amounts of acyl-CoA esters, compounds that interfere with the beta-oxidation of fatty acids (Vance et al. (1994) Epilepsia 35: 1016-1022). Administration of valproate to rats has also been shown to cause enhanced excretion of dicarboxylic acids, a sign of impaired mitochondrial beta-oxidation. Other metabolic effects include hypoglycemia, hyperammonemia, decreased levels of beta-hydroxybutyrate and carnitine and decreased activities of acyl-CoA dehydrogenases, enzymes involved in fatty acid oxidation. mRNA levels of genes involved in fatty acid oxidation, however, such as the short-, medium- and long-chain acyl-CoA dehydrogenases, were found to have increased (Kibayashi et al. (1999) Pediatr Int 41: 52-60).

[0077] Wy-14643, a tumor-inducing compound that acts in the liver, has been used to study the genetic profile of cells during the various stages of carcinogenic development, with a view toward developing strategies for detecting, diagnosing and treating cancers (Rockett et al. (2000) Toxicology 144(1-3):13-29). In contrast to other carcinogens, Wy-14643 does not mutate DNA directly. Instead, it acts on the peroxisome proliferator activated receptor-alpha (PPARalpha), as well as on other signaling pathways that regulate growth (Johnson et al. (2001) J Steroid Biochem Mol Biol 77(1):59-71). The effect is elevated and sustained cell replication, accompanied by a decrease in apoptosis (Rusyn et al. (2000) Carcinogenesis 21(12):2141-2145). These authors (Rusyn et al.) noted an increase in the expression of enzymes that repair DNA by base excision, but no increased expression of enzymes that do not repair oxidative damage to DNA. In a study on rodents, Johnson et al. noted that Wy-14643 inhibited liver-X-receptor-mediated transcription in a dose-dependent manner, as well as de novo sterol synthesis.

[0078] In experiments with mouse liver cells (Peters et al. (1998) Carcinogenesis 19(11):1989-1994), exposure to Wy-14643 produced increased levels of acyl CoA oxidase and proteins involved in cell proliferation: CDK-1, 2 and 4, PCNA and c-myc. Elevated levels may be caused by accelerated transcription that is mediated directly or indirectly by PPARalpha. It is likely that the carcinogenic properties of peroxisome proliferators are due to the PPARalpha-dependent changes in levels of cell cycle regulatory proteins.

[0079] Another study on rodents (Keller et al. (1992) Biochim Biophys Acta 1102(2):237-244) showed that Wy-14643 was capable of uncoupling oxidative phosphorylation in rat liver mitochondria. Rates of urea synthesis from ammonia and bile flow, two energy-dependent processes, were reduced, indicating that the energy supply for these processes was disrupted as a result of cellular exposure to the toxin. Wy-14643 has also been shown to activate nuclear factor kappaB, NADPH oxidase and superoxide production in Kupffer cells (Rusyn et al. (2000) Cancer Res 60(17):4798-4803). NADPH oxidase is known to induce mitogens, which cause proliferation of liver cells.

[0080] The anti-asthma drug zileuton is a 5-lipoxygenase inhibitior and leukotriene synthesis inhibitor and is given to asthma patients to counter the negative effects of leukotrienes-exacerbation of the harmful effects of the inflammatory process and bronchoconstriction. Zileuton has, however, been reported to cause hepatomegaly and elevated levels of liver peroxisomal palmitoyl CoA oxidase and microsomal cytochromes P450 2B and P450 4A. The monooxygenase activities of these cytochromes was also seen to increase (Rodrigues et al. (1996) Toxicol Appl Pharmacol 137(2):193-201; Sorkness (1997) Pharmacotherapy 17(1 Pt 2):50S-54S).

[0081] LPS (lipopolysaccharide) is an endotoxin released by gram-negative bacteria upon breakage or rupture of the cells that induces an acute inflammatory response in mammals and that can cause septic shock. LPS is also a research tool used to initiate liver injury in rats through an inflammatory mechanism. Typically, the membrane components of LPS are lipid-A, KDO (2-keto-3-deoxy-octulosonic acid), core polysaccharides and O-antigen polysaccharides, the polysaccharide units differing from one bacterium to another (Zinsser Microbiology 20th Ed., Joklik et al., eds., pp. 82-87, Appleton & Lange, Norwalk, Conn., 1992).

[0082] Primary rat hepatocytes derived from liver parenchymal cells and sinusoidal cells of rats that have been exposed to LPS in vivo can directly respond to LPS in cell culture. Numerous effects of LPS-induced endotoxemia can be detected, including elevated levels of nitric oxide synthetase (NOS) with increased nitric oxide and nitrite production, cellular hypertrophy, vacuolization, chromosomal emargination, cytoplasmic DNA fragmentation and necrosis (Pittner et al. (1992) Biochem Biophys Res Commun 185(1):430-435; Laskin et al., (1995) Hepatology 22(1):223-234; Wang et al. (1995) Am J Physiol 269(2 Pt 1):G297-304). Other studies have indicated that the presence of Kupffer cells with primary rat hepatocytes is essential for the induction of hepatocyte apoptosis by LPS (Hamada et al. (1999) J Hepatol 30(5):807-818).

[0083] Exposure of rats or primary hepatocytes to LPS induces the expression of a number of acute-phase proteins in the liver. Recent evidence has indicated that rat hepatocytes express soluble CD14 protein, and LPS is capable of markedly increasing levels of CD14 at both the gene expression and protein expression levels (Liu et al. (1998) Infect Immun 66(11):5089-5098). Soluble CD14 is believed to be a critical LPS recognition protein required for the activation of a variety of cells to toxic levels of LPS, even in endothelial and epithelial cells (Pugin et al. (1993) Proc Natl Acad Sci USA 90(7):2744-2748). Another key component of the LPS recognition system is lipopolysaccharide-binding protein (LBP), which binds to LPS. The LPS-LBP complex interacts with the CD14 receptor, inducing LPS sensitive genes. LBP can be induced in hepatocytes isolated from rats that have not been primed with LPS, indicating that this key regulatory pathway is intact in primary rat hepatocytes (Wan et al. (1995) Infect Immun 63(7):2435-2442).

Toxicity Prediction and Modeling

[0084] The genes and gene expression information, as well as the portfolios and subsets of the genes provided in Tables 1-5WWW, such as the core toxicity markers in Tables 5A-5WWW, may be used to predict at least one toxic effect, including the hepatotoxicity of a test or unknown compound. As used, herein, at least one toxic effect includes, but is not limited to, a detrimental change in the physiological status of a cell or organism. The response may be, but is not required to be, associated with a particular pathology, such as tissue necrosis. Accordingly, the toxic effect includes effects at the molecular and cellular level. Hepatotoxicity is an effect as used herein and includes but is not limited to the pathologies of liver necrosis, hepatitis, steatosis (fatty degeneration of the liver), carcinogenesis, cholestasis, liver enlargement, inflammation and peroxisome proliferation.

[0085] In general, assays to predict the toxicity or hepatotoxicity of a test agent (or compound or multi-component composition) comprise the steps of exposing a cell population to the test compound, assaying or measuring the level of relative or absolute gene expression of one or more of the genes in Tables 1-5WWW and comparing the identified expression level(s) to the expression levels disclosed in the Tables and database(s) disclosed herein. Assays may include the measurement of the expression levels of about 2, 3, 4, 5, 6, 7, 8, 9, 10, 15, 20, 25, 30, 50, 75, 100 or more genes from Tables 1-5WWW to create multi-gene expression profiles. In some instances, expression levels are assayed and compared for and to all or substantially all the genes in the tables.

[0086] In the methods of the invention, the gene expression level for a gene or genes induced by the test agent, compound or compositions may be comparable to the levels found in the Tables or databases disclosed herein if the expression level varies within a factor of about 2, about 1.5 or about 1.0 fold. In some cases, the expression levels are comparable if the agent induces a change in the expression of a gene in the same direction (e.g., up or down) as a reference toxin.

[0087] The cell population that is exposed to the test agent, compound or composition may be exposed in vitro or in vivo. For instance, cultured or freshly isolated hepatocytes, in particular rat hepatocytes, may be exposed to the agent under standard laboratory and cell culture conditions. In another assay format, in vivo exposure may be accomplished by administration of the agent to a living animal, for instance a laboratory rat.

[0088] Procedures for designing and conducting toxicity tests in in vitro and in vivo systems are well known, and are described in many texts on the subject, such as Loomis et al., Loomis's Esstentials of Toxicology, 4th Ed., Academic Press, New York, 1996; Echobichon, The Basics of Toxicity Testing, CRC Press, Boca Raton, 1992; Frazier, editor, In Vitro Toxicity Testing, Marcel Dekker, New York, 1992; and the like.

[0089] In in vitro toxicity testing, two groups of test organisms are usually employed. One group serves as a control and the other group receives the test compound in a single dose (for acute toxicity tests) or a regimen of doses (for prolonged or chronic toxicity tests). Because, in some cases, the extraction of tissue as called for in the methods of the invention requires sacrificing the test animal, both the control group and the group receiving compound must be large enough to permit removal of animals for sampling tissues, if it is desired to observe the dynamics of gene expression through the duration of an experiment.

[0090] In setting up a toxicity study, extensive guidance is provided in the literature for selecting the appropriate test organism for the compound being tested, route of administration. dose ranges, and the like. Water or physiological saline (0.9% NaCl in water) is the solute of choice for the test compound since these solvents permit administration by a variety of routes. When this is not possible because of solubility limitations, vegetable oils such as corn oil or organic solvents such as propylene glycol may be used.

[0091] Regardless of the route of administration, the volume required to administer a given dose is limited by the size of the animal that is used. It is desirable to keep the volume of each dose uniform within and between groups of animals. When rats or mice are used, the volume administered by the oral route generally should not exceed about 0.005 ml per gram of animal. Even when aqueous or physiological saline solutions are used for parenteral injection the volumes that are tolerated are limited, although such solutions are ordinarily thought of as being innocuous. The intravenous LD₅₀ of distilled water in the mouse is approximately 0.044 ml per gram and that of isotonic saline is 0.068 ml per gram of mouse. In some instances, the route of administration to the test animal should be the same as, or as similar as possible to, the route of administration of the compound to man for therapeutic purposes.

[0092] When a compound is to be administered by inhalation, special techniques for generating test atmospheres are necessary. The methods usually involve aerosolization or nebulization of fluids containing the compound. If the agent to be tested is a fluid that has an appreciable vapor pressure, it may be administered by passing air through the solution under controlled temperature conditions. Under these conditions, dose is estimated from the volume of air inhaled per unit time, the temperature of the solution, and the vapor pressure of the agent involved. Gases are metered from reservoirs. When particles of a solution are to be administered, unless the particle size is less than about 2 μm the particles will not reach the terminal alveolar sacs in the lungs. A variety of apparatuses and chambers are available to perform studies for detecting effects of irritant or other toxic endpoints when they are administered by inhalation. The preferred method of administering an agent to animals is via the oral route, either by intubation or by incorporating the agent in the feed.

[0093] When the agent is exposed to cells in vitro or in cell culture, the cell population to be exposed to the agent may be divided into two or more subpopulations, for instance, by dividing the population into two or more identical aliquots. In some preferred embodiments of the methods of the invention, the cells to be exposed to the agent are derived from liver tissue. For instance, cultured or freshly isolated rat hepatocytes may be used.

[0094] The methods of the invention may be used to generally predict at least one toxic response, and as described in the Examples, may be used to predict the likelihood that a compound or test agent will induce various specific liver pathologies such as liver necrosis, fatty liver disease, protein adduct formation, hepatitis or other pathologies associated with at least one of the toxins herein described. The methods of the invention may also be used to determine the similarity of a toxic response to one or more individual compounds. In addition, the methods of the invention may be used to predict or elucidate the potential cellular pathways influenced, induced or modulated by the compound or test agent due to the similarity of the expression profile compared to the profile induced by a known toxin (see Tables 5A-5WWW).

Diagnostic Uses for the Toxicity Markers

[0095] As described above, the genes and gene expression information or portfolios of the genes with their expression information as provided in Tables 1-5WWW may be used as diagnostic markers for the prediction or identification of the physiological state of tissue or cell sample that has been exposed to a compound or to identify or predict the toxic effects of a compound or agent. For instance, a tissue sample such as a sample of peripheral blood cells or some other easily obtainable tissue sample may be assayed by any of the methods described above, and the expression levels from a gene or genes from Tables 1-5WWW may be compared to the expression levels found in tissues or cells exposed to the toxins described herein. These methods may result in the diagnosis of a physiological state in the cell or may be used to identify the potential toxicity of a compound, for instance a new or unknown compound or agent. The comparison of expression data, as well as available sequence or other information may be done by researcher or diagnostician or may be done with the aid of a computer and databases as described below.

[0096] In another format, the levels of a gene(s) of Tables 1-5WWW, its encoded protein(s), or any metabolite produced by the encoded protein may be monitored or detected in a sample, such as a bodily tissue or fluid sample to identify or diagnose a physiological state of an organism. Such samples may include any tissue or fluid sample, including urine, blood and easily obtainable cells such as peripheral lymphocytes.

Use of the Markers for Monitoring Toxicity Progression

[0097] As described above, the genes and gene expression information provided in Tables 1-5WWW may also be used as markers for the monitoring of toxicity progression, such as that found after initial exposure to a drug, drug candidate, toxin, pollutant, etc. For instance, a tissue or cell sample may be assayed by any of the methods described above, and the expression levels from a gene or genes from Tables 1-5WWW may be compared to the expression levels found in tissue or cells exposed to the hepatotoxins described herein. The comparison of the expression data, as well as available sequence or other information may be done by researcher or diagnostician or may be done with the aid of a computer and databases.

Use of the Toxicity Markers for Drug Screening

[0098] According to the present invention, the genes identified in Tables 1-5WWW may be used as markers or drug targets to evaluate the effects of a candidate drug, chemical compound or other agent on a cell or tissue sample. The genes may also be used as drug targets to screen for agents that modulate their expression and/or activity. In various formats, a candidate drug or agent can be screened for the ability to stimulate the transcription or expression of a given marker or markers or to down-regulate or counteract the transcription or expression of a marker or markers. According to the present invention, one can also compare the specificity of a drug's effects by looking at the number of markers which the drug induces and comparing them. More specific drugs will have less transcriptional targets. Similar sets of markers identified for two drugs may indicate a similarity of effects.

[0099] Assays to monitor the expression of a marker or markers as defined in Tables 1-5WWW may utilize any available means of monitoring for changes in the expression level of the nucleic acids of the invention. As used herein, an agent is said to modulate the expression of a nucleic acid of the invention if it is capable of up- or down-regulating expression of the nucleic acid in a cell.

[0100] In one assay format, gene chips containing probes to one, two or more genes from Tables 1-5WWW may be used to directly monitor or detect changes in gene expression in the treated or exposed cell. Cell lines, tissues or other samples are first exposed to a test agent and in some instances, a known toxin, and the detected expression levels of one or more, or preferably 2 or more of the genes of Tables 1-5WWW are compared to the expression levels of those same genes exposed to a known toxin alone. Compounds that modulate the expression patterns of the known toxin(s) would be expected to modulate potential toxic physiological effects in vivo. The genes in Tables 1-5WWW are particularly appropriate marks in these assays as they are differentially expressed in cells upon exposure to a known hepatotoxin.

[0101] In another format, cell lines that contain reporter gene fusions between the open reading frame and/or the transcriptional regulatory regions of a gene in Tables 1-5WWW and any assayable fusion partner may be prepared. Numerous assayable fusion partners are known and readily available including the firefly luciferase gene and the gene encoding chloramphenicol acetyltransferase (Alam et al. (1990) Anal Biochem 188:245-254). Cell lines containing the reporter gene fusions are then exposed to the agent to be tested under appropriate conditions and time. Differential expression of the reporter gene between samples exposed to the agent and control samples identifies agents which modulate the expression of the nucleic acid.

[0102] Additional assay formats may be used to monitor the ability of the agent to modulate the expression of a gene identified in Tables 1-5WWW. For instance, as described above, mRNA expression may be monitored directly by hybridization of probes to the nucleic acids of the invention. Cell lines are exposed to the agent to be tested under appropriate conditions and time and total RNA or mRNA is isolated by standard procedures such those disclosed in Sambrook et al. (Molecular Cloning: A Laboratory Manual, Third Ed., Cold Spring Harbor Laboratory Press, Cold Spring Harbor, N.Y., 2001).

[0103] In another assay format, cells or cell lines are first identified which express the gene products of the invention physiologically. Cell and/or cell lines so identified would be expected to comprise the necessary cellular machinery such that the fidelity of modulation of the transcriptional apparatus is maintained with regard to exogenous contact of agent with appropriate surface transduction mechanisms and/or the cytosolic cascades. Further, such cells or cell lines may be transduced or transfected with an expression vehicle (e.g., a plasmid or viral vector) construct comprising an operable non-translated 5′-promoter containing end of the structural gene encoding the gene products of Tables 1-5WWW fused to one or more antigenic fragments or other detectable markers, which are peculiar to the instant gene products, wherein said fragments are under the transcriptional control of said promoter and are expressed as polypeptides whose molecular weight can be distinguished from the naturally occurring polypeptides or may further comprise an immunologically distinct or other detectable tag. Such a process is well known in the art (see Sambrook et al., supra).

[0104] Cells or cell lines transduced or transfected as outlined above are then contacted with agents under appropriate conditions; for example, the agent comprises a pharmaceutically acceptable excipient and is contacted with cells comprised in an aqueous physiological buffer such as phosphate buffered saline (PBS) at physiological pH, Eagles balanced salt solution (BSS) at physiological pH, PBS or BSS comprising serum or conditioned media comprising PBS or BSS and/or serum incubated at 37° C. Said conditions may be modulated as deemed necessary by one of skill in the art. Subsequent to contacting the cells with the agent, said cells are disrupted and the polypeptides of the lysate are fractionated such that a polypeptide fraction is pooled and contacted with an antibody to be further processed by immunological assay (e.g., ELISA, immunoprecipitation or Western blot). The pool of proteins isolated from the “agent-contacted” sample is then compared with the control samples (no exposure and exposure to a known toxin) where only the excipient is contacted with the cells and an increase or decrease in the immunologically generated signal from the “agent-contacted” sample compared to the control is used to distinguish the effectiveness and/or toxic effects of the agent.

[0105] Another embodiment of the present invention provides methods for identifying agents that modulate at least one activity of a protein(s) encoded by the genes in Tables 1-5WWW. Such methods or assays may utilize any means of monitoring or detecting the desired activity.

[0106] In one format, the relative amounts of a protein (Tables 1-5WWW) between a cell population that has been exposed to the agent to be tested compared to an un-exposed control cell population and a cell population exposed to a known toxin may be assayed. In this format, probes such as specific antibodies are used to monitor the differential expression of the protein in the different cell populations. Cell lines or populations are exposed to the agent to be tested under appropriate conditions and time. Cellular lysates may be prepared from the exposed cell line or population and a control, unexposed cell line or population. The cellular lysates are then analyzed with the probe, such as a specific antibody.

[0107] Agents that are assayed in the above methods can be randomly selected or rationally selected or designed. As used herein, an agent is said to be randomly selected when the agent is chosen randomly without considering the specific sequences involved in the association of the a protein of the invention alone or with its associated substrates, binding partners, etc. An example of randomly selected agents is the use a chemical library or a peptide combinatorial library, or a growth broth of an organism.

[0108] As used herein, an agent is said to be rationally selected or designed when the agent is chosen on a nonrandom basis which takes into account the sequence of the target site and/or its conformation in connection with the agent's action. Agents can be rationally selected or rationally designed by utilizing the peptide sequences that make up these sites. For example, a rationally selected peptide agent can be a peptide whose amino acid sequence is identical to or a derivative of any functional consensus site.

[0109] The agents of the present invention can be, as examples, peptides, small molecules, vitamin derivatives, as well as carbohydrates. Dominant negative proteins, DNAs encoding these proteins, antibodies to these proteins, peptide fragments of these proteins or mimics of these proteins may be introduced into cells to affect function. “Mimic” used herein refers to the modification of a region or several regions of a peptide molecule to provide a structure chemically different from the parent peptide but topographically and functionally similar to the parent peptide (see G. A. Grant in: Molecular Biology and Biotechnology, Meyers, ed., pp. 659-664, VCH Publishers, New York, 1995). A skilled artisan can readily recognize that there is no limit as to the structural nature of the agents of the present invention.

Nucleic Acid Assay Formats

[0110] The genes identified as being differentially expressed upon exposure to a known hepatotoxin (Tables 1-5WWW) may be used in a variety of nucleic acid detection assays to detect or quantititate the expression level of a gene or multiple genes in a given sample. The genes described in Tables 1-5WWW may also be used in combination with one or more additional genes whose differential expression is associate with toxicity in a cell or tissue. In preferred embodiments, the genes in Tables 1-5WWW may be combined with one or more of the genes described in related U.S. applications 60/222,040, 60/244,880, 60/290,029, 60/290,645, 60/292,336, 60/295,798, 60/297,457, 60/298,884, 60/303,459, 60/331,273, 60/364,045, 60/364,055, 60/436,643, Ser. Nos. 09/917,800 and 10/060,087, all of which are herein incorporated by reference.

[0111] Any assay format to detect gene expression may be used. For example, traditional Northern blotting, dot or slot blot, nuclease protection, primer directed amplification, RT-PCR, semi- or quantitative PCR, branched-chain DNA and differential display methods may be used for detecting gene expression levels. Those methods are useful for some embodiments of the invention. In cases where smaller numbers of genes are detected, high throughput amplification-based assays may be most efficient. Methods and assays of the invention, however, may be most efficiently designed with hybridization-based methods for detecting the expression of a large number of genes.

[0112] Any hybridization assay format may be used, including solution-based and solid support-based assay formats. Solid supports containing oligonucleotide probes for differentially expressed genes of the invention can be filters, polyvinyl chloride dishes, particles, beads, microparticles or silicon or glass based chips, etc. Such chips, wafers and hybridization methods are widely available, for example, those disclosed by Beattie (WO 95/1755).

[0113] Any solid surface to which oligonucleotides can be bound, either directly or indirectly, either covalently or non-covalently, can be used. A preferred solid support is a high density array or DNA chip. These contain a particular oligonucleotide probe in a predetermined location on the array. Each predetermined location may contain more than one molecule of the probe, but each molecule within the predetermined location has an identical sequence. Such predetermined locations are termed features. There may be, for example, from 2, 10, 100, 1000 to 10,000, 100,000 or 400,000 or more of such features on a single solid support. The solid support, or the area within which the probes are attached may be on the order of about a square centimeter. Probes corresponding to the genes of Tables 1-5WWW or from the related applications described above may be attached to single or multiple solid support structures, e.g., the probes may be attached to a single chip or to multiple chips to comprise a chip set.

[0114] Oligonucleotide probe arrays for expression monitoring can be made and used according to any techniques known in the art (see for example, Lockhart et al. (1996) Nat Biotechnol 14:1675-1680; McGall et al. (1996) Proc Nat Acad Sci USA 93:13555-13460). Such probe arrays may contain at least two or more oligonucleotides that are complementary to or hybridize to two or more of the genes described in Tables 1-5WWW. For instance, such arrays may contain oligonucleotides that are complementary or hybridize to at least 2, 3, 4, 5, 6, 7, 8, 9, 10, 20, 30, 50, 70, 100 or more the genes described herein. Preferred arrays contain all, substantially all, or nearly all of the genes listed in Tables 1-5WWW, or individually, the gene sets of Tables 5A-5WWW. In another preferred embodiment, arrays are constructed that contain oligonucleotides to detect all or nearly all of the genes in any one of or all of Tables 1-5WWW on a single solid support substrate, such as a chip.

[0115] The sequences of the expression marker genes of Tables 1-5WWW are in the public databases. Table 1 provides the GenBank Accession Number for each of the sequences (see www.ncbi.nlm.nih.gov/). The sequences of the genes in GenBank are expressly herein incorporated by reference in their entirety as of the filing date of this application, as are related sequences, for instance, sequences from the same gene of different lengths, variant sequences, polymorphic sequences, genomic sequences of the genes and related sequences from different species, including the human counterparts, where appropriate (see Table 3). These sequences may be used in the methods of the invention or may be used to produce the probes and arrays of the invention. In some embodiments, the genes in Tables 1-5WWW that correspond to the genes or fragments previously associated with a toxic response may be excluded from the Tables.

[0116] As described above, in addition to the sequences of the GenBank Accessions Numbers disclosed in the Tables 1-5WWW, sequences such as naturally occurring variant or polymorphic sequences may be used in the methods and compositions of the invention. For instance, expression levels of various allelic or homologous forms of a gene disclosed in the Tables 1-5WWW may be assayed. Any and all nucleotide variations that do not alter the functional activity of a gene listed in the Tables 1-5WWW, including all naturally occurring allelic variants of the genes herein disclosed, may be used in the methods and to make the compositions (e.g., arrays) of the invention.

[0117] Probes based on the sequences of the genes described above may be prepared by any commonly available method. Oligonucleotide probes for screening or assaying a tissue or cell sample are preferably of sufficient length to specifically hybridize only to appropriate, complementary genes or transcripts. Typically the oligonucleotide probes will be at least about 10, 12, 14, 16, 18, 20 or 25 nucleotides in length. In some cases, longer probes of at least 30, 40, or 50 nucleotides will be desirable.

[0118] As used herein, oligonucleotide sequences that are complementary to one or more of the genes described in Tables 1-5WWW refer to oligonucleotides that are capable of hybridizing under stringent conditions to at least part of the nucleotide sequences of said genes. Such hybridizable oligonucleotides will typically exhibit at least about 75% sequence identity at the nucleotide level to said genes, preferably about 80% or 85% sequence identity or more preferably about 90% or 95% or more sequence identity to said genes.

[0119] “Bind(s) substantially” refers to complementary hybridization between a probe nucleic acid and a target nucleic acid and embraces minor mismatches that can be accommodated by reducing the stringency of the hybridization media to achieve the desired detection of the target polynucleotide sequence.

[0120] The terms “background” or “background signal intensity” refer to hybridization signals resulting from non-specific binding, or other interactions, between the labeled target nucleic acids and components of the oligonucleotide array (e.g., the oligonucleotide probes, control probes, the array substrate, etc.). Background signals may also be produced by intrinsic fluorescence of the array components themselves. A single background signal can be calculated for the entire array, or a different background signal may be calculated for each target nucleic acid. In a preferred embodiment, background is calculated as the average hybridization signal intensity for the lowest 5% to 10% of the probes in the array, or, where a different background signal is calculated for each target gene, for the lowest 5% to 10% of the probes for each gene. Of course, one of skill in the art will appreciate that where the probes to a particular gene hybridize well and thus appear to be specifically binding to a target sequence, they should not be used in a background signal calculation. Alternatively, background may be calculated as the average hybridization signal intensity produced by hybridization to probes that are not complementary to any sequence found in the sample (e.g. probes directed to nucleic acids of the opposite sense or to genes not found in the sample such as bacterial genes where the sample is mammalian nucleic acids). Background can also be calculated as the average signal intensity produced by regions of the array that lack any probes at all.

[0121] The phrase “hybridizing specifically to” refers to the binding, duplexing, or hybridizing of a molecule substantially to or only to a particular nucleotide sequence or sequences under stringent conditions when that sequence is present in a complex mixture (e.g., total cellular) DNA or RNA.

[0122] Assays and methods of the invention may utilize available formats to simultaneously screen at least about 100, preferably about 1000, more preferably about 10,000 and most preferably about 100,000 or 1,000,000 or more different nucleic acid hybridizations.

[0123] As used herein a “probe” is defined as a nucleic acid, capable of binding to a target nucleic acid of complementary sequence through one or more types of chemical bonds, usually through complementary base pairing, usually through hydrogen bond formation. As used herein, a probe may include natural (i.e., A, G, U, C, or T) or modified bases (7-deazaguanosine, inosine, etc.). In addition, the bases in probes may be joined by a linkage other than a phosphodiester bond, so long as it does not interfere with hybridization. Thus, probes may be peptide nucleic acids in which the constituent bases are joined by peptide bonds rather than phosphodiester linkages.

[0124] The term “perfect match probe” refers to a probe that has a sequence that is perfectly complementary to a particular target sequence. The test probe is typically perfectly complementary to a portion (subsequence) of the target sequence. The perfect match (PM) probe can be a “test probe”, a “normalization control” probe, an expression level control probe and the like. A perfect match control or perfect match probe is, however, distinguished from a “mismatch control” or “mismatch probe.”

[0125] The terms “mismatch control” or “mismatch probe” refer to a probe whose sequence is deliberately selected not to be perfectly complementary to a particular target sequence. For each mismatch (MM) control in a high-density array there typically exists a corresponding perfect match (PM) probe that is perfectly complementary to the same particular target sequence. The mismatch may comprise one or more bases.

[0126] While the mismatch(s) may be located anywhere in the mismatch probe, terminal mismatches are less desirable as a terminal mismatch is less likely to prevent hybridization of the target sequence. In a particularly preferred embodiment, the mismatch is located at or near the center of the probe such that the mismatch is most likely to destabilize the duplex with the target sequence under the test hybridization conditions.

[0127] The term “stringent conditions” refers to conditions under which a probe will hybridize to its target subsequence, but with only insubstantial hybridization to other sequences or to other sequences such that the difference may be identified. Stringent conditions are sequence-dependent and will be different in different circumstances. Longer sequences hybridize specifically at higher temperatures. Generally, stringent conditions are selected to be about 5° C. lower than the thermal melting point (Tm) for the specific sequence at a defined ionic strength and pH.

[0128] Typically, stringent conditions will be those in which the salt concentration is at least about 0.01 to 1.0 M Na⁺ ion concentration (or other salts) at pH 7.0 to 8.3 and the temperature is at least about 30° C. for short probes (e.g., 10 to 50 nucleotides). Stringent conditions may also be achieved with the addition of destabilizing agents such as formamide.

[0129] The “percentage of sequence identity” or “sequence identity” is determined by comparing two optimally aligned sequences or subsequences over a comparison window or span, wherein the portion of the polynucleotide sequence in the comparison window may optionally comprise additions or deletions (i.e., gaps) as compared to the reference sequence (which does not comprise additions or deletions) for optimal alignment of the two sequences. The percentage is calculated by determining the number of positions at which the identical submit (e.g. nucleic acid base or amino acid residue) occurs in both sequences to yield the number of matched positions, dividing the number of matched positions by the total number of positions in the window of comparison and multiplying the result by 100 to yield the percentage of sequence identity. Percentage sequence identity when calculated using the programs GAP or BESTFIT (see below) is calculated using default gap weights.

Probe Design

[0130] One of skill in the art will appreciate that an enormous number of array designs are suitable for the practice of this invention. The high density array will typically include a number of test probes that specifically hybridize to the sequences of interest. Probes may be produced from any region of the genes identified in the Tables and the attached representative sequence listing. In instances where the gene reference in the Tables is an EST, probes may be designed from that sequence or from other regions of the corresponding full-length transcript that may be available in any of the sequence databases, such as those herein described. See WO 99/32660 for methods of producing probes for a given gene or genes. In addition, any available software may be used to produce specific probe sequences, including, for instance, software available from Molecular Biology Insights, Olympus Optical Co. and Biosoft International. In a preferred embodiment, the array will also include one or more control probes.

[0131] High density array chips of the invention include “test probes.” Test probes may be oligonucleotides that range from about 5 to about 500, or about 7 to about 50 nucleotides, more preferably from about 10 to about 40 nucleotides and most preferably from about 15 to about 35 nucleotides in length. In other particularly preferred embodiments, the probes are about 20 or 25 nucleotides in length. In another preferred embodiment, test probes are double or single strand DNA sequences. DNA sequences are isolated or cloned from natural sources or amplified from natural sources using native nucleic acid as templates. These probes have sequences complementary to particular subsequences of the genes whose expression they are designed to detect. Thus, the test probes are capable of specifically hybridizing to the target nucleic acid they are to detect.

[0132] In addition to test probes that bind the target nucleic acid(s) of interest, the high density array can contain a number of control probes. The control probes may fall into three categories referred to herein as 1) normalization controls; 2) expression level controls; and 3) mismatch controls.

[0133] Normalization controls are oligonucleotide or other nucleic acid probes that are complementary to labeled reference oligonucleotides or other nucleic acid sequences that are added to the nucleic acid sample to be screened. The signals obtained from the normalization controls after hybridization provide a control for variations in hybridization conditions, label intensity, “reading” efficiency and other factors that may cause the signal of a perfect hybridization to vary between arrays. In a preferred embodiment, signals (e.g., fluorescence intensity) read from all other probes in the array are divided by the signal (e.g., fluorescence intensity) from the control probes thereby normalizing the measurements.

[0134] Virtually any probe may serve as a normalization control. However, it is recognized that hybridization efficiency varies with base composition and probe length. Preferred normalization probes are selected to reflect the average length of the other probes present in the array, however, they can be selected to cover a range of lengths. The normalization control(s) can also be selected to reflect the (average) base composition of the other probes in the array, however in a preferred embodiment, only one or a few probes are used and they are selected such that they hybridize well (i.e., no secondary structure) and do not match any target-specific probes.

[0135] Expression level controls are probes that hybridize specifically with constitutively expressed genes in the biological sample. Virtually any constitutively expressed gene provides a suitable target for expression level controls. Typically expression level control probes have sequences complementary to subsequences of constitutively expressed “housekeeping genes” including, but not limited to the actin gene, the transferrin receptor gene, the GAPDH gene, and the like.

[0136] Mismatch controls may also be provided for the probes to the target genes, for expression level controls or for normalization controls. Mismatch controls are oligonucleotide probes or other nucleic acid probes identical to their corresponding test or control probes except for the presence of one or more mismatched bases. A mismatched base is a base selected so that it is not complementary to the corresponding base in the target sequence to which the probe would otherwise specifically hybridize. One or more mismatches are selected such that under appropriate hybridization conditions (e.g., stringent conditions) the test or control probe would be expected to hybridize with its target sequence, but the mismatch probe would not hybridize (or would hybridize to a significantly lesser extent) Preferred mismatch probes contain a central mismatch. Thus, for example, where a probe is a 20 mer, a corresponding mismatch probe will have the identical sequence except for a single base mismatch (e.g., substituting a G, a C or a T for an A) at any of positions 6 through 14 (the central mismatch).

[0137] Mismatch probes thus provide a control for non-specific binding or cross hybridization to a nucleic acid in the sample other than the target to which the probe is directed. For example, if the target is present the perfect match probes should be consistently brighter than the mismatch probes. In addition, if all central mismatches are present, the mismatch probes can be used to detect a mutation, for instance, a mutation of a gene in the accompanying Tables 1-5WWW. The difference in intensity between the perfect match and the mismatch probe provides a good measure of the concentration of the hybridized material.

Nucleic Acid Samples

[0138] Cell or tissue samples may be exposed to the test agent in vitro or in vivo. When cultured cells or tissues are used, appropriate mammalian liver extracts may also be added with the test agent to evaluate agents that may require biotransformation to exhibit toxicity. In a preferred format, primary isolates of animal or human hepatocytes which already express the appropriate complement of drug-metabolizing enzymes may be exposed to the test agent without the addition of mammalian liver extracts.

[0139] The genes which are assayed according to the present invention are typically in the form of mRNA or reverse transcribed mRNA. The genes may be cloned or not. The genes may be amplified or not. The cloning and/or amplification do not appear to bias the representation of genes within a population. In some assays, it may be preferable, however, to use polyA+ RNA as a source, as it can be used with less processing steps.

[0140] As is apparent to one of ordinary skill in the art, nucleic acid samples used in the methods and assays of the invention may be prepared by any available method or process. Methods of isolating total mRNA are well known to those of skill in the art. For example, methods of isolation and purification of nucleic acids are described in detail in Chapter 3 of Laboratory Techniques in Biochemistry and Molecular Biology. Vol. 24, Hybridization With Nucleic Acid Probes: Theory and Nucleic Acid Probes, P. Tijssen, Ed., Elsevier Press, New York, 1993. Such samples include RNA samples, but also include cDNA synthesized from a mRNA sample isolated from a cell or tissue of interest. Such samples also include DNA amplified from the cDNA, and RNA transcribed from the amplified DNA. One of skill in the art would appreciate that it is desirable to inhibit or destroy RNase present in homogenates before homogenates are used.

[0141] Biological samples may be of any biological tissue or fluid or cells from any organism as well as cells raised in vitro, such as cell lines and tissue culture cells. Frequently the sample will be a tissue or cell sample that has been exposed to a compound, agent, drug, pharmaceutical composition, potential environmental pollutant or other composition. In some formats, the sample will be a “clinical sample” which is a sample derived from a patient. Typical clinical samples include, but are not limited to, sputum, blood, blood cells (e.g., white cells), tissue or fine needle biopsy samples, urine, peritoneal fluid, and pleural fluid, or cells therefrom.

[0142] Biological samples may also include sections of tissues, such as frozen sections or formalin fixed sections taken for histological purposes.

Forming High Density Arrays

[0143] Methods of forming high density arrays of oligonucleotides with a minimal number of synthetic steps are known. The oligonucleotide analogue array can be synthesized on a single or on multiple solid substrates by a variety of methods, including, but not limited to, light-directed chemical coupling, and mechanically directed coupling (see Pirrung, U.S. Pat. No. 5,143,854).

[0144] In brief, the light-directed combinatorial synthesis of oligonucleotide arrays on a glass surface proceeds using automated phosphoramidite chemistry and chip masking techniques. In one specific implementation, a glass surface is derivatized with a silane reagent containing a functional group, e.g., a hydroxyl or amine group blocked by a photolabile protecting group. Photolysis through a photolithogaphic mask is used selectively to expose functional groups which are then ready to react with incoming 5′ photoprotected nucleoside phosphoramidites. The phosphoramidites react only with those sites which are illuminated (and thus exposed by removal of the photolabile blocking group). Thus, the phosphoramidites only add to those areas selectively exposed from the preceding step. These steps are repeated until the desired array of sequences have been synthesized on the solid surface. Combinatorial synthesis of different oligonucleotide analogues at different locations on the array is determined by the pattern of illumination during synthesis and the order of addition of coupling reagents.

[0145] In addition to the foregoing, additional methods which can be used to generate an array of oligonucleotides on a single substrate are described in PCT Publication Nos. WO 93/09668 and WO 01/23614. High density nucleic acid arrays can also be fabricated by depositing pre-made or natural nucleic acids in predetermined positions. Synthesized or natural nucleic acids are deposited on specific locations of a substrate by light directed targeting and oligonucleotide directed targeting. Another embodiment uses a dispenser that moves from region to region to deposit nucleic acids in specific spots.

Hybridization

[0146] Nucleic acid hybridization simply involves contacting a probe and target nucleic acid under conditions where the probe and its complementary target can form stable hybrid duplexes through complementary base pairing. See WO 99/32660. The nucleic acids that do not form hybrid duplexes are then washed away leaving the hybridized nucleic acids to be detected, typically through detection of an attached detectable label. It is generally recognized that nucleic acids are denatured by increasing the temperature or decreasing the salt concentration of the buffer containing the nucleic acids. Under low stringency conditions (e.g., low temperature and/or high salt) hybrid duplexes (e.g., DNA:DNA, RNA:RNA, or RNA:DNA) will form even where the annealed sequences are not perfectly complementary. Thus, specificity of hybridization is reduced at lower stringency. Conversely, at higher stringency (e.g., higher temperature or lower salt) successful hybridization tolerates fewer mismatches. One of skill in the art will appreciate that hybridization conditions may be selected to provide any degree of stringency.

[0147] In a preferred embodiment, hybridization is performed at low stringency, in this case in 6×SSPET at 37° C. (0.005% Triton X-100), to ensure hybridization and then subsequent washes are performed at higher stringency (e.g., 1×SSPET at 37° C.) to eliminate mismatched hybrid duplexes. Successive washes may be performed at increasingly higher stringency (e.g., down to as low as 0.25×SSPET at 37° C. to 50° C.) until a desired level of hybridization specificity is obtained. Stringency can also be increased by addition of agents such as formamide. Hybridization specificity may be evaluated by comparison of hybridization to the test probes with hybridization to the various controls that can be present (e.g., expression level control, normalization control, mismatch controls, etc.).

[0148] In general, there is a tradeoff between hybridization specificity (stringency) and signal intensity. Thus, in a preferred embodiment, the wash is performed at the highest stringency that produces consistent results and that provides a signal intensity greater than approximately 10% of the background intensity. Thus, in a preferred embodiment, the hybridized array may be washed at successively higher stringency solutions and read between each wash. Analysis of the data sets thus produced will reveal a wash stringency above which the hybridization pattern is not appreciably altered and which provides adequate signal for the particular oligonucleotide probes of interest.

Signal Detection

[0149] The hybridized nucleic acids are typically detected by detecting one or more labels attached to the sample nucleic acids. The labels may be incorporated by any of a number of means well known to those of skill in the art. See WO 99/32660.

Databases

[0150] The present invention includes relational databases containing sequence information, for instance, for the genes of Tables 1-5WWW, as well as gene expression information from tissue or cells exposed to various standard toxins, such as those herein described (see Tables 5A-5WWW). Databases may also contain information associated with a given sequence or tissue sample such as descriptive information about the gene associated with the sequence information (see Table 1), or descriptive information concerning the clinical status of the tissue sample, or the animal from which the sample was derived. The database may be designed to include different parts, for instance a sequence database and a gene expression database. Methods for the configuration and construction of such databases and computer-readable media to which such databases are saved are widely available, for instance, see U.S. Pat. No. 5,953,727, which is herein incorporated by reference in its entirety.

[0151] The databases of the invention may be linked to an outside or external database such as GenBank (www.nebi.nlm.nih.gov/entrez.index.html); KEGG (www.genome.ad.jp/kegg); SPAD (www.grt.kyushu-u.ac.jpspad/index.html); HUGO (www.gene.ucl.ac.uk/hugo); Swiss-Prot (www.expasy.ch.sprot); Prosite (www.expasy.ch/tools/scnpsit1.html); OMIM (www.ncbi.nlm.nih.gov/omim); and GDB (www.gdb.org). In a preferred embodiment, as described in Tables 1-3, the external database is GenBank and the associated databases maintained by the National Center for Biotechnology Information (NCBI) (www.ncbi.nlm.nih.gov).

[0152] Any appropriate computer platform, user interface, etc. may be used to perform the necessary comparisons between sequence information, gene expression information and any other information in the database or information provided as an input. For example, a large number of computer workstations are available from a variety of manufacturers, such has those available from Silicon Graphics. Client/server environments, database servers and networks are also widely available and appropriate platforms for the databases of the invention.

[0153] The databases of the invention may be used to produce, among other things, electronic Northerns that allow the user to determine the cell type or tissue in which a given gene is expressed and to allow determination of the abundance or expression level of a given gene in a particular tissue or cell.

[0154] The databases of the invention may also be used to present information identifying the expression level in a tissue or cell of a set of genes comprising one or more of the genes in Tables 1-5WWW, comprising the step of comparing the expression level of at least one gene in Tables 1-5WWW in a cell or tissue exposed to a test agent to the level of expression of the gene in the database. Such methods may be used to predict the toxic potential of a given compound by comparing the level of expression of a gene or genes in Tables 1-5WWW from a tissue or cell sample exposed to the test agent to the expression levels found in a control tissue or cell samples exposed to a standard toxin or hepatotoxin such as those herein described. Such methods may also be used in the drug or agent screening assays as described herein.

Kits

[0155] The invention further includes kits combining, in different combinations, high-density oligonucleotide arrays, reagents for use with the arrays, protein reagents encoded by the genes of the Tables, signal detection and array-processing instruments, gene expression databases and analysis and database management software described above. The kits may be used, for example, to predict or model the toxic response of a test compound, to monitor the progression of hepatic disease states, to identify genes that show promise as new drug targets and to screen known and newly designed drugs as discussed above.

[0156] The databases packaged with the kits are a compilation of expression patterns from human or laboratory animal genes and gene fragments (corresponding to the genes of Tables 1-5WWW). In particular, the database software and packaged information that may contain the databases saved to a computer-readable medium include the expression results of Tables 1-5WWW that can be used to predict toxicity of a test agent by comparing the expression levels of the genes of Tables 1-5WWW induced by the test agent to the expression levels presented in Tables 1-5WWW. In another format, database and software information may be provided in a remote electronic format, such as a website, the address of which may be packaged in the kit.

[0157] The kits may used in the pharmaceutical industry, where the need for early drug testing is strong due to the high costs associated with drug development, but where bioinformatics, in particular gene expression informatics, is still lacking. These kits will reduce the costs, time and risks associated with traditional new drug screening using cell cultures and laboratory animals. The results of large-scale drug screening of pre-grouped patient populations, pharmacogenomics testing, can also be applied to select drugs with greater efficacy and fewer side-effects. The kits may also be used by smaller biotechnology companies and research institutes who do not have the facilities for performing such large-scale testing themselves.

[0158] Databases and software designed for use with use with microarrays are discussed in Balaban et al., U.S. Pat. No. 6,229,911, a computer-implemented method for managing information, stored as indexed tables and collected from small or large numbers of microarrays, and U.S. Pat. No. 6,185,561, a computer-based method with data mining capability for collecting gene expression level data, adding additional attributes and reformatting the data to produce answers to various queries. Chee et al., U.S. Pat. No. 5,974,164, discloses a software-based method for identifying mutations in a nucleic acid sequence based on differences in probe fluorescence intensities between wild type and mutant sequences that hybridize to reference sequences.

[0159] Without further description, it is believed that one of ordinary skill in the art can, using the preceding description and the following illustrative examples, make and utilize the compounds of the present invention and practice the claimed methods. The following working examples therefore, specifically point out the preferred embodiments of the present invention, and are not to be construed as limiting in any way the remainder of the disclosure.

### EXAMPLES

### Example 1

### Identification of Toxicity Markers

[0160] The hepatotoxins 2-acetylaminofluorene (2-AAF), BI liver toxin, chloroform, CI-1000, dimethylnitrosamine (DMN), gemfibrozil, menadione, thioacetamide, acyclovir, AY-25329, bicalutamide, clofibrate, colchicine, diflunisal, dioxin, hydrazine, phenobarbital, valproate, zileuton and LPS were administered to male Sprague-Dawley rats at various time points using administration diluents, protocols and dosing regimes as indicated in Table 6. The hepatotoxins ANIT, acetominophen, carbon tetrachloride, chloroform, CPA, diclofenac, 17α-ethinylestradiol, indomethacin, tacrine and Wy-14643 were administered to male Sprague-Dawley rats at various time points using administration diluents, protocols and dosing regimes as previously described in the art and previously described in the related applications discussed above.

[0161] After adminstration, the dosed animals were observed and tissues were collected as described below:

Observation of Animals

[0162] 1. Clinical Observations—Twice daily: mortality and moribundity check.

[0163] Cage Side Observations—skin and fur, eyes and mucous membrane, respiratory system, circulatory system, autonomic and central nervous system, somatomotor pattern, and behavior pattern.

[0164] Potential signs of toxicity, including tremors, convulsions, salivation, diarrhea, lethargy, coma or other atypical behavior or appearance, were recorded as they occurred and included a time of onset, degree, and duration.

[0165] 2. Physical Examinations—Prior to randomization, prior to initial treatment, and prior to sacrifice.

[0166] 3. Body Weights—Prior to randomization, prior to initial treatment, and prior to sacrifice.

Clinical Pathology

[0167] 1. Frequency Prior to necropsy.

[0168] 2. Number of animals All surviving animals.

[0169] 3. Bleeding Procedure Blood was obtained by puncture of the orbital sinus while under 70% CO₂/30% O₂ anesthesia.

[0170] 4. Collection of Blood Samples—Approximately 0.5 mL of blood was collected into EDTA tubes for evaluation of hematology parameters. Approximately 1 mL of blood was collected into serum separator tubes for clinical chemistry analysis. Approximately 200 uL of plasma was obtained and frozen at ˜−80° C. for test compound/metabolite estimation. An additional ˜2 mL of blood was collected into a 15 mL conical polypropylene vial to which ˜3 mL of Trizol was immediately added. The contents were immediately mixed with a vortex and by repeated inversion. The tubes were frozen in liquid nitrogen and stored at approximately −80° C.

Termination Procedures

Terminal Sacrifice

[0171] At the sampling times indicated in Table 6 for each hepatotoxin, and as previously described in the related applications mentioned above, rats were weighed, physically examined, sacrificed by decapitation, and exsanguinated. The animals were necropsied within approximately five minutes of sacrifice. Separate sterile, disposable instruments were used for each animal, with the exception of bone cutters, which were used to open the skull cap. The bone cutters were dipped in disinfectant solution between animals.

[0172] Necropsies were conducted on each animal following procedures approved by board-certified pathologists.

[0173] Animals not surviving until terminal sacrifice were discarded without necropsy (following euthanasia by carbon dioxide asphyxiation, if moribund). The approximate time of death for moribund or found dead animals was recorded.

Postmortem Procedures

[0174] Fresh and sterile disposable instruments were used to collect tissues. Gloves were worn at all times when handling tissues or vials. All tissues were collected and frozen within approximately 7 minutes of the animal's death. The liver sections were frozen within approximately 2 minutes of the animal's death. The time of euthanasia, an interim time point at freezing of liver sections and kidneys, and time at completion of necropsy were recorded. Tissues were stored at approximately −80° C. or preserved in 10% neutral buffered formalin.

Tissue Collection and Processing

[0175] Liver

[0176] 1. Right medial lobe—snap frozen in liquid nitrogen and stored at ˜−80° C.

[0177] 2. Left medial lobe—Preserved in 10% neutral-buffered formalin (NBF) and evaluated for gross and microscopic pathology.

[0178] 3. Left lateral lobe—snap frozen in liquid nitrogen and stored at −80° C.

[0179] Heart

[0180] A sagittal cross-section containing portions of the two atria and of the two ventricles was preserved in 10% NBF. The remaining heart was frozen in liquid nitrogen and stored at ˜−80° C.

[0181] Kidneys (Both)

[0182] 1. Left—Hemi-dissected; half was preserved in 10% NBF and the remaining half was frozen in liquid nitrogen and stored at ˜−80° C.

[0183] 2. Right—Hemi-dissected; half was preserved in 10% NBF and the remaining half was frozen in liquid nitrogen and stored at ˜−80° C.

[0184] Testes (Both)

[0185] A sagittal cross-section of each testis was preserved in 10% NBF. The remaining testes were frozen together in liquid nitrogen and stored at ˜−80° C.

[0186] Brain (Whole)

[0187] A cross-section of the cerebral hemispheres and of the diencephalon was preserved in 10% NBF, and the rest of the brain was frozen in liquid nitrogen and stored at ˜−80° C.

[0188] Bone Marrow

[0189] Bone marrow was flushed from each femur using a syringe and fresh, cold RPMI (˜1 mL of RPMI×3 washes per femur) into two separate 15 mL conical vials, labeled to distinguish right from left femur samples. The vials were gently inverted several times after collection and maintained on wet ice.

[0190] Microarray sample preparation was conducted with minor modifications, following the protocols set forth in the Affymetrix GeneChip Expression Analysis Manual. Frozen tissue was ground to a powder using a Spex Certiprep 6800 Freezer Mill. Total RNA was extracted with Trizol (GibcoBRL) utilizing the manufacturer's protocol. The total RNA yield for each sample was 200-500 μg per 300 mg tissue weight. mRNA was isolated using the Oligotex mRNA Midi kit (Qiagen) followed by ethanol precipitation. Double stranded cDNA was generated from mRNA using the SuperScript Choice system (GibcoBRL). First strand cDNA synthesis was primed with a T7-(dT24) oligonucleotide. The cDNA was phenol-chloroform extracted and ethanol precipitated to a final concentration of 1 μg/ml. From 2 μg of cDNA, cRNA was synthesized using Ambion's T7 MegaScript in vitro Transcription Kit.

[0191] To biotin label the cRNA, nucleotides Bio-11-CTP and Bio-16-UTP (Enzo Diagnostics) were added to the reaction. Following a 37° C. incubation for six hours, impurities were removed from the labeled cRNA following the RNeasy Mini kit protocol (Qiagen). cRNA was fragmented (fragmentation buffer consisting of 200 mM Tris-acetate, pH 8.1, 500 mM KOAc, 150 mM MgOAc) for thirty-five minutes at 94° C. Following the Affymetrix protocol, 55 μg of fragmented cRNA was hybridized on the Affymetrix rat array set for twenty-four hours at 60 rpm in a 45° C. hybridization oven. The chips were washed and stained with Streptavidin Phycoerythrin (SAPE) (Molecular Probes) in Affymetrix fluidics stations. To amplify staining, SAPE solution was added twice with an anti-streptavidin biotinylated antibody (Vector Laboratories) staining step in between. Hybridization to the probe arrays was detected by fluorometric scanning (Hewlett Packard Gene Array Scanner). Data was analyzed using Affymetrix GeneChip® version 3.0 and Expression Data Mining (EDMT) software (version 1.0), GeneExpress2000, and S-Plus.

[0192] Table 1 discloses a set of genes that are differentially expressed upon exposure to the named toxins and their corresponding GenBank Accession and Sequence Identification numbers, the gene names if known, and the sequence cluster titles (core set and alternate set gene fragments). The human homologues of the rat genes in Table 1 are indicated in Table 3. The identities of the metabolic pathways in which the genes of Table 1 function are indicated in Table 2. The model codes in Tables 1-3 represent the various toxicity or liver pathology states that differential expression of each gene is able to identify, as well as the individual toxin or toxin type associated with differential expression of each gene. The model codes are defined in Table 4. The GLGC ID is the internal Gene Logic identification number.

[0193] Tables 5A-5WWW disclose a core or alternate set of genes, along with the summary statistics for each of the comparisons performed as indicated in these tables—i.e., expression levels of a particular gene in toxicity group samples compared to non-toxicity group samples in response to exposure to a particular toxin, or as measured in a particular disease state. Each of these tables contains a set of predictive genes and creates a model for predicting the hepatoxicity of an unknown, i.e., untested compound. Each gene is identified by its Gene Logic identification number and can be cross-referenced to a gene name and representative SEQ ID NO. in Table 1 or in one more related applications, as mentioned on page 1. For each comparison of gene expression levels between samples in the toxicity group (samples affected by exposure to a toxin) and samples in the non-toxicity group (samples not affected by exposure to a toxin), the tox mean (for toxicity group samples) is the mean signal intensity, as normalized for the various chip parameters that are being assayed. The non-tox mean represents the mean signal intensity, as normalized for the various chip parameters that are being assayed, in non-toxicity group samples. For individual genes, an increase in the tox mean compared to the non-tox mean indicates up-regulation upon exposure to a toxin, while a decrease in the group mean compared to the non-group mean indicates down-regulation.

[0194] The mean values are derived from Average Difference (AveDiff) values for a particular gene, averaged across the corresponding samples. Each individual Average Difference value is calculated by integrating the intensity information from multiple probe pairs that are tiled for a particular fragment. The normalization multiplies each expression intensity for a given experiment (chip) by a global scaling factor. The intent of this normalization is to make comparisons of individual genes between chips possible. The scaling factor is calculated as follows:
[0195] 1. From all the unnormalized expression values in the experiment, delete the largest 2% and smallest 2% of the values. That is, if the experiment yields 10,000 expression values, order the values and delete the smallest 200 and largest 200.
[0196] 2. Compute the trimmed mean, which is equal to the mean of the remaining values.
[0197] 3. Compute the scale factor SF=100/(trimmed mean)

[0198] The value of 100 used here is the standard target valued used.

[0199] Values greater than 2.0*SD noise are assumed to come from expressors. For these values, the standard deviation SD log (signal) of the logarithms is calculated. The logarithms are then multiplied by a scale factor proportional to 1/SD log (signal) and exponentiated. The resulting values are then multiplied by another scale factor, chosen so there will be no discontinuity in the normalized values from unscaled values on either side of 2.0*SD noise. Some AveDiff values may be negative due to the general noise involved in nucleic acid hybridization experiments. Although many conclusions can be made corresponding to a negative value on the GeneChip platform, it is difficult to assess the meaning behind the negative value for individual fragments. Our observations show that, though negative values are observed at times within the predictive gene set, these values reflect a real biological phenomenon that is highly reproducible across all the samples from which the measurement was taken. For this reason, those genes that exhibit a negative value are included in the predictive set. It should be noted that other platforms of gene expression measurement may be able to resolve the negative numbers for the corresponding genes. The predictive ability of each of those genes should extend across platforms, however. Each mean value is accompanied by the standard deviation for the mean. The linear discriminant analysis score (discriminant score, or LDA), as disclosed in the tables, measures the ability of each gene to predict whether or not a sample is toxic. The discriminant score is calculated by the following steps:

Calculation of a Discriminant Score

[0200] Let Xᵢ represent the AveDiff values for a given gene across the Group 1 samples, i=1 . . . n.

[0201] Let Yᵢ represent the AveDiff values for a given gene across the Group 2 samples, i=1 . . . t.

[0202] The calculations proceed as follows:

[0203] Calculate mean and standard deviation for Xᵢ's and Yᵢ's, and denote these by m_{X}, m_{Y}, s_{X},s_{Y}.

[0204] For all Xᵢ's and Yᵢ's, evaluate the function f(z)=((1/s_{Y})*exp(−0.5*((z−m_{Y}/s_{Y})²))/(((1/s_{Y})*exp(−0.5*((z−m_{Y})/s_{Y})²))+((1/s_{X})*exp(−0.5*((z−m_{X})/s_{X})²))).

[0205] The number of correct predictions, say P, is then the number of Yᵢ's such that f(Yᵢ)>0.5 plus the number of Xᵢ's such that f(Xᵢ)<0.5.

[0206] The discriminant score is then P/(n+t).

[0207] Linear discriminant analysis (LDA) uses both the individual measurements of each gene and the calculated measurements of all combinations of genes to classify samples. For each gene a weight is derived from the mean and standard deviation of the tox and nontox groups. Every gene is multiplied by a weight and the sum of these values results in a collective discriminate score. This discriminant score is then compared against collective centroids of the tox and nontox groups. These centroids are the average of all tox and nontox samples respectively. Therefore, each gene contributes to the overall prediction. This contribution is dependent on weights that are large positive or negative numbers if the relative distances between the tox and nontox samples for that gene are large and small numbers if the relative distances are small. The discriminant score for each unknown sample and centroid values can be used to calculate a probability between zero and one as to the group in which the unknown sample belongs.

### Example 2

### General Toxicity Modeling

[0208] Samples were selected for grouping into tox-responding and non-tox-responding groups by examining each study individually with Principal Components Analysis (PCA) to determine which treatments had an observable response. Only groups where confidence of their tox-responding and non-tox-responding status was established were included in building a general tox model.

[0209] Linear discriminant models were generated to describe toxic and non-toxic samples. The top discriminant genes and/or EST's were used to determine toxicity by calculating each gene's contribution with homo and heteroscedastic treatment of variance and inclusion or exclusion of mutual information between genes. Prediction of samples within the database exceeded 80% true positives with a false positive rate of less than 5%. It was determined that combinations of genes and/or EST's generally provided a better predictive ability than individual genes and that the more genes and/or EST used the better predictive ability. Although the preferred embodiment includes fifty or more genes, many pairings or greater combinations of genes and/or EST can work better than individual genes. All combinations of two or more genes from the selected list could be used to predict toxicity. These combinations could be selected by pairing in an agglomerate, divisive, or random approach. Further, as yet undetermined genes and/or EST's could be combined with individual or combination of genes and/or EST's described here to increase predictive ability. However, the genes and/or EST's described here would contribute most of the predictive ability of any such undetermined combinations.

[0210] Other variations on the above method can provide adequate predictive ability. These include selective inclusion of components via agglomerate, divisive, or random approaches or extraction of loading and combining them in agglomerate, divisive, or random approaches. Also the use of composite variables in logistic regression to determine classification of samples can also be accomplished with linear discriminate analysis, neural or Bayesian networks, or other forms of regression and classification based on categorical or continual dependent and independent variables.

### Example 3

### Modeling with Core Gene Set

[0211] As described in Examples 1 and 2, above, the data collected from microarray hybridization experiments were analyzed by LDA and by PCA. The genes in Tables 5A, 5C, 5D, 5E, 5F, 5G, 5I, 5K, 5L, 5M, 5N, 5O, 5Q, 5S, 5T, 5U, 5V, 5W, 5X, 5Z, 5BB, 5DD, 5FF, 5GG, 5HH, 5II, 5JJ, 5LL, 5MM, 5NN, 5PP, 5RR, 5SS, 5TT, 5UU, 5VV, 5WW, 5XX, 5ZZ, 5BBB, 5DDD, 5EEE, 5FFF, 5GGG, 5HHH, 5III, 5KKK, 5LLL, 5MMM, 5NNN, 5OOO, 5PPP, 5RRR, 5SSS, 5TTT, 5UUU and 5VVV constitute a core set of markers for predicting the hepatotoxicity of a compound. The genes in Tables 5B, 5H, 5J, 5P, 5R, 5Y, 5AA, 5CC, 5EE, 5KK, 5OO, 5QQ, 5YY, 5AAA, 5CCC, 5JJJ, 5QQQ, and 5WWW constitute an alternate set of markers which may also be used in the methods of the invention, although the core marker sets of Tables 5A, 5C, 5D, 5E, 5F, 5G, 5I, 5K, 5L, 5M, 5N, 5O, 5Q, 5S, 5T, 5U, 5V, 5W, 5X, 5Z, 5BB, 5DD, 5FF, 5GG, 5HH, 5II, 5JJ, 5LL, 5MM, 5NN, 5PP, 5RR, 5SS, 5TT, 5UU, 5VV, 5WW, 5XX, 5ZZ, 5BBB, 5DDD, 5EEE, 5FFF, 5GGG, 5HHH, 5III, 5KKK, 5LLL, 5MMM, 5NNN, 5OOO, 5PPP, 5RRR, 5SSS, 5TTT, 5UUU and 5VVV may be preferred in some embodiments of the invention because the core sets contain additional predictive genes. Each gene fragment in Tables 1-5WWW is assigned an LDA score, and those gene fragments in the core set are those with the highest LDA scores. The gene fragments in Tables 5A-5WWW were determined to give greater than 80% true positive results and less than 5% false positive results. Gene expression profiles prepared from expression data for these genes, in the presence and absence of toxin treatment, can be used a controls in assays of compounds whose toxic properties have not been examined. Comparison of data from test compound-exposed and test compound-unexposed animals with the data in Tables 5A-5WWW, or with data from the core gene set controls, allows the prediction of toxic effects—or no toxic effects—upon exposure to the test compound. Thus, with a smaller gene set than in Table 1 and as described in Example 1, the core gene set can be used to examine the biological effects of a compound whose toxic properties following exposure are not known and to predict the toxicity in liver tissue of this compound.

### Example 4

### Modeling Methods

[0212] The above modeling methods provide broad approaches of combining the expression of genes to predict sample toxicity. One method uses each variable individually and weights them; the other combines variables as a composite measure and adds weights to them after combination into a new variable. One could also provide no weight in a simple voting method or determine weights in a supervised or unsupervised method using agglomerate, divisive, or random approaches. All or selected combinations of genes may be combined in ordered, agglomerate, or divisive, supervised or unsupervised clustering algorithms with unknown samples for classification. Any form of correlation matrix may also be used to classify unknown samples. The spread of the group distribution and discriminate score alone provide enough information to enable a skilled person to generate all of the above types of models with accuracy that can exceed discriminate ability of individual genes. Some examples of methods that could be used individually or in combination after transformation of data types include but are not limited to: Discriminant Analysis, Multiple Discriminant Analysis, logistic regression, multiple regression analysis, linear regression analysis, conjoint analysis, canonical correlation, hierarchical cluster analysis, k-means cluster analysis, self-organizing maps, multidimensional scaling, structural equation modeling, support vector machine determined boundaries, factor analysis, neural networks, bayesian classifications, and resampling methods.

### Example 5

### Grouping of Individual compound and Pathology Classes

[0213] Samples were grouped into individual pathology classes based on known toxicological responses and observed clinical chemical and pathology measurements or into early and late phases of observable toxicity within a compound (Tables 1-5WWW). The top 10, 25, 50, 100 genes based on individual discriminate scores were used in a model to ensure that combination of genes provided a better prediction than individual genes. As described above, all combinations of two or more genes from this list could potentially provide better prediction than individual genes when selected in any order or by ordered, agglomerate, divisive, or random approaches. In addition, combining these genes with other genes could provide better predictive ability, but most of this predictive ability would come from the genes listed herein.

[0214] Samples may be considered toxic if they score positive in any pathological or individual compound class represented here or in any modeling method mentioned under general toxicology models based on combination of individual time and dose grouping of individual toxic compounds obtainable from the data. The pathological groupings and early and late phase models are preferred examples of all obtainable combinations of sample time and dose points. Most logical groupings with one or more genes and one or more sample dose and time points should produce better predictions of general toxicity, pathological specific toxicity, or similarity to known toxicant than individual genes.

[0215] Although the present invention has been described in detail with reference to examples above, it is understood that various modifications can be made without departing from the spirit of the invention. Accordingly, the invention is limited only by the following claims. All cited patents, patent applications and publications referred to in this application are herein incorporated by reference in their entirety.

LENGTHY TABLE REFERENCED HERE
US20070027634A1-20070201-T00001
Please refer to the end of the specification for access instructions.

LENGTHY TABLE REFERENCED HERE
US20070027634A1-20070201-T00002
Please refer to the end of the specification for access instructions.

LENGTHY TABLE REFERENCED HERE
US20070027634A1-20070201-T00003
Please refer to the end of the specification for access instructions.

LENGTHY TABLE REFERENCED HERE
US20070027634A1-20070201-T00004
Please refer to the end of the specification for access instructions.

LENGTHY TABLE REFERENCED HERE
US20070027634A1-20070201-T00005
Please refer to the end of the specification for access instructions.

LENGTHY TABLE REFERENCED HERE
US20070027634A1-20070201-T00006
Please refer to the end of the specification for access instructions.

LENGTHY TABLE REFERENCED HERE
US20070027634A1-20070201-T00007
Please refer to the end of the specification for access instructions.

LENGTHY TABLE REFERENCED HERE
US20070027634A1-20070201-T00008
Please refer to the end of the specification for access instructions.

LENGTHY TABLE REFERENCED HERE
US20070027634A1-20070201-T00009
Please refer to the end of the specification for access instructions.

LENGTHY TABLE REFERENCED HERE
US20070027634A1-20070201-T00010
Please refer to the end of the specification for access instructions.

LENGTHY TABLE REFERENCED HERE
US20070027634A1-20070201-T00011
Please refer to the end of the specification for access instructions.

LENGTHY TABLE REFERENCED HERE
US20070027634A1-20070201-T00012
Please refer to the end of the specification for access instructions.

LENGTHY TABLE REFERENCED HERE
US20070027634A1-20070201-T00013
Please refer to the end of the specification for access instructions.

LENGTHY TABLE REFERENCED HERE
US20070027634A1-20070201-T00014
Please refer to the end of the specification for access instructions.

LENGTHY TABLE REFERENCED HERE
US20070027634A1-20070201-T00015
Please refer to the end of the specification for access instructions.

LENGTHY TABLE REFERENCED HERE
US20070027634A1-20070201-T00016
Please refer to the end of the specification for access instructions.

LENGTHY TABLE REFERENCED HERE
US20070027634A1-20070201-T00017
Please refer to the end of the specification for access instructions.

LENGTHY TABLE REFERENCED HERE
US20070027634A1-20070201-T00018
Please refer to the end of the specification for access instructions.

LENGTHY TABLE REFERENCED HERE
US20070027634A1-20070201-T00019
Please refer to the end of the specification for access instructions.

LENGTHY TABLE REFERENCED HERE
US20070027634A1-20070201-T00020
Please refer to the end of the specification for access instructions.

LENGTHY TABLE REFERENCED HERE
US20070027634A1-20070201-T00021
Please refer to the end of the specification for access instructions.

LENGTHY TABLE REFERENCED HERE
US20070027634A1-20070201-T00022
Please refer to the end of the specification for access instructions.

LENGTHY TABLE REFERENCED HERE
US20070027634A1-20070201-T00023
Please refer to the end of the specification for access instructions.

LENGTHY TABLE REFERENCED HERE
US20070027634A1-20070201-T00024
Please refer to the end of the specification for access instructions.

LENGTHY TABLE REFERENCED HERE
US20070027634A1-20070201-T00025
Please refer to the end of the specification for access instructions.

LENGTHY TABLE REFERENCED HERE
US20070027634A1-20070201-T00026
Please refer to the end of the specification for access instructions.

LENGTHY TABLE REFERENCED HERE
US20070027634A1-20070201-T00027
Please refer to the end of the specification for access instructions.

LENGTHY TABLE REFERENCED HERE
US20070027634A1-20070201-T00028
Please refer to the end of the specification for access instructions.

LENGTHY TABLE REFERENCED HERE
US20070027634A1-20070201-T00029
Please refer to the end of the specification for access instructions.

LENGTHY TABLE REFERENCED HERE
US20070027634A1-20070201-T00030
Please refer to the end of the specification for access instructions.

LENGTHY TABLE REFERENCED HERE
US20070027634A1-20070201-T00031
Please refer to the end of the specification for access instructions.

LENGTHY TABLE REFERENCED HERE
US20070027634A1-20070201-T00032
Please refer to the end of the specification for access instructions.

LENGTHY TABLE REFERENCED HERE
US20070027634A1-20070201-T00033
Please refer to the end of the specification for access instructions.

LENGTHY TABLE REFERENCED HERE
US20070027634A1-20070201-T00034
Please refer to the end of the specification for access instructions.

LENGTHY TABLE REFERENCED HERE
US20070027634A1-20070201-T00035
Please refer to the end of the specification for access instructions.

LENGTHY TABLE REFERENCED HERE
US20070027634A1-20070201-T00036
Please refer to the end of the specification for access instructions.

LENGTHY TABLE REFERENCED HERE
US20070027634A1-20070201-T00037
Please refer to the end of the specification for access instructions.

LENGTHY TABLE REFERENCED HERE
US20070027634A1-20070201-T00038
Please refer to the end of the specification for access instructions.

LENGTHY TABLE REFERENCED HERE
US20070027634A1-20070201-T00039
Please refer to the end of the specification for access instructions.

LENGTHY TABLE REFERENCED HERE
US20070027634A1-20070201-T00040
Please refer to the end of the specification for access instructions.

LENGTHY TABLE REFERENCED HERE
US20070027634A1-20070201-T00041
Please refer to the end of the specification for access instructions.

LENGTHY TABLE REFERENCED HERE
US20070027634A1-20070201-T00042
Please refer to the end of the specification for access instructions.

LENGTHY TABLE REFERENCED HERE
US20070027634A1-20070201-T00043
Please refer to the end of the specification for access instructions.

LENGTHY TABLE REFERENCED HERE
US20070027634A1-20070201-T00044
Please refer to the end of the specification for access instructions.

LENGTHY TABLE REFERENCED HERE
US20070027634A1-20070201-T00045
Please refer to the end of the specification for access instructions.

LENGTHY TABLE REFERENCED HERE
US20070027634A1-20070201-T00046
Please refer to the end of the specification for access instructions.

LENGTHY TABLE REFERENCED HERE
US20070027634A1-20070201-T00047
Please refer to the end of the specification for access instructions.

LENGTHY TABLE REFERENCED HERE
US20070027634A1-20070201-T00048
Please refer to the end of the specification for access instructions.

LENGTHY TABLE REFERENCED HERE
US20070027634A1-20070201-T00049
Please refer to the end of the specification for access instructions.

LENGTHY TABLE REFERENCED HERE
US20070027634A1-20070201-T00050
Please refer to the end of the specification for access instructions.

LENGTHY TABLE REFERENCED HERE
US20070027634A1-20070201-T00051
Please refer to the end of the specification for access instructions.

LENGTHY TABLE REFERENCED HERE
US20070027634A1-20070201-T00052
Please refer to the end of the specification for access instructions.

LENGTHY TABLE REFERENCED HERE
US20070027634A1-20070201-T00053
Please refer to the end of the specification for access instructions.

LENGTHY TABLE REFERENCED HERE
US20070027634A1-20070201-T00054
Please refer to the end of the specification for access instructions.

LENGTHY TABLE REFERENCED HERE
US20070027634A1-20070201-T00055
Please refer to the end of the specification for access instructions.

LENGTHY TABLE REFERENCED HERE
US20070027634A1-20070201-T00056
Please refer to the end of the specification for access instructions.

LENGTHY TABLE REFERENCED HERE
US20070027634A1-20070201-T00057
Please refer to the end of the specification for access instructions.

LENGTHY TABLE REFERENCED HERE
US20070027634A1-20070201-T00058
Please refer to the end of the specification for access instructions.

LENGTHY TABLE REFERENCED HERE
US20070027634A1-20070201-T00059
Please refer to the end of the specification for access instructions.

LENGTHY TABLE REFERENCED HERE
US20070027634A1-20070201-T00060
Please refer to the end of the specification for access instructions.

LENGTHY TABLE REFERENCED HERE
US20070027634A1-20070201-T00061
Please refer to the end of the specification for access instructions.

LENGTHY TABLE REFERENCED HERE
US20070027634A1-20070201-T00062
Please refer to the end of the specification for access instructions.

LENGTHY TABLE REFERENCED HERE
US20070027634A1-20070201-T00063
Please refer to the end of the specification for access instructions.

LENGTHY TABLE REFERENCED HERE
US20070027634A1-20070201-T00064
Please refer to the end of the specification for access instructions.

LENGTHY TABLE REFERENCED HERE
US20070027634A1-20070201-T00065
Please refer to the end of the specification for access instructions.

LENGTHY TABLE REFERENCED HERE
US20070027634A1-20070201-T00066
Please refer to the end of the specification for access instructions.

LENGTHY TABLE REFERENCED HERE
US20070027634A1-20070201-T00067
Please refer to the end of the specification for access instructions.

LENGTHY TABLE REFERENCED HERE
US20070027634A1-20070201-T00068
Please refer to the end of the specification for access instructions.

LENGTHY TABLE REFERENCED HERE
US20070027634A1-20070201-T00069
Please refer to the end of the specification for access instructions.

LENGTHY TABLE REFERENCED HERE
US20070027634A1-20070201-T00070
Please refer to the end of the specification for access instructions.

LENGTHY TABLE REFERENCED HERE
US20070027634A1-20070201-T00071
Please refer to the end of the specification for access instructions.

LENGTHY TABLE REFERENCED HERE
US20070027634A1-20070201-T00072
Please refer to the end of the specification for access instructions.

LENGTHY TABLE REFERENCED HERE
US20070027634A1-20070201-T00073
Please refer to the end of the specification for access instructions.

LENGTHY TABLE REFERENCED HERE
US20070027634A1-20070201-T00074
Please refer to the end of the specification for access instructions.

LENGTHY TABLE REFERENCED HERE
US20070027634A1-20070201-T00075
Please refer to the end of the specification for access instructions.

LENGTHY TABLE REFERENCED HERE
US20070027634A1-20070201-T00076
Please refer to the end of the specification for access instructions.

LENGTHY TABLE REFERENCED HERE
US20070027634A1-20070201-T00077
Please refer to the end of the specification for access instructions.

LENGTHY TABLE REFERENCED HERE
US20070027634A1-20070201-T00078
Please refer to the end of the specification for access instructions.

LENGTHY TABLE REFERENCED HERE
US20070027634A1-20070201-T00079
Please refer to the end of the specification for access instructions.

LENGTHY TABLE REFERENCED HERE
US20070027634A1-20070201-T00080
Please refer to the end of the specification for access instructions.

LENGTHY TABLE REFERENCED HERE
US20070027634A1-20070201-T00081
Please refer to the end of the specification for access instructions.

LENGTHY TABLE
The patent application contains a lengthy table section. A copy of the table is available in electronic form from the USPTO web site (http://seqdata.uspto.gov/?pageRequest=docDetail&DocID=US20070027634A1) An electronic copy of the table will also be available from the USPTO upon request and payment of the fee set forth in 37 CFR 1.19(b)(3).

The application's sequence listing, which the Patent Office published only in electronic form, follows.

SEQUENCE LISTING (4295 sequences)

SEQ ID NO: 1 - DNA, 158 bp, Rattus norvegicus
  Genbank Accession No. AA108277
accctttgaactagaagctttctattctgaccctcaagcagttccatatccagaagcaaaaatcggccgttttgtcgttcagaatgtttctgcacagaagatggagaaaatctaaagtgaaagtgcgcgtgacacacatgcatttcacatatccgctc

SEQ ID NO: 2 - DNA, 249 bp, Rattus norvegicus
  Genbank Accession No. AA684641
cgttctcaataaatattttatttttctgacactccaccctcaatacaaaagccttctggctggagccggattgtgcgaacaggccttgccgcgggcacctgcttgcttagtccctaggcctgcggcacccagacacaaggcagtgaacgtatggctagacggagatggtactttattaagaaacagaacagcaataggtccaaaaggggcagctgcgtcacctccaggggctactccagctgctgtggg

SEQ ID NO: 3 - DNA, 276 bp, Rattus norvegicus
  Genbank Accession No. AA684857
  misc_feature (1)..(276): n = a or c or g or t
cggggaagaggtggttttaacagaatgcctcctggtcggggtngnngtcccatgcctccttctagaagagattatnatgatatgagccctcgtcgaggaccaccaccaccaccacctggtcgnggtggacggggtggcagcagagctcggaatcttcctcttcctccaccaccaccacccagagggggagatctcatggcttacgacagaagaggacggcctggagaccgctatnatggcatggttgggttcagtgctgatgaaacttaggactct

SEQ ID NO: 4 - DNA, 301 bp, Rattus norvegicus
  Genbank Accession No. AA684919
aaaccccgagtttatttaaccattttggaggtttaagagcatggtaccagcaattgtttccctccaatcggcatctcctagctacatcacagtgtggtgaaatggtggttaaccctcattgtcatcttgactgcatctggactcacataggaggcacctctgggagtatgtgggagggtactgccagagaggcttaacaggatggcagacatttctgaatatgggcagcagcaaaccatcagctgtggtcctgagctgtgccttgtgctggagggcaggtctgtaggtagcatgatggtcg

SEQ ID NO: 5 - DNA, 317 bp, Rattus norvegicus
  Genbank Accession No. AA685175
  misc_feature (1)..(317): n = a or c or g or t
ggatgttatcattattgctttattctttgggggataaggaatacagcatttaataaaatatatcangacccaattttatgcccctacagtaatttcaaaaggccattaaataagaattttaatgagaaattatctactgcaacatctcattaggatttctgtcccatgtggccttgcaccaaggagaatgatatcgaaggccttccacacaggtgtttccaacgtcagggggcgctgtcacagccacaagagccaatgccttcttcagggttgcttccaatttttgaagnataaaatatcagcacacaggctctcct

SEQ ID NO: 6 - DNA, 290 bp, Rattus norvegicus
  Genbank Accession No. AA686132
  misc_feature (1)..(290): n = a or c or g or t
aagataatgatgacattntcatgctggagaaaaaaataagaacatctagtatgccagancaggctcataaagtntgtttcaaggagataaaaagactcaaaaaantgcctcattcaatgcctgattatgctctgactagaaattatttggaacttatggtggagcttccttggaacaaaagtacaactgaccgcctggacatccgggcagcccgcatccttctggacaatgaccactatgccatggaaaagctgaagaggagggtttttggagtactttggctgttgaga

SEQ ID NO: 7 - DNA, 373 bp, Rattus norvegicus
  Genbank Accession No. AA686164
  misc_feature (1)..(373): n = a or c or g or t
cagttgataatgttttactatgacttagaactttttcccccaagaacaaaattatttgcataaaaattcaggtatctgaaagactcaaaaggctattttncactttgttcaagtnctgcttccaggcattaagagtgtcgtacagttgtngccactgctgttttccaaatgtccgatgtgtgctgtgactgacaactacttttctttgtgtctgatcgattttgcagtagaccattttagttcttacagcatcaataacaaatgcttcaacatcatcagctccaatctgtagctcttgctgcattgtatcaaaagaaatctctttgttttccactgccattcccataaaggtgaggngtctcattttcgccat

SEQ ID NO: 8 - DNA, 299 bp, Rattus norvegicus
  Genbank Accession No. AA686190
  misc_feature (1)..(299): n = a or c or g or t
caacaagaagctacactttattagtgatagaaacagtacaaattttaaaccaagctgtagttccacttttcaaacaccaaaangggggggangggggaggagggtgtccttgctgtcagataattacattgttaattccataatagcatttacaatatcgttactgtngtttttnagggctcggacagcctttgctcttgacacatttgcttgtgacatgaccaactctatgtccttaacttccacacccgtttcatcaacctcctcttcttcgntctnctcttggacagtcggcgtct

SEQ ID NO: 9 - DNA, 437 bp, Rattus norvegicus
  Genbank Accession No. AA686423
  misc_feature (1)..(437): n = a or c or g or t
cgccgtgagagctgcctcaggaatattacgtcccctcaatgtctcggtttcgtcaacctatcggaactgtgccaggaatgcctntnttagttctgcgctgcgcaccattccttttagacatattcagacatcagttgtttcctctgctccaaggcttgtcaagtctgtcggacacctggcatatgggcacacggcatcagtccttaatagagtggccacattggttcccagtgtcttgaagcctccggtcagagctctgacgtactgcagtgcacggaaaggaaagagaaagacagtgaagtcggttgtgcatcgcttcctccganttcattctggccttttggttaaggaggaaaggctgggtataaggaaaaattttgggaaaagttcaactncaaggaaagagccctttnnggggattcggtgtcctgcaatag

SEQ ID NO: 10 - DNA, 362 bp, Rattus norvegicus
  Genbank Accession No. AA686470
  misc_feature (1)..(362): n = a or c or g or t
gtcgatcataccatgttgaagatgagcgggtggcagcgacagagccaaaataacagccggaacctgaggagagagtnttccagaaggaagtgcatcttcatacaccaccacacctgaaagcagaaaccggtccaattacagtcatggcagctgagtctctgcctttcgcctttgagacagtntccagctgggagctggaagcctggtatgaggntctgcaggaggtcctgtcctcagatgaaattgggggcanctatatctcatccccaggaaacgaagaggaagaatcaaaaacctttcactacttttgaccctgcatccctagtttggtgactnaggagccagggccagcagaggtcaca

SEQ ID NO: 11 - DNA, 273 bp, Rattus norvegicus
  Genbank Accession No. AA686704
  misc_feature (1)..(273): n = a or c or g or t
ctgcacagtgcgagggaacaggctccggtgggatggaggcgggcggcgtggcagactctttcctttccagtgcctgcttgctcttcaccctgggcatgttctccactggcctctcggacctcaggcacatgcagaggacacggagcgtggacaacatccagtttctgccttttntcaccacggatgtcaacaacctgggctggctgagttatggagtcttgaagggagatgggaccctcatcatcgtcaatactgtgggtgcagtgctttcaa

SEQ ID NO: 12 - DNA, 619 bp, Rattus norvegicus
  Genbank Accession No. AA799279
cccaagattaaatgattattaaaaaagcgtgccactgtatagaaatcaacattctctcccataattctgtgcattgggactatagaaatgtcactgtccctgctccacatcttcaaattaacattctcaggtcacaatagtaagtcttcccacaaggaaccttccggaaaaacaagctgtttcctcggctcatatttcccgctttttgtagcatgcaccagcaatctatccaagaagtatatattggggagtaaggaggagatccaccagcaagcccacagttgttaacagccataagattagatacaagcacaaagggatatgtcaacatactggcaaagaatcctgtgacagcttgggaataacttttcatttcattcatggtagagaccccactgtccagtgcataggtattgatgagataagccagtgagttacacagccacaaagaaatgatgtcacctaggaggcgaggaatgaggcccgcaaaaaatcctacgatgccttcttcccggtagatggttactatggagtcacacagtccgcagtacttagactctctgccgataaactgtaccatggacctcagagtaatcaccttgaagggatgtgtaatgag

SEQ ID NO: 13 - DNA, 617 bp, Rattus norvegicus
  Genbank Accession No. AA799330
tatttaattggaatacatgtcctgccaaccaaaccataaaacacttcatgggaacccatcacacatgaaaccccagcaggaccaacaagtgcggccttgcacttgtcaaggatgctgtagaagaagaaactattgagtttccgtcttaatcctcttcagaacttgaatcatcctcttggtcagaaagttccggcacagggaagcggagaatggcagctactccagtcagctgaccaagctgttccccagacacgtggagactggagaatatccttacggtgcccgcattctctttcacactgtccaccagcctgacataccggctccgggtggccacatcctgatgccggaagagctcatcactgatgagcaaggtgtcaatcgccaaggcttcattggccctctccacctgcttgagtccatagaatgctcggtcaggttcgtgctgtaacattttgtagaagtcatccaaggcttttacttccccggcagctttcgtgtctgaaaggcggctcgctacagtaggatcacataggacctctttcagggagtacctgtgtccagaggaggcgtgtacctgaaggaatttggagccgttttccaggagcaccttgttt

SEQ ID NO: 14 - DNA, 618 bp, Rattus norvegicus
  Genbank Accession No. AA799369
aaacaacgtggtcgggacatttattggcattaggaaaggatttctttaaatggtataaataaaatgaactcaaactctccatctgttctatttcacgatgataaagcaaagaagggaagaggtaacattcctgcttctacaccacagtttaaggtacaagaagctaacagtccccagagcagtaaaaactgcttcccactgtctctcaagacacagtcaattgtcagtccaaattctaagaaaatttcccggaacacagaggcgattctccccatccccggttcagtgacctgtagctgagaaaccaggacaagactcgctaggcatcaagatcaaagtcatcgcgctcctcattgtactccaacacgtgccgcttgatcttggatgagtccacccaggtgacaaagtcttccatgctgcgagtgacgagaaaggcgggatcggtgaccacgtctgggcccacgcggacgtgaccctgctccacaaaagccacagcagcctggagatgctgtgccatgcgtagcttgaggagcaaagtaggcaagcggcggcgggaaaaagacgaggcggagacggagtcgcaaagttctaatgagccgcgcgtgggcaacaggccca

SEQ ID NO: 15 - DNA, 637 bp, Rattus norvegicus
  Genbank Accession No. AA799396
ggaacaccagcaaatccggtactttattaagacatcttaggcttccctgcattttcaaaaacaggaatgctctattgactgaacacatcaaagggtctctgcagagtccttgggggccagccacaggaggtgtcatgtgattctgcagtcccagagcatggcagctagtgcttgcaatcacaggaagcaggcagtcggttctccatctgcctaggggagggtatccttcattcttttgaaggactgccttcaagtcacagctcaattccagtgtgtagactcggtctctaggactggggacaaaggcagctgccaggtgcaacagtttatgaggctccgccttttatatatgccacgggagcccgggctctgggagccagaagcccaagctggaccaaccgctgctgtgggctgatggccttagcagccacataatcttccctttgatgtccagggtcaatgcagtcctggccccaccagggctaggagaaggtgtatgaaagagaatctcactgtgatctgtcctgtgaaggaaacagcaataaaatttattacccagtcaccacagtcattctgacaggagttctcctagcctctgacctccacttgagagggaactttcagggaggacagggac

SEQ ID NO: 16 - DNA, 480 bp, Rattus norvegicus
  Genbank Accession No. AA799420
agaaacatctttatttgggtaatatgtcccaaaacaggtcagttagtaaaatagattctacagagtacagccctatgcacagccctccctccccaaaaataatcctgggggtggggggaatctgtctccccaccccgggctcctcagatataaagttttggcaggttattgttattatctaggtttggcccaccatgtccactttctgtagtggctggtatcagtacctacttttctcattccagaccagttcagcaaacatttctgccccaccccaaattgtggggcctaaataaagagcaaataggtctcctccactgacccatcacctcatcactgtgctttcagaaaaggggcaggtgagcaacccatggtgctgcacacctttaatcccagtgctcaggaggcagaggcagtcagagctctgagtttgaggccaggacaaccagagctatacagagaaatcctggcggggggggg

SEQ ID NO: 17 - DNA, 250 bp, Rattus norvegicus
  Genbank Accession No. AA799448
aagcattttcaaactttatttacaactgtcacagtgacaaaaagtagtttggaaaaaaaaaatgctagtttctccctgagcctcgatacagaacagacagaagtcacaggaggttcatctcacaacaggcatgtcactgaaatactaggattttttttttcaatacgatcagttagaaatacacacaaattacttaaagaaagaagaggaggaagaggaagaggaggggaggaggaggagagggaagagg

SEQ ID NO: 18 - DNA, 548 bp, Rattus norvegicus
  Genbank Accession No. AA799472
acaggaaggctggggtaggtatgtaccatagcatgtggtgatttctctcaccgacagctagagtttacgctcgttcctagaacataaatccacccttccacgttctgtgattctcatagcttagtcactgaaggaagactcactcgctgaactttcttctatggctttttcactttcgccacttggcaccggagcatctggcttctccagtagctctgggtctagtccttctgagatcatcttgtctctgattgccatcatcgggacacccacttgaaccatcttgaggtatctggcatatcgtgggtccttggctacagttacgacattttctgatggcgcttcaccttgttgtactccggagtcttgcgtgctgttctgcagttgctcagcagtgggttcagaatgtgattcatttgtgacagcagtgacacttagatgagacatgtcaactgtgacatcctctaggtctgcgatacatgacagcttcacatctaaacatatgacagctgtttcaacttgttgcatccgaagagaaaggtctgcca

SEQ ID NO: 19 - DNA, 687 bp, Rattus norvegicus
  Genbank Accession No. AA799474
  misc_feature (1)..(687): n = a or c or g or t
gagaaacttaatttattcccacaatgaaggctaaaggaagatcagaagcaagagtctggtctcctggccctggtatctgatgaaaaggggccaggcctgaaaggcctcggactgttcctggtctgctgagagcttgttcaggcaagatgacaagcagatactgaacagggtcacttgggtggccgataagccagctttcgactcttcaggactgaccacttatgccgcttcatggcataggtcaggggcagcagcaagcccatcatcaacaacatcttgagtcccatgcgttttcgatggtcatgctctggctctgatgcccagcgaaggaaggtggcaacatccttggctacttgtgacatggtagctggggtaccatcgtcatactccaagacttctgtgtagatgggaggagccatgccaatggcctggccaggaaagtaagggttgaaatagaggcttctcgcaatgacaccccagtgggaggttcacagtanncagtgagcaaaggaaacacatantcctcacaacgtgccttgctcgaacgatgtactgagtcaggggtaaagctccatgnntagcactctgcagctcagggtggggtatgntttggaaatatcaaacacttcctggcgcatgacatattccatcctcataggcatctgnacttcactcctaactaggctt

SEQ ID NO: 20 - DNA, 681 bp, Rattus norvegicus
  Genbank Accession No. AA799479
gggatcagagtttctttatgggctataggggccacaaggctggccaggtggcaaggtcaccggtggcccggtcaccgatacaggtagtcagcctggatgttggccgcgatctcggcctcccacttgtcaccattgttgagtagcttctccttgttgtacagcaactcctcatgcgtctcggtggaaaactcaaagttggggccctccacgatagcgtcaacagggcaggcttcctggcagaaaccacagtacatacacttggtcatgtcaatgtcatagcgtgtagtccggcggctgccatctgctcttggctcagcctcaatggtgatggcctgtgcaggacagatggcctcacagagcttgcaggcgatgcaacgctcctccccagtacggtatcggcgcagtgcatgctccccacggaagcgcggactcagtgggcccttctcaaaggggtacttgatggtggccggctcccgaaatgagtacctacggtcatgcccagtctcggaagagtccgtcacatcagaaccgaactgcatgtcatcccagattctagtcaaaaaattcggtgccttcaatcaatactgttcgtacggccatgaagctagaggtttgcaataaaatccgtccaggccggcaaggcgggaaaatcaaccaggggaatctaataacccccgcaat

SEQ ID NO: 21 - DNA, 513 bp, Rattus norvegicus
  Genbank Accession No. AA799497
aaagccatacatggatggtgagagtaagcagctgtacagaggggacagcatcagtgtacatacattcatgtccagaacacttagcatacatcagggtttatacaaggtggcagaggctataggcacaatgatacaaaatataaagtatatttccatctataaatacacagccggggacttccctaggcaccaatcctggctccatcagtgcccttctctgccatctcacctccaacctcagatcttccgagtggccggaggctgtttgtacctgggctgttcctaaggggtcttgttaagggcatcactggccgccatgttctcctgtcacccctccccctctttcattcctgtctaagaatggacaacactctccctgttgatatagagattcaacaataaacaacaacatgacagatcattcacaaaagagcagtgggtaaaagtgctctcgtttaaaggaagtctttggcaagaatacagagttgcatacggagtgctctgcctcgtgcc

SEQ ID NO: 22 - DNA, 777 bp, Rattus norvegicus
  Genbank Accession No. AA799501
  misc_feature (1)..(777): n = a or c or g or t
aatctagcatgttgcttagaaaggcttgttgtgttgagtacaaatactcctccagcatgtctcctagagaccatttcacccactgctctgtttggctgctagcctcttgtctctctcttcagcaatggtaaggcggattccttttcctcggggaagagaaatccacggtttgttgcccttgccaataacaaaaatgttggaaagacgagtggcaaagctgttgccgttggcatctttcacatgaaccacatcaaaagagccaggatgtctctccctattggtgattacaccaattctccccaagttagcacctccagtcaccatacacaggttcccagtgtcgaacttgatgaaatcagttatcttgcctgtttccaaatcaatctgaatggtgtcattcaccttgatgaggggatcagggtatcgaatagtacgggcatcatgggtcaccagatgtgggattccctttgtgcccacanagatctttctcactttgcacaacttgtacttgggctcctcaggtgtaattcgatgaacagcaaagcgacccttggtgtcatagatcagacggaatttctctccagtcttgtcaatgcggaggacatccataaaaccaacaaggtangttataatcggtccggaattttccatctaaccttaatgaatcgcggcatgcaaatctttttaaatcaacctccagtcaggcaatacttaatcgggtccttaggaaatgattagggcaggattctccacattgtgtggacactgggtgtccag

SEQ ID NO: 23 - DNA, 731 bp, Rattus norvegicus
  Genbank Accession No. AA799511
  misc_feature (1)..(731): n = a or c or g or t
gggtacaaaagtatttattttataaaacttgtatttaaaatagagcttatctgtcaactcacaaatcctaatttaaaacataacacattacccttagctaatctgatgttaacctttacaatcaacacccatttttggaattttattaagaacctgtactaaatgaagtttttaatcagaaaacattcccttttaccttaaaagtgcttcttaaatgaaggcaccaacaagaactactttcagatggtacagaatttcttatttcttgaagactctgtggttgaccacttcttcattagttacctgcagcaagacaccttccattttactaccaacaccactgaaggaagcaagaaaagctttattaatgatcacttggcttgcctcagctgttgaaatgaagcactttacagtctttgtggcaccagaatatacttgtccatggttcatatcaatgccatgggaagtgggaaaaactcaatacgggttcctccaccataaccccaattcctccactcctccaggacatagttcctccaacataggtccccccagtccggaacaacaaagttcaccctcatgacccttgtaaaggtgcgctcngccgctcggccaatctggcccaggcaaatcccaaaggggccataatccaacaggcaacgttccggggaatgttccgccaatccaaaaatacgggcaaagtaaccggggccaaagtgcaccacaatgtg

SEQ ID NO: 24 - DNA, 637 bp, Rattus norvegicus
  Genbank Accession No. AA799518
  misc_feature (1)..(637): n = a or c or g or t
cataccagctcaattttaattttaaagtgaaaaatgtacaggtgggaaagttaagcaacgccctgcagattcataacaaggagctgacctagttgtcccactacaagctgacagctctccagcagtgattgatttgtcacagcacagaaatgccaccctggacttgtggtccgcttactaactggaggaagcagttttaagtcttaccacggcctgtgctcaaagtgagcactgcactttgagaaagttgtttgaccagtcagcaatgtctgctagctgacttacccgactggccatgagtctcatctgcacgttgactcgcctaggggagggtcctggtctgtgtcaaactctctggtaccataaaaaccaagtaacggtggatctgacaggttaccctgagagcttaagaagcagagtatttaacttcatttgtaganaagaagggagtagtacaggctataggctgaggtagccttcatttaaagtgcaatctacttgcgataaatatagtaactaggacccgttccaagcagctatcatagtcatgttgatgctagctaactagaacctggttggtcagttctcacacacatcacaagcagaagcccttgcagtaagctatcagtgagaagag

SEQ ID NO: 25 - DNA, 589 bp, Rattus norvegicus
  Genbank Accession No. AA799520
  misc_feature (1)..(589): n = a or c or g or t
gagatgaagagacagtgaagccctgtttgctacttacatgaaaagatttaaaaaacaatcactgcacaaaatacaaaggggcagggtatgctgtggcattgaatttctcctcactttttttcttgacgtctcaagaacaaattaaagtttccacagcaaatttgttctcaaaatgccgaatggtgaaacagttactggcttcacgcttctgaatacctctaatggtttccctgcgctgcagtttgtaggtttccttgtcgtgacacagtcggtaaatgaagaagcccaggtggtccacgttttcgatgcggtcggtgatcaccatgtgctcatggatgaggtatgactgaggcaagtangtcccggccttgatgttaataagaagctccaacaggtttctgggtggcataacaatggaggtgttcagaggaatcacgtagcacttgtccagattaaggtcanataagcatgagtttcttgttaaatcatgcacaatgttggcaagatcgctgtccgcaaactctggtacagcacactgatgaattcactgcgtcttctcaaagatctaanaatctcttcattgtctgtg

SEQ ID NO: 26 - DNA, 483 bp, Rattus norvegicus
  Genbank Accession No. AA799523
  misc_feature (1)..(483): n = a or c or g or t
aaatcataaatgtacaacagcttcttaactctacacacgcacttaaatttttaaaggaaaaacgttatgtcttattacaccatgatcctggctaatagcttttcaaaactttttgagaaaaatcttaaaaaaggtttcacatgtcacctgaaacttacaaatttaacattatcaaagaaggaatgcttctacactcttacaaagaccactagaaagaaccaacatttaaaaggctagaaactgtctcaaagcatttttttttacatccttcctcaacagtaagtattaattatcaatccatcacaaatgctctcgcatcgctctgtgtctccgcatacaatgctattagcatactganataaagttctaaaatgtaattcgaaactgagccgtcggtactcgggctcacactcccaataacaattaccccaggaattagaaaatcaatacggtcttcaaatacccaattccaatcccaaacac

SEQ ID NO: 27 - DNA, 626 bp, Rattus norvegicus
  Genbank Accession No. AA799526
aaacacaaaaccaaattttatttagcttaacagtttctccaatacaaagagaaatattaaaacccaggacatatgcacatataaccccccgccccacccccaaagcccaaaaacctaagagaagacaggacaaagttctcttcaatggagagcactatcttcgcttctggaaaatgtttccacgccccattccacgtcctcttcctcttgcagccacttgggccttcaggatagcagcttttcctcggccagcccctgagccttggtttttatttttcatgctctttaacatgggtgcatttttcagcatgtcaggcaaaatcagaaaccggatcttgctgccacgtatgtacacctgttccagctgtgccactcggccgtctctgtatgtgactgtgatgttggacatctggcagttcatgttgtcctctgcctcaatgagcttcccccgatacacttcaccagtgttggtctcacatgtcactatgtggccttccgcttcgtgcaggactttaattggcacaccgatagacatcttggcaggactcttccagctaactgcaggcgtgtttttttgtttcggtcccgggacaaacgttagaaggcgaaagcttgaagcgatggaa

SEQ ID NO: 28 - DNA, 570 bp, Rattus norvegicus
  Genbank Accession No. AA799531
  misc_feature (1)..(570): n = a or c or g or t
aaggcggcagctgtttattttgaggtaactgtcacacagtactgttatatggtagaatagtcattatgtaatcttgagagaggttgtctaaggtaggatttggagccttccacacttatcagatgccttctcattagtttcttctagttttgcaattctagatccaaattgtatggcccgtttgggcagaagggcagaggatgagagaccaagttccacagctgcaaggcgtaaaatgagcttctcaccaactccacggggcaaagccaggtctaccttttcccaaactggcagagaattcaggaaagatacaacattttcatccagaaaaggaaatcttgcttcctttccatgatcagcaataactctatcatcacgaccaaggtttctagaagaaatgcgacccaattccattgctatttcctcattcaatccttctaggccaagagactgaaagcgggcacgatgacgggaataacctgccaactgctcatctgcnacaatcccagtgagaatcacctttgcactgctcttgntagactgcacagcatcctcggttcacaacaaaac

SEQ ID NO: 29 - DNA, 499 bp, Rattus norvegicus
  Genbank Accession No. AA799537
ataaagtacagaaaactttattggaaatctcttgattatatttccaagtgtagctctcatttcctaacaaagcactggaggaggggcttcacagccacctggtcccagcctgagcttggctgcgggagttgtctagagcccgtttcttccattgtgtaggactgaggggcacaggccaccttgaaggatgcttcgctcagcttccctggcctctttcttaagaatctgggacataaaggctgctgtctagaggccactggctgagccctgaaaagaatccgtgccctcaccccccttttagtgctggccctggggggtaaatcctgttcagtaggctatgaatgtgcccctgacccaaaggctgcaatggcacttggccaccactgctgggcacatttctctgtggcagcaaaagcatgcacaggggaaaggctctagtgttacatgcagattactaacagcagttgagagcacctgctccaatgcgtaacggctgctg

SEQ ID NO: 30 - DNA, 615 bp, Rattus norvegicus
  Genbank Accession No. AA799539
  misc_feature (1)..(615): n = a or c or g or t
actgcaaagtacctttaatgtgtttgcatctgcagcaagcattagatttgctcatttgggcaccataaattaggtgtagcactacacagacaccgagtcaccccaaccagtcaatccaggtgagtaagaaagctgaacaaaacacttctgaaaaggggtgcagtcacaaacccagtacagtttaattgtttcaatcaaaggcttccacttacaattgtttggttagtgataaataaagacagtttaaatgtttcagtaagtcagtaattcatcaaacctgggtttgaattattactgttactattcaactccatccaaataaacatcgatactgcactctcaaacagaaaagaaaaagggacagctgcggcaaatgctaagtttgcgttctgagcatttaaaagaaacaccccactctgcatcctttcctctgccactctgctttgataacgtgaatctgtcacattttacttcaacagataaagcactctgctgagaatataaaaagttataaaaatgtaatcataaaagactaattatggtacgcatgtgaacttttcttttantagaaacaaaaatagtcattgttatctagttaactaagtatcttggtat

SEQ ID NO: 31 - DNA, 553 bp, Rattus norvegicus
  Genbank Accession No. AA799542
caaggatttattaagtcatacatgcaaaacatactgctaactgcattagcaaaagatcaatgtaaaaacactccacaattctgcaactgtcaattgaaaaaagtttgttctagaggtcgaaaggcccaacactgtgttcttgccagtgagttaggttgtacagaacggcgttagcactaccgcttgacagaacctcacagacccaaaggtacgggaagcatgtgtccgcgtgggtgaggtctaaagggggcggcatcaatcacatgacagtgttggtactctggcaagacagtgatgtttcagaatatctaaaatagtttacaaactgtaaagccgcatcacgtgatttctacacccagttactacaaaacgacgggaagcactactcagctgattaaaggaaggtgaaaacaggaacgcacttctactatctaccagaaaatctccgaatgcattatcagaaagatcttatagaacaggtcagacatattgctcgttaagaagaggtcctaaagaaaacacttgctaagttagcaactgtgagggatggcac

SEQ ID NO: 32 - DNA, 633 bp, Rattus norvegicus
  Genbank Accession No. AA799545
  misc_feature (1)..(633): n = a or c or g or t
caaatgacttagatttaatcactggaagcaaactgaatggaagcttacaacagaagagatacacgtcagtgctttttgcaaaccgagatgggacagactgggggctgcccctcaacctgatcctttgcaaacaaagatgtccacagtgttcctggaactctggctcaggaaaggggagactgctggttctgtggttcagtcaccttgcttagcactcactcctggccagcatctggagcaccggtttgccggttctggtcatcacccttcttcttgtggccagagacaatgtcatcaatccgcagaagcagaactgcagtctccactgctgttttgtatgtttgtagcttcacagccaatggctcccaaatacccagctctttcatgtccactaaggtaccagtctcaccattcacaccccaggtctcacaattctcctgtgtgtgcttggcccgaagggaggtaagcagacgaatggtactggccccacagttctggatcaaggtccganggatgacctctaaagcctgngccacagccctatatggccattgttccacaccagtcatgggcttagatttgtctgtcnaagcatgggccacagccatctcagaggctcccacacaagcacan

SEQ ID NO: 33 - DNA, 623 bp, Rattus norvegicus
  Genbank Accession No. AA799550
  misc_feature (1)..(623): n = a or c or g or t
acttttattaacatgtaagattttgttttcaacatggtaagggttttgacctcaaatgcttatcaggtctgccacacatttatagcttgactacatatgaaccttgaagacgcctcttccttgaagttttgggtccattgcaggttttccttctcagtacacaaagggtattgcaaggatctttcattttacgcccaggatctcctcaaatatatggggataccaacttgtacagacgaacaagacctcatctcccataccgggttccgtttcatttaaaaatgagttaggctgtcccaacaaactcatcaggcaggttataatagatagtgtagcacataaaatttaaaatttgcacaaaatacatctctcctcctttggtctcacacagaaattaaagtccccccatagaaacaatacaatcctccgacccttctcccaggtcatcagtcctagccgtgtaaggcccatccacagtcccagatgaagtctgggcccttcttctgccattgctgcatggagtcctcttctagaattaacgcagcttcctcagaactttcagangcggtgagctccaactccaagtctcaagtgtcacagggggaccaagttcagggagctag

SEQ ID NO: 34 - DNA, 595 bp, Rattus norvegicus
  Genbank Accession No. AA799566
  misc_feature (1)..(595): n = a or c or g or t
gcccattacaaaagtctttattcgctggcaggtgcattcatgtaacacacatccctagttctcaaggtcacactcaactggattggcccttcagcagcacagccacgtagtgtcctgataggacacaggagagcccaagatcttttcctcaaatacaagtctcagtctcttcaacaatccattagaaatcatggctcttggaaaagagttttgcacagccatgcaggagaggcccagcatttgtactgcatccatgggcgggcaggccagtgggtggtcttgccttgtgggatggctcaatattagtacttgcgggttanattgtcaggagggtttaggtgaggaccaagggctcagctcccagggctccccagtaggaaccattctccccttgctgacactgcttccttgcgcacaagtctcttcttgtcatccagaggcttggctaaagctcggatcacctgagatttgaatggcagcaacacagaagtggggtaccgagtgagagcatgcatacactgcagagcagcaatccggacggccattgaatgactggaactgaaggtcaggagtttcgtgccaagttatcacatga

SEQ ID NO: 35 - DNA, 491 bp, Rattus norvegicus
  Genbank Accession No. AA799569
  misc_feature (1)..(491): n = a or c or g or t
aacaaaagtttattatgatgtacaaaggactagctattcagggcgtggtgggagatggcacaccagagaacccaggaactcacaaaggatcaggatgcaacggcaccatcacgtcccccctgcccgtggtcccactgtgccaccctgtctggccttgccgatttcttaactttacctattggccaagcaccttttcttacagcttttggctccttgagtttcttctgctcctgtgtgtatcttcctcatccaccttcttggttcttggtttgctcatgccaccttcaaggctgggcatgacactgctgtcccctctcccaattattattaaccccttcctgaactgttctgaggcaccatgtacaaaacgcccatagtacaggttctcacgtttcatttgccacaagttgtaccgtgagcacaccttagagcagcagcagttggcccctggcttccttgacaatggcatanaaatttctgaaaaaccttca

SEQ ID NO: 36 - DNA, 533 bp, Rattus norvegicus
  Genbank Accession No. AA799570
acggggtcacaggcaaatggctttattggcttatcatttaaaatgggcttgtcatcacaaggcttgggaagttcagacacttccaagagagatgttcaaacaaacccctttctaaccagtcaaggggaaagaacagtaggcccgagattgactgcagcgtgagttcagcctactcagtataaccaggcatgccaggcctactgcaagccacatgtgcttttactacctaagagttctagagtctggattcagaactgttactagcagacctgagctcataccctcggtgactctgccaagggaggagggggaggggaacacagattagagaaggtggcccgacacccaccttctaggcctttgttaggggccaagtgtggctctctgggcctactgtgggaacaaaccatggcaaagccactaagaagcacaaaaagttagtgtggtactggcatctccaaaatatgtcctgaaagtacaaatgagcagattccatattcagacacgaaggcatccaactaaaacatttaaat

SEQ ID NO: 37 - DNA, 588 bp, Rattus norvegicus
  Genbank Accession No. AA799575
  misc_feature (1)..(588): n = a or c or g or t
gctaatgcccggaaaacactttattacacaaattacattcagattctgaaaaatagtgttctaacagtgtaaccatctaaaaataagacatcccggaaacacaccaactgaggagaaatttaaaaaaagaatttaaatagagactttttaaaatttcccccattgcaatataatgttagtgattttaaaaaaatagaaggagatttagcagcttttcgtcgtgtggcaggttggttcccttcactgccacaggctgagaatgctgaacaggaaaggcaccaatgaaagacactggcaatgggtgtggactgggaaaatactgtgttcaagcagagaatagggctatttaaatccaccaactaaaacgtctccaaatgtgaatgacctaaatttccctcgggggttggagcgctaccttggaaaaggaggggggcttctccacccaagttcatagaaagacaatgcacgggcgtgaccggggggggaaccctcacctagaaacaaaaccaacgggcccaaggaattaaataggtgtgtaatcccaacggaggagtaaattaaaatcattgcaaaaaatttacacccctn

SEQ ID NO: 38 - DNA, 541 bp, Rattus norvegicus
  Genbank Accession No. AA799576
  misc_feature (1)..(541): n = a or c or g or t
aacagacaataaaagggctttctttttaattcaaaggtatagccagataagtagatttgtttagaaccattcttgtgaaatactttttaaaaaaatacgaccaacttctttgcaaattacagacaaatacctcaactatgatgatctaatttttggtgaataatatacatgattagacagaaataggcaagctcacactggaagattaactatcaaacactcagtcaaaactccgtttatggcccccacttcttgatcgatttctgttcccacttcgtcttctaccgtcttgccgacttcctgaacgactcccctgtcgactctgtctacctgatcggccaccagatcgaccaccagatcggcctgaacggcctgacctgccgccagaccagccgctcctctgtctgggattagaagatgtgtttccatcataatattcttcaatttcaggtaacttggctggcactgagagtatccagtctgagtcantgcactctgcctgtaatctttctgactcacttgtaggaacatcaaacaaaca

SEQ ID NO: 39 - DNA, 597 bp, Rattus norvegicus
  Genbank Accession No. AA799591
cagacactatgaattgctttaatggtggtatctgtacaagtgatgtcaggacacaggacagcaaatgcacagtggacatggctagcagacaagctgtgaatgaataaagagttcacactgctcccatgctgtagtgactaagacagctctaagccacctcctcctcagcctcctcctcaaactctccttcctcctcagctgtagcatcctggtactgctggtactcggacaccaggtcattcatgttgctctcaccctcagtgaactccatctcatccatgccctcgcccgtgtaccagtgttggaaggccttgcgtcgggacatggctgtgaactgctctgagatgcgtttgaaaagctccggaaaggccgtgctagttgccaatgaaggtgccgggcatttttaaggcaccgggtggaatgtcacagacagctgttttcacgttgttggggatcaactcgggcaagtaactgctgtccctgttttgggcatttaccatcggtgcggcaccgccttcaataacatgcggcccctgaaaaggtagccactgtcaagtaacgcccatggggggatgagaggagccatcaggtcctaac

SEQ ID NO: 40 - DNA, 590 bp, Rattus norvegicus
  Genbank Accession No. AA799599
  misc_feature (1)..(590): n = a or c or g or t
aacggccacaatagtttatttacaattgaactctttataagatatttacaagacagccgactttacacatcagaaatggtatcaaaagtatgaattacagcacagacaacgatatgaaacaggcataaaacaaagctgaggtggagagacaagcactttctcttttaatttattaacactagcttaaactttgttaaagaaagagtaaggaactatgttttaggagaactgcagggcctctctttctgttgaaggctgaatctcacacagtgttgtatcccatgtaggggaaaataaaattaattccccacacactccacacactgtgctctcgctcctggaactttgctccaacctcctcctcaaccaacctcagcatctccaaaccanaagacagctaggagaggacataatcaaatattaggtcctcagggaaaggagaaccaaagcaatagaatccacttcagtcctgccagatagcacctcatggattcctctcagtctagcanaaacaggatatgaggactcctctgaatagggcagaaactggcggttagtctattaacccataccaaattaggaatcgacaa

SEQ ID NO: 41 - DNA, 668 bp, Rattus norvegicus
  Genbank Accession No. AA799607
aaagtgatgactttattaataaatatacatccatatgatgatgtagatacaaatcatgaacactactccattccatacacataactgcacacgagtagcttaagttcatggacatggaaacatacacagtatctattcagactttttacagcagaggacaacgtgcttattatcagttaactggtaattgtttctcataattgtctgtggaaaaaggaaactgtgaatcaaagaatcaagagtggcctgattaaatcacacaactgacttactacagcatcacttctaaaaacttaaatacattgtatgtgagagcacaggtctgtctacttggaaggaaaagggagaaaagcaaatatttagatacatcttaagagtttgaacgcagtcattatgctagaacagacagattaaaagagcatcaaaactttttatgcccaagactgttgtgaactgttacactgctgtaacggatcataaagttttactgcatatagacaaggaactgacagagcaatcatcttagtatcccctgaactgttctcttaaagcttcttaaagcatgaagaagttcaccatttaaacttacacactgtggttattattacactggatgaagcgtctttaacctgataataaatggattcagattttacctcaaagaaatc

SEQ ID NO: 42 - DNA, 708 bp, Rattus norvegicus
  Genbank Accession No. AA799612
  misc_feature (1)..(708): n = a or c or g or t
caagaggttcaacagaatttacttgtatattttccattttctatactacttgaaggcataggatagcttcatcttagctttctacaatactgtgttttaagtctacccagtaaactaagaggcagtacaacttgaatacaactgaggaggtgagaagcaactcggcaggccctggtgctcaacagttccggaataaacaggtagcgcgcagccgcattaaaaggtagtttgcaaatattcaagttacaccgagattccttccaaacctctgccttgctcaaaccagcgcacctggccactgctaacaccgcggcacggcatttggtgaatggtgatggttttactttcttcttaatcaaaagcctgtggaggtgctgccacgcagcagagtaagtcagctctgctcgaggacgaggtgccaattgtgaagtcacaaaaggtacagtttacatgagaaacgcacattaacaagtggcccaaatacagagctggacagaaccagaccagtaagtctatagttactcaactgaactaacataagtacattcaaaataaagccggagatcagaataggttttagaatcaaatttgcagactttcttgataaaacagaagagtgaccttctgcagttggaaatgaggctctcacctggcgaanagcanagacttggcagtccctcctgcacaggtaaggaaataagtgacaaa

SEQ ID NO: 43 - DNA, 556 bp, Rattus norvegicus
  Genbank Accession No. AA799614
  misc_feature (1)..(556): n = a or c or g or t
aatcaacttgccctccggcttgcccaccatggcaggcgcgtggggccccggggaagggagccactttgttggaggcagagcctggcagtcctcagaccccaccgggccccagcccctgcgtgaagttgtatttggagggtccagcccctatgcagggtaggttaacttgatttagctgagtccccactgaaaacaatagagaaatgccttattctggcacagttagggtaactgctctctgggaatagttagacattaggggaggaggctgcttcttgccctaggtggttggaggctgtgtgtgggctgtggttagagactgcacaggcctcgtcccttaggtatattagaactttctgggattgagttggggaccctggtttcaagaaagtgggtaagagaatgaagggtcaatgagctcacacaagctgcatgttagagggaccagtgctggctgggactcagctgtcctgcatgggagacagtggttactagtgttcctctttctctttggtcctggccgcctccttggcaggaggtggggactttctanggg

SEQ ID NO: 44 - DNA, 599 bp, Rattus norvegicus
  Genbank Accession No. AA799616
  misc_feature (1)..(599): n = a or c or g or t
ctaaggcactgggtgtgatgggctcggttctgtggctgctctccctgctgctcagaggcaggcacagacagctcctgcgagcatctctaccaacatctctaggctggagaattaaatactccgattttagcagttggttactctaacaccagctcagcaacctaactgatacaatgtatggtgctacatattaataccaagttcatcaaggcctgtgacgagggttccctttcaacagatgaaagataactctcaacggctgttacaatacttaggaagtgtttgacaatgctttcaattccatcaaatgcctaacaaggcggaaatgtaagactcccttagttttggaaatcagaagagagaaatgttaatccctggacagactgacagttggaaggctactgagctgctaggtgaggcctcaggcatgaggggagcctacagtgagaccacctcatctgctggtggctgctttcccgctgctttcctaggggcagtatcttccctccttaccttgacatagggtggtcatctgcttactanggacacatctggatttcagagaactgttcagtgtggacggaatcacggggacctga

SEQ ID NO: 45 - DNA, 539 bp, Rattus norvegicus
  Genbank Accession No. AA799633
gactgcaaacaaagacatctgctttatttgttttccatcagtagcacatactgtttcttgagcatggcagccccatgctcagaggcatatgggtgctcagtcagagactgcagggcatggggaccatggtctgtggtctcatgatcggtcccttcttcaaggctccaggaaggatgctgctcctcagcccttgcgggcggtgctcacacagtgctggtatgccttggccaggtcggagcatagaagtacctcatgcagatggtcacggtagcagcggaggatctgggcctgtaggccagagcatacaggctccactctgcggggctttattgtgctctctgcttttgaagccgcctcgtggaattgttgagaagacagtttatacagctcagcattcttctcttggatgcgttcctgctgctccttgtagtaagtgtcacggcggctgagctcggcctctctgttcttcagttccctggtctgtcaagtggagcaaagaaacaacttgggtccccagaggttgaagaatccaaaaatcc

SEQ ID NO: 46 - DNA, 571 bp, Rattus norvegicus
  Genbank Accession No. AA799637
aagcaaaagtagatgagggtggatcaggttaagtaatattggttaaaagaaagagaaaaaagacaccaaaagttatttccttcctaaggtctcagatagtttcttaagtcttttcttcagctccaaaggaaatttctcgtagcacttcttacagactggtttcatgtcaaactccacaaatttattccacagagaagcagtgagaatggtgtggaagggatagaacggttacagacacactggctttctctttctctgcttctctttatcccttgcttctctctcccgtctggcaagtcgcctcttaagctcttctggcattttctcataacagtatttgcagactggctttagatcaattgcaacaaacttatccttgagtgttagtttggtattgcaagtggaacaggcaaagcagctcacacaccaagccttgttgagggcagagaccacgtcaccttctatgacacggttgcaatggaaacaaacatcaccaaatagctgattatagtgagtctcacaataggccaagcccttcctctcataatggcgatgtccaagaaatgggttt

SEQ ID NO: 47 - DNA, 665 bp, Rattus norvegicus
  Genbank Accession No. AA799641
gaatcagataaggcaaagaatgggaactgttttgaaatttaggacttttagaggtaaccatggtcccctactgttaaaaacaggtatttgtctctcacggttttaagattaagggccagaactatctgcttcacaaatccttgttactctgatttccacatatgatcctaaaggttggacagtggtcccaacagcccgtcaggcccagcttcccgagcctccaactctacttagctgtccatattacgattatcagcttaattctctaagatgtaataaactgacatgcctttgacttctacacactcattaacaagatcattacataacactgcagtgtttcccaagtcaagtgttctttttaatcagatctacaaagcatttactgggatgacatttctgacaaagccacagacttctatcaagcagcatcagtgtagtataaaaagtaagcaaaggaacaaaatagccttcttctttcagcctcatgagcagctgcatttctggggaaggacctacacacatagtaattccttgccaagaaccaggacctctgaaggagggaaatgtggattaatgcattcctttttggtttttaaggagactgtaatagaaatatattaaagatagccttaaatatccaacaatcttctgacttacaactt

SEQ ID NO: 48 - DNA, 520 bp, Rattus norvegicus
  Genbank Accession No. AA799654
ttcaggcccaaacagttcatgagtgcagcatgcagcacccatggtccactgcaggccactccatcagtagcaagacccgaattatcagagaccggtgcctgtggcctgccacccagggtacactcaagacgccaagggtgtgggtttggctgagtatgaaaggtaccaggcagaggtcagcttggggctatgtgagctggccaacccaagggaagagggtaggtgaacagggtttccagtgtcccgtgtaccccacggcggccaagaggctaacatggggtctctggtgctgccaacaaggcctaccctagtgctaagcctgcggctgagtgagcaggttgtgtgttggggtcaggatgcccctcctaaggcgttactgctataagctactctgtcccagggcagtaaggaaccacaggggacattttccccacgaggttccaatgggtcaaatcactgaagccttcagcgcctatggctggcacaccaggggaacaagggcgtgggcgtgggtgtggag

SEQ ID NO: 49 - DNA, 610 bp, Rattus norvegicus
  Genbank Accession No. AA799656
ttttcaacagtttaaataaaaatttttcctcatgatgttaagtgaatgttattttctttgagaatatctcttttttcattaaaataatttctgaaccactctatatgctcgaccttctgtctaacgctcagatatgggtttttcgagaggccacaggtcaccagctccatgaacaggcgaattggtccttgcttggggaaatcctccaggtgcttctccaaaaatatatgctcatggaactctgagccatcatcgtcaagacctgcttcattgttaactgggaactcccacagtttcccctcctttgtccactgtatcatctcctcaaacccattcccaaacggctgttcgcttactgtggctaattgcttagcaaattctatctcccagagagaaggtgctgcttctggttcaggtgcttcgtcgtcaaacgccttaacatcaaaaatcgaaagtcttttccccttgaacaaacatttcctccttctgaaatcagctggcttctcctggctaagcgaactgtccacttcttcgtcaaactgaatctggtgctgtggtcttgaactaactctcatcgaaggggatttggcaattttcatattcgatatta

SEQ ID NO: 50 - DNA, 328 bp, Rattus norvegicus
  Genbank Accession No. AA799671
gaagggggtccgtttttaggttaaaaagtattttaaatttatttgggtgggatgttggttgtatttgggtaaacaaccgcaagggcaacggaggagtacccggaaacttgagggccaaattggttaattttaaatttttttgtttaagggctttttacggagttggaaatgtccaacttgttaagtttgaaaaaaaagggggagttagttgattttgaaaccccaggcaattggttaatgtatgaaattgacaatgttggggttatcttggaggggggggttggggttccggcaatttaaaattgggccacttgaaggaaaggggggg

SEQ ID NO: 51 - DNA, 561 bp, Rattus norvegicus
  Genbank Accession No. AA799680
gtttattttagagtgagaccatgtcactattataaatcctggtgcattcaaggtaaagagttctggtacagacacaaatcatgacacacttcagtgattttatactgagtcatgtatgtgatataaaggcacattgtactgagtaaacaaaatagctgttaaattctccagcttttaaattagaatttcataaagtgcttcttataaaatcttacaatagtaattagttacaatttctgcagcaaaggcacctgggagttcttggcagtcgctttgtcttacgtctcctttcagcttggtatttctcagttatcttctttccacttaaactttccttagtaattcttcttcagaacagccagcccgtgcttgatgaggtgagctgtaaccgggcactagaaaggccacctgtaaaggtcttgggaatttggcaatttttatgaataaattgattaataatttaaataaaatggtattcaaatggcgagtctggggatgatagacagtacagtccatgattggagatggggttttaaatatccgttttagctgtaagttttt

SEQ ID NO: 52 - DNA, 628 bp, Rattus norvegicus
  Genbank Accession No. AA799691
agaactttactcttctactaacaaagtcatacaaaggcaaaagcctataaaaaggaaaacatgaaactgatctgaatggccacagttaccaggaacacggagtctgcgagataaggaggctggacactcttgacaggcagctcttgtaagcagtgacccagaacctgaaagggccacctgcccaaggcattcctgacagctgggagcagcgccccacctgctctgctctagacatcgagggctcaggagtctgagccaagtccagtgctgagtcaaaagcaggtgtggaaatcactaccctgatggggacacacaccgggcagcagttacttggcaagcctacctctggctgcctaacaaagtctgaagaaactgtgcaggtgcaaacttggcttctaccctaaccagaacgtcgtgagtgtggacggggttgattctctcggaggaagccagagatgcccagagcctggcagcacggggcatccacacagaagctatctctatcaagcttccccagggagggttaaataaataaatatgccacacacaatgtgaggaacggatcactgctgttgcccacagcctgtgaacaaaccatgacctacagaacagaatgcccaaagggtaa

SEQ ID NO: 53 - DNA, 637 bp, Rattus norvegicus
  Genbank Accession No. AA799700
ccaacaaagtcccttttatttagttagctgttaagaaattttttttattaattaaatctctggaaattttcagtgtaagatttagtatcttaacggccgccaacacctggctctgaggtttgatcagccgctcccagtccttattaggagttagagggagaaacatcattatcagagaccaagtcaggtggctatggccttcctttcctggctggacaagttgctcaactcttgctcagaacaggaaaagaggcagttgctcagaaaaataattaatgacaaatttgacaataaatcagtaagagttctcctaacaatttagacttatcaatatgttggtccagataatttttttcatgttgcagtttacttttttctgtatgtaatcttaataatcttactccctgtgcagaaatgaatcaactcagtgcaaaaaatccctaaaactggaatagcctcatcttgctttgggaaaaggtttttttactcctcattctctcaacagatgagcacacatcccctgcacttctgggtctggatgtacacaggcagcttttgatggaactagcaaaagtacctagaggcactatgccggcagcctttggaaaggtcttaaaatcaaccctggccaacagtc

SEQ ID NO: 54 - DNA, 400 bp, Rattus norvegicus
  Genbank Accession No. AA799717
ggaaactgggcatttattacaaatggaggaaggaacggtcactcagtccagcggtggccgcagtgtggggcggtgcatacatagtacaggcgcatggcatcctcagctcgggcactgtgtgactggaagaacactgcctccttgtggccacacttctggcacgggtggtcctcggtccggggcaacgtagggtcctgggacacgtctgcgatgatctgggtcagctcgtccacttcgtgcgtgattttgttgacgtacatgcagctgttgtcggcttcctgctggtaatcgcaattccggcacgcgtacagcagaatgcgattctccttgtcctccttggggtacagcatgttattacattcctggcagaaccgaataccgacgaagccagcctcgtgcc

SEQ ID NO: 55 - DNA, 571 bp, Rattus norvegicus
  Genbank Accession No. AA799718
caaaaagagcaaacatgtaaaaatccagggtgctagaaatacaaactcaattcagattcaagcttgtctagaccctggtcataattcccagtgaggtgcctatgagcaccaagtcagggaacgggacaggagtgaatcggaggccaagagaaagggtggggaggggatctcctaggtctcccggtgttcacccctacagtggtatctccatcttcccaatgacttgaagatctgccaggcccagtcctcttggccccaacctcaccctaaccagagcatgaaggccgatggcaatcggttctcccttcccttgctcagtactcacttgctctggcttctagccttattcttgtcctccacattcttctccgtgattagtagcaggttgggttctgtagaaagccacagtgaggctgggggccagaagaggtggggtggagacgggatgaagacgagggaagagctgtcccaggacccctttcttcatgggatcccaaactgtacaaccagctcttctttcgcatccacgcggatctgagaaagtgcactataggcataagcagctatcctg

SEQ ID NO: 56 - DNA, 503 bp, Rattus norvegicus
  Genbank Accession No. AA799726
gacatttcacagtcaatttctacatgacttcacactttcttagaagaactcacatttggtagtctctaccctaaggagtcgcttcagtatatgggcagaagcaatgtgtctgctgaaggagtcataccagaaaagataggtcagacagtaccataatcaataaaaacagtgtagtacattacaaatgacagtgcattctataaccaatttcagtcgggaacctttctaactgtgtccgatattgccaatacaactgacaagggttctcctgtgggctggtctgagttaaaattgactcctcaccttgagaaaacaacggccctacataatgcttcagaagagctcatagcatgcactaaggccattgctactcacagccttgggcaaccaatgaagattcttctggtccactccagactttctctaagtgctggtctgctctcgggcctcaaaggattctctactggagtctgtctgcctccagctgctccaggaacagagca

SEQ ID NO: 57 - DNA, 588 bp, Rattus norvegicus
  Genbank Accession No. AA799729
cagctcatataaaagtctcttaagaatgcatttgagcacaatatataatagtaataatattataacatacattgtgagaaacttttgaaaacaatataacgtccacctggaacaacgcagtgttacagacgtaggaacccattggtcatgcacattttgtgccattttctttaactagttgtcacaatgctgaacttgtttgaagccatctcgctgacagagcggtaggtctggatggtctctagctggtctaggcaccagtctagttcctccagcgtctccattgctagtttctgatatgattcttctgcaaacaaacacacagacaggtagttaggctgcagcggctgcaggctggccatagccgagtctcctccgcctcggctgctcccggcgccactgacggtgcccccttgctccttcattgtttgcttgccgactccttgcttccaagctctttctggtgctctgcccgggagggggagtggctggtgccaagttttcaccccctcgccgggatgaggtgtcagtgatctaccaagaaacttcctcagaggaagaaggcgggacctcgtgccgaattcttgg

SEQ ID NO: 58 - DNA, 581 bp, Rattus norvegicus
  Genbank Accession No. AA799735
aacataaataaaggctttattgttcagttcggatgaatgacagactggcataagctcgattaattgttccacacatttaagaccccaggatgacagcaaaagctatgcttattggcaatgggcaacagggagggagggggtgggaaggacctgaaggcctctgaagttcaagaaagctatcgggaccgaaaccaacgtcctagaagcaggtccaggatggaaaagggatcatccaaagctgaagatcttggaggatctggatcacttctggaactgtcatgggcttcttgatgggtcactgtggtctctctccggccctcactgtccaccacagtgcggtgttcctccactgtcccatctggcttagtgatcttggtcacagagatgcttttgaaataggatttaggctggggttgaagaagtggacccagaccttcctgggaaacctgggagtcaagatccttgtcctctctggctctagaatggggactcacaggccatgtatcatccaacctatgaaaaggtccctgggacccccaatctggagctggtttggaggattcaggttttgcatgactctc

SEQ ID NO: 59 - DNA, 553 bp, Rattus norvegicus
  Genbank Accession No. AA799741
cagagttggggtccttcttctttctccgtgtccccactttctctttgccttgttctggccgttgtgtcagccactccttctgaagctgcttcagcatgtctgcagtgaggagtccttgctgcaccagcctagaggcaaggggcagctccttgtcactggggctgggtggctctgccgccttattccctgttttagtgccacgtgtccttctagctgggctcttggaggctcctggcaaacgtgactggctccctgatggctccagattcaagagcttgtgtgactcagagattttaatcagtttggtgatattgtgcacaccttcttggataatgacatccagttctttctggagactccgaacaaagctggagtctggaaacatatcaataaatcggtagcttagccacaggtaaagatcaaagacatcatggacagcttcaagatccatgaggtctttaatgttcttaggtggaagcagaggccacttgatgtaccggcgtagccaggcaaaggtcaggggctcattcctgctgtactgcctggcaaactg

SEQ ID NO: 60 - DNA, 616 bp, Rattus norvegicus
  Genbank Accession No. AA799744
caaacaggaaattctttattgcaaagatacaaaagcagtcacggcgacatgtacagcaataaattaggtggtggccatgaggcagggtgcagacggggccaacagtctgtgatcttgatctcttctcaataatttataacatgggggaaaaaaagcacaaaaaaaaaataaatattgaaatgaaattgccaagtggcaggcggctgaggatgccaggcctcggcatgatcggcatgtgtccctgacaccttttgaaatagttaaagcttgctttaagaagtcagaggaacaagacagaaaactcacttttatctttaaataaaaacatccatatattattaagttgtgacaatgaaatttcagtgacacgaagccatggggcatgctcacacccttcccagccccctcctggcaggtgtcctctgcaggtgctccagtggtactgacagccctgtctcccctggccgccaagagtatggggcctccacccaggaggaccaccagaggccaggagcgggcagcaagccagtcagtggtcacctgcctaccctggagaccactcatccagttacccggcctgccagcaccaccacagaaagactgatggaggctgttg

SEQ ID NO: 61 - DNA, 671 bp, Rattus norvegicus
  Genbank Accession No. AA799751
  misc_feature (1)..(671): n = a or c or g or t
acacctaatacatgaaaagaactctgaattgaaatccagccatctagaaataattctggtcataaaatgcacaattatcccatgtgtccaaagtctgctgagtttgctctgaagtttgtatttactccaatatctagaatgtctcaggaccacatgctgatactacacagaacagaagggagctgagcagaaccacacgtaaatgcaaacttaagaactttatggtattgctctggtgccttatgtcttaagcactgaccagagagttaagtgtgagctagaaaagttttcagagaaatgagctgcagaacttcctaccccacccctaggttattcagagcaaggagggctgatgtgggggatgagaacctacagactgaacatcctgctttcttcctacctcagtccgacgctggacatcctggagtgtaaggcactagaactggcctgagaagtgctccaagcttcagttcttggtgtgcaaaagaaattgtggcatagatcttttgaaacataataaaataactcccccctcctcttatattctgttattcacagacaaaaagacaaggaggtanatgtttgcaaagattaaaaaacaggtgaatcaaaatatgaagaaagtgtgtatacntattcagatatggagaaccacttagagggcaanagtc

SEQ ID NO: 62 - DNA, 419 bp, Rattus norvegicus
  Genbank Accession No. AA799762
ggaagacacagttatggggtcaggaaagctcagtgctgtaaactaataggctctctccagctcctgctcatgtctgtttagccttcctagtttacagggagggttgagagtgtgggctcttgtctagcaccacttaaacttgggcagtctgctgattctgacaggtcaggacggggccctgctgttggtctggctaagatgcatgactggctgcttcttcatggtttcaggagccaggccacaggaaattgggcttctggaggcctggggggattctgccgagctgtagggagagcataagtcgctgggtcagcatttgttttaattggggccacccccacaaccacacggtaagatggactcactgctcaggagactccaacactgcggccatgaatgggagggtggatttcccgaaa

SEQ ID NO: 63 - DNA, 567 bp, Rattus norvegicus
  Genbank Accession No. AA799766
gatgcctgacaattggacaagtccctttctgacaacagaccattatgttgaatcctgcctgcaagacaagctgctcgaattcacttaaggagctggagggcagtgctgaagggggccaggttctcacaggacttaagccaccgctgcacattggtgggcgctgccccactgcttcccccagtctgctggagcacggaccacagcaccacatctgccacagtgagctcattcccaaccaaccacgggcttttccccaaagcggagttcatagagcggaaaacagccgctttttccttactgctcccttctctcagctgaaacatggcgatatccacccagctgtcgatgagggttaggtggacagcgttatgcttctgaccaaatagagagaacaggaagcgtgcgatgttcccttctccttcaatggggcacatcgtttgtacactgaacttcatctgtgtcttgggcacgttcttccaaatcagagtgaagcccagctgatactcgtggcgggactgttttctagcctgctccccgaagcacttgagaagattctcaggtacattc

SEQ ID NO: 64 - DNA, 673 bp, Rattus norvegicus
  Genbank Accession No. AA799784
ggcagcaaaattgtgttaaaaaaaaaaatctagaccatgaacatgttttactgcttcagtttaagaatcccaagccaaataaaaagagcagcacagaaagcagcaagctggttacttccagacaaataaaaaggatcaaatgcaacagcaggaagacaaacactcccccttttccagaaatcacaattccttcaaataaagaatgtgaaccatgtgccatattgaattgatatttatttcaggacatgccatgtcaaaataaaacaaaagagtcaatccctgcttttaacaataatatgtattataaaagcactttacaactctatcccatgtttgagtataagttacagggtatgtgggctaatgattatctgaaagtatttctctattcagatccataatccaagtgctctccaagtgttacaaggtgacagtacgtagaagtggaggaggacagggaggggagtcgggctttccagttaggaattttgttgcaatgaggaggtgaggaagtatgaagttatttttgttaccttttcatctttatactgtgttaagtaatgcttacaacataaaccccgcaggcttcttctgagttagaactcagaattttttccctgcaaataatgtatttacaaatgtgtttattaacttacacagcaatctcaacctc

SEQ ID NO: 65 - DNA, 586 bp, Rattus norvegicus
  Genbank Accession No. AA799788
cagcttctcagaaagctattttatttggatttcacacacaccaaaagcagagaggagactgtggggctggccctctttgggctggagtctctggctcccctgggcagtcggttcccagcctcccaggcttgtcatcctctgaaggctgagtggggtgtctgccctgcaccacagctcttctccaaagccgaggaaaacccatggggaatacagggtaagaggacctaaggatcatgggatgggagcccacattgaacctcggtgaggtagtctgtcgcctgaggcccacacgggtcctgctgaggtaaaatttgtaagtttatttcagggacgtgggtcaggactcctccttggtccccaggacctgcttccggatgatgtccgtgtactcgcggtccttccccttgctctccttccattttctgtacatcaccgaggcgtccacgttggcaggcgaaaaggtgttgggctcattcagcagggagatcacactcaggaggatggtcctgacattctgcgtggggttccaccgctctgagggtagctccccactctgtgggtcatcaactgggggatggaggatgga

SEQ ID NO: 66 - DNA, 596 bp, Rattus norvegicus
  Genbank Accession No. AA799801
ccggcgctcgctacagcgctctgctcggctcgggagggaagtattggagcgcgccaagagaagggctgtggactggcattctccagagcgatccagaggctgcgtgggggtcctttacggccaggacccctaccaggaacgatggtcggtcccgggtccccagagcctcctaggagaggcagagagaagaaaggcgcccaacccttagtacttccttcaggacaatggcagaattcatggactatacttcaagtcagtgtgggaaatactacttgtctacaccggaggaaggaggggcaacccacgtctaccgttatcacagaaggaagcctgcagaagtgcacgtgtgctcagactcggggcacagggaagcgcaaagaaactgcagaggagagacatctgttggtccaggaagcatctatcaaacatcagagcattctcaagagtcatcttggcctattgagaacatctctaaggacctctacatagaagtctatccagggacctattctgtcactgtgggctcaggtgccttaagcaagaagacccatgtggttgcagttgactcggggcaaagtgtggacttggtgttcccc

SEQ ID NO: 67 - DNA, 556 bp, Rattus norvegicus
  Genbank Accession No. AA799803
gagattatagtaaaagagaatttattctatacactgtctgcctccgtgattttaatatgagaaacgtagtgcttatcaaaaattggttagatacttttttttttttaatatactacacactggattctaacccaatgaatgctggcttcagttttcatctccaatctctttcttgatccagtcaacataattcagtaacttggtgtaaaagccgtatccctcaccacacccaatgccccaggatacgatgcctgtagccacccagatatcacgactgcggtccctgactgcaaaaacacccccactgtccccctggcaggcgtcatgcttgagagttgggtccccagaacagaacatattttgagaaaatacatcattactgtttttcgtccggagccacctctggcatgcctctcgatcggctatgggcagacggacaaacctgagattaaaagctattttatcttctgttatcccgaagccgctgacataacccataaggtctttgtcataaaaggtctcattgtctgggagacagatggggaggaggttggga

SEQ ID NO: 68 - DNA, 582 bp, Rattus norvegicus
  Genbank Accession No. AA799804
aacgatcaaaaaacactttgcacttataaataaacgcttctttgatcaatattaaatgaaaactacccagaaccttacaggcctttcagcaggcggcagacatgatgttcggaagatagatgttagcttgctgtgatcagaaggatagcgctttgctgtaatttatttaaaatgtacctaacagcttccctcacagtaacttgactgaaattacaacaggaaaagaaacccagcatttattcctaggtttagacataacccacacaaagttccaactatatggcttctatactttttcgtgaaggtgcgcaaaagaaattcggatctcactttagaccaagaatttcagatgcaataaggcaacctctgaagtccaaagttcaatgaatgcacaacagttcaagcagcagataccacctcagaggaaatatttagtttgcttctttgtttccctccagtgttaatcctgctaatgtctgctaaggtcaaccatgactggaacacatgctgctgatccagttgttcaagaccagcctgggcaacacggcgagacactgcctcagaacaaggagtgaaaacaga

SEQ ID NO: 69 - DNA, 500 bp, Rattus norvegicus
  Genbank Accession No. AA799812
aaataattcgctacaatcctgccacaaattaaagaaaaaattaacatggtattcacagagcagaattctttaggacaatcaaaatcccagagtacttagaataaattaacatcaaattgtgtttatattcagatagcctgattctctcctctgaaatgaaatggagaccattgtaacctagggtgaacgaacacacttgttcttctgtatagacatgaattctttacataaactcaacattaatttgaatcaagttaggaatcctgagaaagtcacccacctacaggcatacaaagacacacacagacagacacacacacagagacagacagacaggcaggcagacacacacacacacacgcacgcaccactcttgagaagcagtgtttctcatggacacttactagaaggtcatttctcagaagggtctaaaattctgaatatttggatgctatcatccccccgcccccaagaaaatcgtcttgtttcaagtgtgacag

SEQ ID NO: 70 - DNA, 475 bp, Rattus norvegicus
  Genbank Accession No. AA799814
agtaaagacaattttgttcatacaaaacaacagtttacaacagtctgagtgttgaacacaccatcaaggacatgggaggagctgcagacatctgggccctgccccaggcccagagatgcccaggagcccctcctccaccaacccctgagggagacacccctcctccagcacgaggggcatgggggaccatggcacaaagactcgtccccaactgctccgcctcaatcctggggagcccccacccaggttgagtagttagagggtaaggtggctggtgggcagggacagagtcaagacatctttggtgcgaagactgtcccacccaccagaccccgtgctggaaatcgagaagaccacacgtggtcctgcccttgccaaacggaggttggcaagtaccccatagttcaggggagatgcatgaaatgcaactgcctttctgggtagataaccttcccagggtcacccatgggactgg

SEQ ID NO: 71 - DNA, 467 bp, Rattus norvegicus
  Genbank Accession No. AA799879
  misc_feature (1)..(467): n = a or c or g or t
gctcaataaatgtttactgaaggaacgaaagcacagagtaaacaaaggaagcagtacagcatgagtgagccagtggtgagccatgcgagctcctccagacagcctcatcctgtcctagtgggcaagcatctccaacactgggacttcctgcaactgggccctgctgacagtgtggactccctgtccttcagggactatggttgtgctgaggcagggaacagtgtgttgtattcctcctggaaggtaaggtccttgaatctgcgtacggccagggctgcagtcaggctccacgtgaaaatggagaagaacgaaaaggcgatggcagcccgggctgcgtctgtcccttcgttcagagggttgtccttgggcttggagacttgccactggttggccaggaagcagaaacccacgaaccagaagaaggcccanaaggccgagacaccgatgtcagacagcacggctttctt

SEQ ID NO: 72 - DNA, 483 bp, Rattus norvegicus
  Genbank Accession No. AA799890
  misc_feature (1)..(483): n = a or c or g or t
gacagaattcttggttacagtacagctgaaacacatttttttttttgctctgaaagcacataaatgatacacacaacaatacattttctttcttttcatctacatcacagttattcttcacatagatagcctgcaagagttcccacgcagtaacgcaaagggtgacgggggtaaagcacggcagtgtcactcacacgggaaagcacgtgactggcagaaacagtgaggccagaggaaagcaaggcggtgtctcgtggtttctaagcagccatcgcactcccagcaacatagcctgcactccaaactgcctgcacagcagggaggcgcacacacattacacgacgacgagggccatatcagcaagggcagtataacggccacacggccaccacttccaagcgaatgagagcacgctaccactaacactgacccatgccccgggtcctgcaaaggtanaggggtaaaaacagaaaggggtggtta

SEQ ID NO: 73 - DNA, 406 bp, Rattus norvegicus
  Genbank Accession No. AA799891
gatacaaatctatttaatagtaaacatatcaaagatagctttgtgtttcaataaatatattctaaaagtagttcagagcatgctgttgtaatcactaaggaagacttgagactgtcagtccctctgcagaaatgctgtgcacagatgcaaaatgatcaaacgctgagacaataatgaatctcaagaaagtggcgtagccatctcgtgccataatttcttcattttgaagctgcccctctgtgtgtactaaatccgtcaatgatgttttcaggcgggtgcttttcatcactcgatgtggccagaatcacttctgtcccttcagtgctcgagcagagatccaccttcctcatctcaaaatgtgtagccttatatgcaagaagtcctgggttgtgtccccagcagcaaa

SEQ ID NO: 74 - DNA, 523 bp, Rattus norvegicus
  Genbank Accession No. AA799893
aaaaagtttattgtaaaaaaagtaagccattcacaaaattgaatgatttttagcagtacagctaaaacccaactgcatggcagtgagaagtagtagagtggcccagaataaaggctcttctcttaaggatgttccttttagccaataacttctgtagcatgttttttaaacaaattttatgacagcagttaagcctcatagcagattccttcctaaaaaagcaaacaacatttagaactagccttttgtggggccaattcccatcattaaactagtcccaccccctcccattaacaatccacccaccctcccaccattttggggaaatgtatctaatattactttgagccattgctttaagaaaatgggtcaaaggaaggttaaataaaattaaagggccaaaacatattgtcacaatagaaatgtattcattcccttcaagtaggacttaataggcattaattaaataaaaacaattcatctccagaaaaaccaagtgcagcttaactggactagttttggc

SEQ ID NO: 75 - DNA, 505 bp, Rattus norvegicus
  Genbank Accession No. AA799899
gacagtctgaagcttttattcagtgggtctctgtgtctagaagaaggtgtttggcctcttggtggtgaagcgtggtttgtgctggcgccgcaacacacggtggggcaatgggaacttgatcttggagtcgtggaactgcttgacagctggccggcggcacttgccagctgcaatctcttccaccttcatgatctggatggagtgcgcacgggcacggtgtcgggcacccatgtctcggtagcactgtgtgaccgcgccggcagtggtcaggtcccggtactctcggtacatgttgtgagtgccacttcgggaatcatagcgcagccagatgccgaagttcttcacacgcaggggtgacttctcaaacacctgcccacagtacacaatttccccggatgacttcttcatcttcttcagctgcgacacaaagtaccagaagcgggacttggccaccacatggttgggtgcagattcgcattcggtacagtggcggtgtgtggcattt

SEQ ID NO: 76 - DNA, 483 bp, Rattus norvegicus
  Genbank Accession No. AA799971
acataagaaggaattccaaaggtatacccaaggggcattgatcataagctgaacacgcagagggccccaacgaatggcacagagtctgaacggattggcacgttcaacttccattcatgatggctgaatactccttctggtgctcaaccattctcagaaacacttgatatttcttgtcataatattttttatcagcacgctctgggaacacaaccttccccactttgctcattcttgccattgcctcctgcacagaagcaaagtcccctgaggcacaggcacccagaatagcagctcccacgaggacagactccacctcttgtgacagaaccacaggcatgccagtaatgtcagcatgcatttgcacaaaaaggggattcttgcttaggcctccacataagaagagggtactaagagaatgtcctgctgcttccatggtctcaatgatgaagcgagtcccgaaagcaatggcttgaatagtgg

SEQ ID NO: 77 - DNA, 712 bp, Rattus norvegicus
  Genbank Accession No. AA799991
  misc_feature (1)..(712): n = a or c or g or t
acaatcagtaatataatcaaatacacaattatatacaaggattatatacattttgcccagacttttacatcacagtacatagtttccattaaaaatattgtttacatttatcaccaaacaataaaacccaacaacagtagtgttacagcacctgttagtacagacagctttttcataaattacatcataagaaaatatacggctgtaaattgggcttttaaaaatgtctttttataaaatctgaacatacaatgtttcattcacagaatgtttttttttttcaatgttctgactgtacccttgtgcataaaacaaccagctggaatatttagtaaatgctaccctccctctaaaactataagcactgtttgaattacttaggctgagctttctttatgatgagtctggcatggagtttggtgagaaaacaacgctggctttgctataanaaagtcatatgatggtaattaaatctaaagattccaggaaataatacatagggaattgattcagaaggcatattttcattagaatactacacgtaagaaaaggaaaggaaatgcaataatgtccaaaagtaaaccttcggaccataaaggttnagaaaaaaacattcaattccgccaaatccagattacatctccattatttaggaaaatcaacagctaattcagggttagggaaacacattcaggaaatttgctanaccgtg

SEQ ID NO: 78 - DNA, 633 bp, Rattus norvegicus
  Genbank Accession No. AA799992
  misc_feature (1)..(633): n = a or c or g or t
agagtgaaatgatggcagtgatgtcaacatcatacggggaacaccaagtccacactttgccccgagtcaactgcaaccacatgcgtcttcttgcttaaggcacctgagcccacagtgacagaataggtccctggatagacttctatgtagaggtccttagagatgttctcaataggccaagatgactcttgagaatgctctgatgtttgatagatgcttcctggaccaacagatgtctctcctctgcagtttctctgtgctcactcctgccatttttgttaagcccctccactccactaccttgagatgactcgagctcaggagagccacctgcctctgtctcccaggtgctangattaaaggcatgcactaccacgcctggctcagaaacagaacctctagaacaacccatttgtagtcccacatgtacaagattatgtggcttttaagcctgctaagacttcagagcacctcgtgccgattcttggctcagggcaaatccctatgtgagtgtataaatcgtaacattcatgctgttccgtgtgattgtaccgccaaattcaaaaaattcaccggacataatgtaagctgcgtgccaaggtggctaccacataatgttggccacgccgcttc

SEQ ID NO: 79 - DNA, 556 bp, Rattus norvegicus
  Genbank Accession No. AA799995
  misc_feature (1)..(556): n = a or c or g or t
aagatgcatttgacatgccaaccccattcacaaaaatacatggttccattgtgtagtaacagtcccactcgtgtgagggaaaacacacgcctctaatgcaaagctgctctcagggttacaagtaaaggagatgcctctgcagttagggaagcgactactgcaatcgtgaacgggaataactgtactccctgcataacgagagattattttggagacagttgataaaaaccatacaactttttagtgttaagtcaaagagtatcaaaatcanagcaaactacaggtaagactaacaaaactactaaggacatcacagagtgaaatggactagggcaggcaattatgatatgacacaggagataagaggaacattaaatgtcanagatctagggaagatccgggtactgattccacagcgctagtagtgatatgggttagatctagctccacagtgctagatcacctccatgggcatccgcaactcccttccaggtctttcacacttaatcagtgtcatcccgattcatacgcacatcgaagcgctctcagaatcatg

SEQ ID NO: 80 - DNA, 743 bp, Rattus norvegicus
  Genbank Accession No. AA799996
  misc_feature (1)..(743): n = a or c or g or t
aatgatgaattaggcaaaaattttatttccaagctcttcaaagataatcacaaacacaaactttccttctaaaagtgtccccaattaaatcaaaggcacatcacccccaataaaatatgtgtgacatgaattcttttaggttataatatcttcatattttgtttttaaccaattgcaacgttctaagtgtagatcacatttaaacatttttaaaggcatgagcacacttttcaaagcatcagacacaattataagttgtagagtacaggaactaaagaaagttctaatggcttcacacgggagggccacctaacaacacatccatgctccgtgtgctaaggagcggctccccagcttcccgtccaggtcagaccgtttgctcactgggactggaaaggcctcctttacgaaaccagcatatcaatcattccccaatttatactttgtctaatttagtaactgtaaatttttatgaaaattttttattacagtataaaaatgttaggaaaattacagatactcagttttcggaaatacaacatttcatccaganatgcanataccagtanacaaaacatgcctccatcccaagcagggccgcacaggcttgactganagatgcacccagtgagtttggnnatgaggtnanaaatanacanacatgatttcgtaaaattttgactagacaggcacaanaaatgattgttctgaatcgttttctggactgnngtatcatcacacca

SEQ ID NO: 81 - DNA, 613 bp, Rattus norvegicus
  Genbank Accession No. AA800016
  misc_feature (1)..(613): n = a or c or g or t
gaaacagtcaaaatctagtcaggtagctcttatgacaataatcaaaattaattttataactttagcaatatatatcgaacacttacattcaagtgtatagaacacaatccattaaatcttgaaaaacactgtaacaaggcttgaaatgactgcacggtggcaatctagcgttcctctgcccattctacagttatgggaaactcagctctgtaaacacagccagcaaatcacagcactggagcggtcagttgctctgacatgccctgccatagttttgacagtagagggaaacaattcttacaacattacttaaaaatagatcttagcgatgactcatccttatgtacacacattatgctaacctgtcacagacagtaaatgtcagatttatacactggactctgtggagcaccctacacatttagaacttactatgaaaataaacaaacggctgtcaaatgtctctggatggtctgctccacctgngaggatgganggctgctctgaagcactgcgctcactgctgcttctcaaaggcaaannacangtaaatgcttgtagctttccagtctgactttactaacgttcccagaggtaaactttactgactggt

SEQ ID NO: 82 - DNA, 600 bp, Rattus norvegicus
  Genbank Accession No. AA800029
aaggactgcacaggaacctggacttggaaaaatcatattctgggaagcagctttgattgtagccaaagagatgtcctcccagaaggccactaagtgttgtaatgttaaggggagcggagacctagacttcactgagtgatgcatggacatttcaaaagtggcttccgattttccgtcttcacacttctcatgtagaggtggctccttaagcatagacaggaccttatttttgttgatacttcccatcttggatatgtctggtccgtgaggtgaaatgttgaacatatttagggcagatgatatttccaacgaatgtctattttttaacttgatttccttttcctctgtgggtggctggctattcagactacttcttatgggagcatgttctttggaaagttcaggattaaacttcaaagaagaagagcaagcattgcatcatgtactatgccttcatgccacagaaaaggagcaaagacagctcgggcacactcagccacggacggggacatggctgcctggctgggtcaaaaatttgggtcaactcctttgaaaagaagttagactttcctttttgggcctgggtgtccattgcacatt

SEQ ID NO: 83 - DNA, 613 bp, Rattus norvegicus
  Genbank Accession No. AA800034
  misc_feature (1)..(613): n = a or c or g or t
aaaaacaaagtttaatcatacttattaataacaagactttatataaaaatgcagagtataaattcaacttccattatttcagttaacttccaattatcctttccaaattaaaacaaaataccaaacagggcaaattgtaaatttaaatccaagactattaagttacaaatggagtaaatcacaaaataaaaatgcttaacattaagaatctacctatcacataagagaaaaaacagaagtgtgtgcattctgaatgtcctattttaccagcatgatgtatggggtccttttatgtacaaactctgccacgggatcactgttatgtctcactgaacttcgtaatcctatgtgcaacatgtgcaaggtggagaagagggtccacacttagcatacaggactgacacactgattccttaagggagttgatgatacggctacagacttcacacagagaaatgtatttggtagcacagagagagctaaacattttgagagttaanaacaaagacagtcagtcattgggaaacattcaaggacaaagagaactgcataatcactctcacaacaaactttattactaattaaaattaaaatttgaggtgggaccctagtt

SEQ ID NO: 84 - DNA, 648 bp, Rattus norvegicus
  Genbank Accession No. AA800062
  misc_feature (1)..(648): n = a or c or g or t
tgctgacatggctgacagtgactgtttattgagcatcatgacacaactgagactgtccaaaactaaatgggtacagtctgccacaaaatacatttcactgtcaattgtgaaaattaggaagataacaagttctgttcgaagttttcataaatacattgatttctgaaaaatattgttaatactatattgtatgaaaatctaaaaaaatatgattagaaggaaaaaacattaaattgattatacatataagaatttaacgggttggggatttagctcagtggtagcgcacttgcctagcaagcgcaaggccctgggtttggtccccagctccgaaaaaaagaaaagaaaagaaaaaaagaatttaaaataatgagtttgtgctaagttcttgaactcaagtttttgaagtgttactggcaggcaaaataattaggaaaaagagaacactattccttaaaaaaaaaatactgcttttataantggtattttatactcctcganaatacaatttcgagagtcagaagtcctatgattggcccattaaatagtgtcaaatatcatcctgaggactccagccaacataatgatactgcactgctgtcactaacagcaaagttgatgacatgggggtctaagaaagaacaagag

SEQ ID NO: 85 - DNA, 599 bp, Rattus norvegicus
  Genbank Accession No. AA800169
aaggtgtcatgaacttcctggtagtaccttagttaggtttccatctctgaccaccatggacaaggcaactcttagacaacacttaaatggggctggtttacaggttcagagtttcagtccattatcatcaagatgggaaacatgggcagtactggcactgctgagagttctacatcttgttccaaaggaaaccagaagactgtcttccaggcagctaggagaaggtctcaaagctcacttccacagtgtcgcacttcttccaacaagtccacactactaatagtgccattctctgggccaagcatattcaaacacatgagtcgatgggggccaaacctcttcaaaccactacaagtagaattctcatgaaatatgacttcatgattgctagactctaatacaggatttttcatcttgtcttttactattctcagtataatcaaacactgaaatatttacttatgtgactatataagtcacacacaaaaatgtaaactaacattaattaggaaaattttcaagataaattacttagaaataatttttataatcccaacacttaggaggcaaaaagcaagtaagtgtaacttttttccccc

SEQ ID NO: 86 - DNA, 601 bp, Rattus norvegicus
  Genbank Accession No. AA800175
  misc_feature (1)..(601): n = a or c or g or t
ggcagcggttccagatttaatggaaggtgcacggtgcgctgcttcgcaccctgaggccgagctgctgcagcgccaggtatggagcgtctgcttttcgcaacggaacagaagaactgagcatacaacttaacaagaaaaaaggccctcctgcctgcctctgagaccgggggatcaggtcacctctgaccccctgagcctgggggcctccccacctccactgcccttctgaagtcgattcctccagaaggagcctagctaggacagccccaaatgggggcaaacagggagcgggatgctcagagtccccttctcagagcccccctcccagtcattttaggaacaataaatactgtgtgacagtagcaggaagggcgtccatgggctgtatgtgtggcagcccaagcaggctggccaggtgcctgccctcattctgtgcgtaggatgatatggatgcctgaatccgtgaacaccggcccactcatttccccggtccgtanagcaaacgatgcatcttcgaacggtttctgcatctgacctctgctgaaggcacccaggtctcccctggctttggcanagctgcagtcactgaactgtgaggcca

SEQ ID NO: 87 - DNA, 693 bp, Rattus norvegicus
  Genbank Accession No. AA800190
atgggtatagaagtttaatccatttctcttacaaggaggtaacagtaaatagtagaggggtgatcatgtattatggcttcaagggacctcatgcacagggcagcagatgaccagccccagaacctgcccacccacccccaaagctaccacagtggttccggtgaattgagtgctgaaaacagacacctcccagtaaacactgccagggttgaggaaagtgaggcgttttcctgcccatcccgaaccagatacagcaatgcaaggtggtgaatctctggaaggagttttatgtagttctctgacaaccctactctgccctcagggaggagcatggctcctgtagtgggtgggcttaaccgctctttctcactatgctgctgtagcagagtgggaaccaggccctactgcaggactagcagctgagtcagccagggcagaaatatccagactgaccaagtacaaggtttacttgcaaaaaaaggaaggctttagctagtttcaattcctcatgaagtgttatttcctgttgaaaaagcaaaggactaagccaaccgtctataaaattgccagtccttaaccaaggcctcaaatatgggataaaggtctctctttagtctcctcttcagggttctggggttccacatgacacccacagggttctacaggtggctacagaggcatggccccatatgg

SEQ ID NO: 88 - DNA, 591 bp, Rattus norvegicus
  Genbank Accession No. AA800191
gattctttattcctctgctgcacagcagtgtacaaggtggacttcgcctgactccatttcttgcagaggccgccttcagtctgcccacttcagccaatgcatgaagcagaatgcttgctcagaaacgttttttttttttttccaagtcattttcacagggatgtggggtcaaggggcaacattacacccaagaacaggaatccaagcctcagaggaaaggcactgcaccagaccccctgcttctagggaagactgatgcagagagggggaactcaacagcagattgtagaaccaaggcagaggaatgtgagtgtgacgctgagtagaaggaacacagcaaggcaaacaccattaggccctttccttcctcagttctgagcataaacttttctagggactaaagtagttttagttccaaggtctggttttgctccagggtgacagaggccacaccaggcaaagatctcacaggtgatacaggcagagaggtgtggtacagacctagagagatgttctcaggaccacgtgcaggtatagcagcttggaggctgaaggccagatcagggtaaaggatgcacttcataactccaa

SEQ ID NO: 89 - DNA, 543 bp, Rattus norvegicus
  Genbank Accession No. AA800197
  misc_feature (1)..(543): n = a or c or g or t
acaaaacaaccatgttaggaaagacacaaaagtagaagtaaatgtctaagtaaaaactaaataaacatgccaagagctatgacttaaaaatcctaatgatgcactcggctacatccagacccaagacacaaatttactttgccacttaacaaaaaagaagcagaatgcccttcatcttcaatgtatttttaaatgtttgcacattgtgtgtctgcaggcaatggcagtatcatcaagtatttaaacaaagtcacctttcaggttgaatgaacaagtcacatcgaaatgtgcaatatattccaggacagccagggctgttacacagacatgctgtcaaaacaatacaaactccccaaacacctcaatataaatgtttaagaaaacaccagtattatataggcaatataattcattacaaaatacttttcttcataaaactatctgctttagacacaaaaggggtatgtggcccttctgtggtgctaacattaccagcttacacagattcgtctaacactgctctangaacagtgctgagaatgt

SEQ ID NO: 90 - DNA, 631 bp, Rattus norvegicus
  Genbank Accession No. AA800199
gggagagtagcgtttatttggtcctcagagccatctgagacaacatactgaactgaggaagaaattgggttccaaaagagctcatcaagtaaagaaagggactgcacttcccagtggctcaacagttactgtgatcagtaaggccgggaatacggttgctaccaaatcgctctcgtgtgtcgccattacaaaagtacaggtttctcatcacaaattgtcacaaacccaagttacaaaagaaaaatcacatggtgcatatcttaaaagacagtgccccccccacctcataagctacggtaatatcaagcagggagaaggtagcttttgctacccctcggcagtcatcttccccaacagcggggagaaggcacaggaaggagtggggcggggcgctaatttcccctcagtacaagatgacaggtgaagcttggtgggagactggagctggtgaggcttgaggggaggaggctccaggccctgtgttcagtcagagtcactgctggaggaggaggaggaggaagaggaggaggagtgcttcccgtgcttatgatgcttgtgtgatttcttgtgagctttcttcattttcttcctagtcttcttgtctatcactattcctgggcctaccatgcca

SEQ ID NO: 91 - DNA, 582 bp, Rattus norvegicus
  Genbank Accession No. AA800210
ttaaagaccttcatggcacaacttcttcccagcacagttatgtcttagtcataccaattacaatacaattacaaccaataaatcagggaggggaattctgactttaaacttaaagagaggaagggcacacttcaaagcaaagttaaaaaatactttagagtaactgccaacacagctgttttatattggcatccatcccgccgtctaagcaatacagacacaggaagtgctgagaaatagtgtcccaatacaaggtgtacagatgaggtaatttacaacacagaagttgttactctgtaaaccctgaccctccctaccccaacccattcagatcttttaaactctccacatttctgcagtgactccttatttcttttaagctttgatttattttaaaaggctcttaggtggcactccagagtcctctgcactcaccctcagctcttgcacaggtctgatgtgtgaggaggcccagttacctacagctgtccacaccagtctcagacacacctatacttctgagctgtgaacggggtgtggagtcctgatccacaactttcctttccacctcaaaaggaagaa

SEQ ID NO: 92 - DNA, 583 bp, Rattus norvegicus
  Genbank Accession No. AA800224
accaaaaaatattccaggtacctcttcagatagatcactttcaaaatatatttatagaccctttgccagtgctgtcatcccaaaagctgccagaactctggaagtcccgtggtccagccctcagcccaggaatataggtagagtctccatgatgggtggtaagagagcagtacctgggctgtgctggctccttctttcctcataggtaaggtatgacattaaaggacaataaatacgtgttgaatattagcaaaaaaagattacaagtcctatgctttgttgccgtggctctttgaagttcatctacctcactggcagctggaagacagttctgctgcttcgttctcagctcttggccttctgggctgtgtccacactaaaccctatggctatactgtcttgatttttcaagaattcacttaagaggaagaaagcagaaaccttagctgcaagtacattccccaatttaaattgtggtagattagtgataacatgaaaaactgagggatgatggtggtacagtcacatctccaggggccaagacatcttgcttgtgaactcagtgagtcacaggaggaaaagc

SEQ ID NO: 93 - DNA, 613 bp, Rattus norvegicus
  Genbank Accession No. AA800243
acaatatgcaagagactgattcgtatgttcccagacactctgctgttagtcgcttcctaaagctcttgaaaggcccatctgcctcctttctcttgcgggaatcctgctgctcggtcctgccctgggtaccaccaccaaaccccgttccttcctctgacatcccacagcctgtaacagatggtagagaatttgcgtgaaagctgggtccctggacctctgtatctgtgatctgattacatgaaccagcctttggcgctagccttgggggatggctgctcttctgtgtcacccagtgctcggagcacataagcgcccgcataaaccaggaactgtccggtcacctgggcagcataggatgcgaaccgcagcagactccttaacaaggccttgaagcttgtgcagcggatatcatacgacactgagtacatctcatacatggtggctttgacattgagacagccgaggaagtccttgggattcagcctgtataggtcgaaggtgactctggctattcctgacttctttgtttgtgtgcagacatacttattgcccggtgtccatttctgtcccttttccaagatcatgaagtgtgtgttgtctcttagggtctgaa

SEQ ID NO: 94 - DNA, 609 bp, Rattus norvegicus
  Genbank Accession No. AA800258
acagcaatgcactaaggctgcttttaatggcggcgcagtagagaagacagggttcactagcttgagctcatagaaagatacccattgactcgtgcaaacacctcaaaatagaaatctacccagagccagaccccaggctgtgaaaaccgcacagcacacgatagagatggcttcttgcattttgtggggtgaaagaatgactgtgccccaacactgtgttcagagcgtgggaagaccctttgtcttcagacggtctcacctgtgcctttacttgggtgggagatgggaagaaacatgcttcctcacacactgttttattaatacatgttttgtttcagtaggacgccatccattaggcctgccggagccctcctgggtatttctgggttgtgttgtgtacatgtgtgcttgacagcgacagcttcgcttctcatagcactgtttgccttactgttagaattccagtaaagtatcctttcccacattccttgccaacaaacccagtaagatcctgagtcctcagcaaacatctggttttaaaatctggaaaacagtcctgaaagaaaaaaaaaaaactactttctgaactctgggcttcatgacagtagt

SEQ ID NO: 95 - DNA, 596 bp, Rattus norvegicus
  Genbank Accession No. AA800296
cagtgtctacaatcaattttattgtaatataatctaaaaacataccatttagaaaataccaagaaaaatttatgtacaagagttgatgctattgcatttggataaagctggcaagttcttgctactagcatagcccaggaaacaccaccgaggaaacctaatatattggaatagatgttgtgccgtttggcccacagtttgatggctctcagagttaacctgaagttgtcaatgtttggtactagatgtaaaatctcatcggttaccctgcaaccattaaggcttcttatgcatcttatatctaggtttttaagcagactgtcatctcgtaggtccaaatcttctggaatagtctgcagtgctaatcttgcaaacaaaatatcaatctctattccatcaaaacagagtttgataactggtacaaatgcctcttcaacagctcttaaatctttcacttcttcttgtaatttcaatttatcatagaatgaggtgaaaaaatcacttcgatcaacatgtcttggtgcaacacacaacgcatcaatatcagcacctttcgtatgtactcctagtctgtaggatccaaatgtaaaaatttt

SEQ ID NO: 96 - DNA, 557 bp, Rattus norvegicus
  Genbank Accession No. AA800315
catctgccgatattcaggtttattcataatttagctgttgtgaaaatgcagctgaaatacggatatcccaagaaactttgcaggttggtggcttcaggtgacttttgtacacagctttgtgctgacacctaaaggaaatctatacaggattctaggattccagattactcctagttagcaggctggagcaccttatttatttgtagcagaaaaatctaatagaatcattatatccagagtagacagcaaaataaaacagttttttttttttcactatctagggtagacatcagaatgaagagatgttttctgagagtaatttaaccttgaagaaatccttgtagaaatccggggtgttttctctcatccatggggttatttttctgaaggagctttacagcctttgagtgacttctgggtcacaagttggtcctggcacacctggaatgtcttgcattatcgagcacatctccccagccagctctttcggagggtggcccaagtcctgtaactgctgcataagatcgagtaccgcctcaaagcgagccctgtgagta

SEQ ID NO: 97 - DNA, 560 bp, Rattus norvegicus
  Genbank Accession No. AA800318
gaaagtgtctgcaagttttatttgtagactctgttaagcttgaaccataaaagctgcaaaacagtggtttagagagcatgtcaataccatgggggttggtgggtggaaactgttccttctgccagttcctaaggctggaagtggctagggcaggcagtggcgaggaaatagctggatgagctgaagcttgggtggcagtgcttactcaagcctgactcctgcctgtctcaggccctggggtcatatacacggcccatgaagactgggaacttgtgtcgctggtcccagagcaggaagaggaaaggctgctgcacctcaaagatgagtaagtttcgggccacggagatggtggaggctgcggctgcttccacacctgtctctgtcagttccaacaccgtctcgtgtttcatggaagacacctgaagatctgggtcctcagtcagcccacacaggttgagatcgtaagtgaagtcaaagaattccagtttctccatgattgacagcatgtcttggatgctctttactttaatgcgaggcatcatcacgtaagtgggctgaaa

SEQ ID NO: 98 - DNA, 678 bp, Rattus norvegicus
  Genbank Accession No. AA800429
atatacgcaggctttaaatacacacacacacaaacacacatataccaaccatgacccacaggtgtctgtggatataccattagtaagaagcccacaatgatttctgtatggttttgcaaatattgaacaagcttctgctttatttattgcaaatgttactggatgactttctaggtaaagtgttcagggttggagctgtatgaaatctgtaatcctagatctgtctttaggaaaccaatactgttgcagactctcctgtggtatactaagcctcaaaatgacctcttcctaaaaggacctaccaaagttgtacttgggtctggagagaaggttcagtagttactaactagcacctgttctatagaccccatattccattcccaccacccatatggttcaaagccaacaggaattcaaatgtcatagtaccttacaccccctgctggcctctcctggcactacagagacacatgcaaatgaagccctgatactcatcaaataaaattaaggattaaagacaaattttggtttcatgaaatgaattctacttccattcaacattttacaaagaataatgggattcactcattttcataattagcctttggaggcagatataagaatttaatttatgttttgatagtacagaataaagactctaaatatgttctcacacaa

SEQ ID NO: 99 - DNA, 259 bp, Rattus norvegicus
  Genbank Accession No. AA800456
gaaaaaaaaatacccaaaccaattgcaagcctggtaatgagtggggccaatcttggacttgatggaaactgttgggaaaacatgcccgtcattgggagagagctgaatggaggtcaattatagaatggataaatagccacggaagccaatttagacattattccaatggatgttctgggtacagtattacctttggtgtcttctcacctgaatgtgggctaagataagtgttctctgaaacatacagccctgcctcgtg

SEQ ID NO: 100 - DNA, 572 bp, Rattus norvegicus
  Genbank Accession No. AA800551
aacactttgtaatcagtatattagacagtcatacatttcagtaactgcttaaattctgataaccagatttaagcatgtaagcatgtgacttcaaaacatacaacaaatctattcataatttgctatactaccaacattaaattgcagttacgttggagcctaagttgaatagaaagcctgtaacagacccaaggaacgcctttcctggactatacatgcaaatcacctctcaacatacagatctcactttaatttgtaagttacttgggctttggaagtcactacacccaagcaagggcctttgggaaggggaaaaaggtgatgttttcagtttatatatatatatttatatttaaaatggcacagcagaagggaatgcaatctagaagagcaagcccttaagcagtagcttatgataaactttaggaatgtatcatttctatcactaatatcacaggcgaaatgtattatgccaccttctagtaatggctgaggcaatacaatgcaaaggcatcacaattagttcacttcaacaactagacagaccaacatgtaactaattgttttctttt

SEQ ID NO: 101 - DNA, 473 bp, Rattus norvegicus
  Genbank Accession No. AA800572
gaagtagtgatatgttatattcagacatgagtacatttcaacagtcttttgcaataaatatcataaaataatagagattcgcataataaatattctttacaataaaaaaaagtttaacagacttttgtcttaaaaatagccaggattcaactttgtgttttatacataaaatatacaaaaagcaccacaatttgtggttaaggcaatgaaaacacaggaagggttggaagtgctcagctgttaaagagtcaaaaggccagccaggagccaaaggcaccttagggagctgcggctgagacaccggggcagatcagataggaatgtcaactacggtgtccaagcgccccctcagtgaagtggggggtgcgaagggaaggccttcacggatactgggtgctggaggaggagaaaggagggttgccaacatcatctctgatgtgaagaccaacaccgcacagtgaatccagagctgt

SEQ ID NO: 102 - DNA, 551 bp, Rattus norvegicus
  Genbank Accession No. AA800576
acaggctgaagacaggtgcatctgaggtcacctttcctcttgaacaggccatgacattctgctcacatccatgccggttaacttaaagctagaggtataaagtgacatctacagtgtatttgcaaggccagagctacagtggcaagctgcatgtggctgcgcgccaaagctcagtggtgctcagcgaggctcccgggcgctcgctgctctaagcatgcacttggaaacccagctcatcagtcccttttaaacagagacgggatgatgtagacccaccaccaagactcgcggaaggggctacttaccacaacctgcattaatttataaagtgagatcctaagtcaaacattcacagaaaggcatattcactaggagctggccaggcagactgtctttcttagtgacctgtctgctggctgttattatagttagcatttaaaaaaagggggggactgaattttaaaatagagcacttggcggggagagttaatgtgtgcatgtgcggaagccgctccctgcactctgctgtattcaacagtcaacactgcaca

SEQ ID NO: 103 - DNA, 657 bp, Rattus norvegicus
  Genbank Accession No. AA800597
  misc_feature (1)..(657): n = a or c or g or t
atattccaaaggtcttttatgaggataaaaagacaccaaaaatatcaaggtgtaacatttcctttcaaatgatctgggtgaacagagaaaacacatccaaataacatttctgtggattattattattaattataattatacattcatgctgtagtggtaacaacgttcacatttgtctcagtgactcattacaaaggcacaatcaagtaggatgcatgtttaccataaaaaattaacatacaattttaaacagatgaagaaaaggaccagtttgaagtattaaacagaaatacctgtgtgagggtcaactcaatcatttccactcctaagcatctgtactaacactctgtattaacactctccagaggtgaccacgggtcagtgtctgtctgatcaacatccactttaacttgtaacatttgaacatttatgtggagaggcgaagaactaactcagtgagttcttaaaaacccctctttctacttcagttaatcctgtgagaactaaaaagcctttcccctctgtatgaccattcagtagttaagcagttttacattattgacacatttgaggattattaaaaaattgaagatagccatccagtcacagtgcttaacattaaggaaacagtaagttanaagccaggtgagttgtttc

SEQ ID NO: 104 - DNA, 506 bp, Rattus norvegicus
  Genbank Accession No. AA800613
cacactcaagattttatttaaaaattccaaaaaaacccacaaaaatagacttgtacggtaacaatatattacttaatatattatagtatatacttaatacagtatcagttttaacattacaaaaagaaaaacggagtagacgacccaatatatataaatactataaaatcttattacaataaataaagtcgtcataaataaagggtccattggttggggcaggggcgtgggggaaaagggatttggcaatggctttggctatttgctttgggagggaaatttgagcaccaggattctcaggagaggctacaaccaccggacactgaacttcggggtctagtaaaaattaggatactattgtgggagccgggtcttcacagcacttaacattccaggagaccagagtttccgaggggctggtgcatacctgtaaccccagaacttggaaaaggctaaggcaggattatattgagttcaaagccagcctggggtaccctagtaatccc

SEQ ID NO: 105 - DNA, 642 bp, Rattus norvegicus
  Genbank Accession No. AA800626
ataaaggacaacatttaattggggctggcttacagattcagaggttcagtacattatcatcagagcaggagcatcaaatcttccaggcaggtatggcagagaaggaactaagaattctgcatcttgttccaaagggaaccaggaaagactgaatctctcaggcagctagaaggagggtctcaaagcccacccaatcagtgacacttcttccaacaaaaccacacctacttcaacaaggccacacctcctaatagtaccactccctatgggccaagcatattcaaatcaccgtgctcagggttattttcactggggttttggttggttgatttttggtatatggatcccaagtcttaaaacttgtctttcaatttacacttgggccttgctcttctgtcttctatatcctcagtccaacagacacagaaagggtggtcttttgaagataatcttacccctccatggggacattttttcccagcattctaaagccaagatgtaagctcatacacacagaatactgaaacctttccttgaataacaaaaagggagtgtgtagatcataaaattgttcacttggtcttttaaaataatatcgtagttgctaaaaagacttcagtgtaccctcaactcttttatcct

SEQ ID NO: 106 - DNA, 539 bp, Rattus norvegicus
  Genbank Accession No. AA800651
  misc_feature (1)..(539): n = a or c or g or t
acaaacatagactttattaaatgctgctcaatccccagtgaagatctttcattataaaacggttttccatacaactgcaaggcaagaggttggaatggtactgataacaacaggtgtgaaaaatacccgaccaggtaaaaacatacaaggcttctacgcagtcaattcagagtttgcccactgcatttcccttacacaaagccaggcagtgatagctagcagtccgcatcacactgtgggacccagggcctccttcaccctgcaggcaggcctgggacgggcaggttgaggactgggaaggccctgcctccagccttggaggaatgaaggaggtgagctagggtccacccgccggtgctgctctgcgcacgctctgggtgctgctgctgcaggggatttgggaacagtcaacatttggtttacttccccccagcttttaatactttgtgcttcggaagcctggaaacgcaagatgttgcaaaacccagagtatggcagtatctttaatgaggctgggcctttatctcnccaaccgcctc

SEQ ID NO: 107 - DNA, 590 bp, Rattus norvegicus
  Genbank Accession No. AA800671
acataaaacaattttcaaagaatacatttaaaaaccatctagatactgattttatagcattacaaaaaaattgagaggcacaattgaagtattcaaataaaaggtgaaggtgaaggtgggggtctctacttgctatccactgtgtttcctgggactcctcctacaggagccttcccatgaggcagtagtgcactttgaataaatcgaataaatcacataaaatatatacttttatacagaaagtgttgctgtgtcatcactttcaattgcttataaaaaacttcattttgaattgcacaaaagttctctttaaaaccggtaattcccagaaggcagggcttagaactatatgtctaaataattcattacaaattaattagatctctatttctccacagataaaaaaaaaacaatctgtgaagaattacatcatttaagtgggacatttaaaaattttttttcataggaaaataggtttatacatttgtccctagtcagctcaactttctccccctactttaaaacaaatcacagggcgttcagaacttttcagacggagtacctgtgccacagtactgggtgtgtcccat

SEQ ID NO: 108 - DNA, 698 bp, Rattus norvegicus
  Genbank Accession No. AA800673
  misc_feature (1)..(698): n = a or c or g or t
gggtaaaggaagtatatgtatgcagcgtatatcacatcgtatgcagcgtgtaacatatggtattaattgtctaacagtttttttcctggcacttgtatgcaaacagctttaccaagaggctctgtgcagcttttgtaacatgtcatgaagcatgtaactaaatggtgatctcaaagaatacatacaggctactttgtgtctggctgtgagaaggagaatattcacagtggtgttctactgcagttcttctaacaacccctttactaggatgcagtgggactaaaaaaatggaagaaacctcaggtacacttaaatacagcctggtactccctattaagtaagttccagcaatctacttttctctgttgtggaaagagtaaacctgaacaggtaccaacgtgaaaattcagtgtataaccaagtaactgctaaaataaaagttgtatattcatggaaaatagaaatggtaggaaaactattaggggattaaacacattgtttttgcatttaagttaatctgaactattataatagttattataaataactattttagttcaggttgaagcaataaagttgctttgcangtattttctgatttactgaatgattccatggtgaggacnattgggaacatcccataaactgactaatcatgaggaccgttacaagggtaaacacttcacaaggtgaccttg

SEQ ID NO: 109 - DNA, 452 bp, Rattus norvegicus
  Genbank Accession No. AA800678
aaaacatgattacaagaaaagaatacttcatttacgtgtaacactgtcttcatggacgtaccgtggtcacggagtagaaatacaacatgagtatacaggaaaggagaggagagaccggtgtttggccctggtggccccctcacagagacacagaaagcagcagacacctctgtgcattcaatgggacagtggacacttgtgtttggagcagccagagagtcagggaggatgggcaaagccacctctgggaccctaatttcgtgtggtaaccccaaagagatactggtctgcactggtggaggctggctcctgtcaggttcttcgcagccttcagggacaagctgaggctcctgagtgcccagtggtttgtcgcatagcttgctgggcccatgggctccatggtgtgaagagaaaaaaggccaaagtgggcgactggctgatctctaggtgac

SEQ ID NO: 110 - DNA, 535 bp, Rattus norvegicus
  Genbank Accession No. AA800712
caaaagttgaatagttaaaatgtgaacatttccccccaaaacgaaccatcccccaccacgcggactaccactattcaactacttctcccatgctcaccacacactctgcaaacacagggatcaggacctcaactgctcatgaacacagagagcacagagccacgcacaggcacctctatctccttcgcattagcaggttctgaatggaggattaaggagcgaacatcaatcacccttaacccagagttaagacttccctaacattcctttttcttcatctaagacatgaaaactcaaagcagttttgcttacaattttaagtcttatattctgttctctgaatggctgagctgggaccaaactgaccttcacaatctcaggactagcagagagccgatcccagttgtagcttggccaatgacactgcaagttaccacacaggtgcaaataatgctttaacagttaccgacacttaaaaccaaactctagtaatgcattaatatggaacctccacatttttctgacacagcaaaag

SEQ ID NO: 111 - DNA, 552 bp, Rattus norvegicus
  Genbank Accession No. AA800735
caatgtaaactgatcaatgagttgtgattactctgaaattttatttttgggatcctgtgtcacaaaatgacgtgtgtaatgtttacaatgggtatgagaaattgagatgtttttatctctactgagaataaaactgtagataaggttccaagccggcatcaaaagagcagagcaaacttttctgtatataaactgtacataaaacaaggcactatacacttccgggggggacattaaggtagaaaggttgattcagatagattcttcagagtcacaccgggaagtagtacaaagtctttgctcgctttagcaccggaagcagaactcggcacaagccagacctaaggctgaggaggcagtcctgagcctgggagagactggtggcaggcctaggtcaacagaagtgacacagccctacacttggtaatgtccttttgacaccaaagggaacagttgcaagtgaatgaatacatagcttgttaaatacatagttgctttatatggtgtttatataaatatatatatatatttagaattcacaaactatcaaaa

SEQ ID NO: 112 - DNA, 610 bp, Rattus norvegicus
  Genbank Accession No. AA800739
tattagaggaaatatctaatggctgtcttatacaaatatcagtttcccaggggcagaacaagatttatctgtgttcgaagttccaggatagatagcaagaggcactgtgctcaaaagtatttgtagtatgaaagggccatcataaatacaaaactgttatcttcggtttctactcacagttgacttaacaattctccgtcccgatgaaaggaaaacagtgtatgaagaatccccaagtagattccaaccgaagccacctggtatttttggagctggtgctcaatgcctcagcttatgcagcacactcagggtatggcagaggcagttaagaaaatgagtcaaatttagcatctcagtactacagtgcgctttgcagaccttcggactatttttcctagccaaagtacaggggaattcagacaagagccaccgctgcagaccactatcccattagtgcaaactctggttcagatactgaagaaacatgttggccaattgaggcaggttctcattgttgggatgcattttagtgtaggaaataaactggcgacggaggcgactcaattctgccaaggtcaagggacgggtaaatcggaggtgctccgtggtg

SEQ ID NO: 113 - DNA, 600 bp, Rattus norvegicus
  Genbank Accession No. AA800772
aacctgtggctattaaaaataaaggcattttacattgatatttattgtggcattgtttacaaacaagttatgtaatcagtgtagacatccaccaagtggataaacaaaatgtatatattcacaaaccagttttattcagtcataaaaagtgaaattacttcatttgcagtcaaaggatggaactgaagaagatcttgttaatccactataggatcaggtagatactgcatggggatccaaattgaaacaaaacaaacaaacaaaaaacatcaaagtagaaggcaaattacttgagaacgggcattgggtgatttcctctctgaaagtgtgtctgctgtctttgaggatatgtgaagccttaattcaggtttgtttattggtaatgcagtagataggggagcccaggcctctcagcacaccagggggaaagctggggcctttttggttattttcactttcagctgaacctttgttacttcttgataacaaaatattcctatgtggcctaccaacaggcaatggatgctacaacacaacctggcttaagacttgtctccttttttaaaaggataatgaaaacaaagacaggatgttaatcac

SEQ ID NO: 114 - DNA, 528 bp, Rattus norvegicus
  Genbank Accession No. AA800790
acacaacaagaggttagcaactacacaggctgccactttaagtgaccagagccaaacaaaacacaattctttcacatggctttattacaattgcatgttagacacgacacacccacgttttgatgaaaacagtgttcctttggccgttgcacatgatcaatactgagcaatgtttgaacacagaccaacaatagcggtagaaaatttagggagaaaacagactgaattcactcataagtcttttgacctctaacatccctgggaacactatttttttgcattgctatgttaggcagtgtaaatgttagaaactatgctttaaatacgatggtaccttctcttatcttggcttcaattatgcaaagaaagtgtgcatgtttcttaccacgcctgctctgtatgctaaaattttgaataaaaaaaagccactgaatatagttttattgcatatattgcatggatagtgttcttatgccatttcatgatttggcaggatgattattacccatgagtctaacatgatgagag

SEQ ID NO: 115 - DNA, 359 bp, Rattus norvegicus
  Genbank Accession No. AA800797
acacccagaacataattatcatatattaatagcaatataacagaataaaggcttgtggggacagccagtctttcagacatggatggaaggttggcgttcattgttggtgaggttggttgaaggctgtgccttcagcttctggttaaactgcagtgagtaagcccagggttagttgctgagaatcatgttgcaagcagaaccatcgcacatgctgaaactggcccacgaggttgtgtggaggctcctccttaatacgatctgtggaaatgagcccggtggcttcggaaagaacgctgccagtaacgaaggctccaggaaggcttcggtctcaggagctctgccatgctgaccctcgtgcc

SEQ ID NO: 116 - DNA, 541 bp, Rattus norvegicus
  Genbank Accession No. AA800803
gacattttagactgacttcgtttattgagcaccagtggagagcaggctgtagtacactagagcagagatgaaccggccctcccatctaggggcgtacagtcggggagaacccaacagcttacagattcctctaccgggggttaggatgagacaggaaggtgatctttacagcacctaactcagtcacctggggcagctggggcctgacctggggcagctgggggtaaggtactgcagggcaggggacatctaggggaaggcacagaggtaagatagcatggggcccggggaatgccaagagctcagggctcagaggcagagtgggggaggtagtggctaagatgtgaggaaaagctccattagaagctgggtttctccaaagggctctgcctcggcctagccacagcatgcccaaagaggagagtctctgcacccaggagatagctgtttgaaggagaaggcctttagtctggaaggatttgctgtggtccactagtatgtttgtggccgtgctggggcagatgctctgagaaggttcaag

SEQ ID NO: 117 - DNA, 497 bp, Rattus norvegicus
  Genbank Accession No. AA800814
cttgtagagtcttttatttgtttgtttgaaacagggtctcaaccactgtaacccctggatggcctggaactcactatttagaccaagttgaccgctaacatagaaataggcctccgagtactgggattaaagcggtgaagcacaatgttcagctcggaagtttgctaggggaatggggagcatgaatggaatggatgtcgaggcacctaaaatacattttttttctagacagtaacaagaatttggacgcaatagtgagatactggaaatcgggcttcttgtacattgaagcaaggggcttgaagagttgtggccgagggacacgttttccctatcagagaccgtgttctttcctcaaactgcctctagatggtggtgctgttctggatgcagtccagtggataaggcttggcacagtgcacaagacccctttaacacacacaacaaaagaatttggggccatgtgggagatagacacagaatagtctacttcttta

SEQ ID NO: 118 - DNA, 335 bp, Rattus norvegicus
  Genbank Accession No. AA800849
  misc_feature (1)..(335): n = a or c or g or t
caagtgagatgctcgaagtttattgcaaagaggaaggcggggttggtgtagggaggtcaaggaggcagagggcaagggagtggagtngtttttgggcgaagtatgcgagggttggcgttgagagcgttgcaggtagggagggtgggtttggattgattggtggggggtgtattgggtgcttaataggtttacggtttgggggttcgtttttaggtttaatagtatttttaatttatttgggtgggatgttggttgtatttgggtatacaactgctatggctactgaggagtacccggagacttgagggtctaattggtttaattttagttttttt

SEQ ID NO: 119 - DNA, 470 bp, Rattus norvegicus
  Genbank Accession No. AA800850
ggatgttaaagtagttacagcaatatacaaaaacaaacaacaacataggacaacccacgggaagagaggggtgagacacacacaatgggactgtacaaatttaggtcaaaataaaggtatatgtattttgtggggtcataaaacatttactaggtcggtagagaaagcagaagtaacagcaatatatgtaaaagtaatgatttaatggctatgagcaagacaaagcaatagaattgtgcttcttttgcagactgtagaccatgaaatgcttagctacagggtccatacaaacatgaaacgattcatatggaagaaacgtcctcacagataactggtggctgataaacacacgctaagttcgaccaaagcaaactgagacttggtagggtcattcatattttaaactcaacatgtttgctctatttaaaaatacctgtagaaactcatagtaaattgcttctagttccaga

SEQ ID NO: 120 - DNA, 358 bp, Rattus norvegicus
  Genbank Accession No. AA800855
ccataaacacctagttacaagttgcacaaatcatttatttttataaaggcagagaagggaatagatctacgaggaaaagtaggggtgtatggcaccagggagggattgtgtcgtggtagaggtggctaggcaggggcaaggtagagagagggggatgacaaatggggggaaggggggtggtgcttagaggggacgtgttggttggccgcggggcgtgagccagggctgtgggtgtggggttgggggggtcgtagggagcagccccaccggctctgcctctggtgagcttgggcaggcttcggtacttacagagactgtgagcccagagcgtttctgtcatttcaccctgtgccccgag

SEQ ID NO: 121 - DNA, 423 bp, Rattus norvegicus
  Genbank Accession No. AA800912
aaaaaggccttggcggcaggaatatagtgtaaaaatcattggaaaaactaaaaggcatcgatacatatccgaatatactttgtacataaattacattttcctttagtcttttgagttgaggtcctgattcggctctgaggtctaataatcaagggggcctggaagctgcacgtttagtccggaatagtccaccatgtacactggccactgctagagagagggggaggggggatagagggaccacgttaggactccaggtgacacggaggaactcccagaataatcagcgcgcttgctttgagggtgagctcaaacgttaacttagtacgcagacactgaggcctggagagggaaagagatctgtccgaggtcatgcaggtagaacgtggtgattgtccccacctgtgttccaggggctcaatc

SEQ ID NO: 122 - DNA, 495 bp, Rattus norvegicus
  Genbank Accession No. AA800962
catagagtcacctttattggagcttgacctgttgggtttgtaaccctcaggctccacaggtagctggggcagggatagagtatcaaaaagggatgagttgagctgctgtggctgtggggattggctggaagctgctggcaggttggagcagctggagccctggcagggtaaaactgaggtatggcagcgttaataatactcttggagcgttaatactctggaggggacaggcacttggggccctaaggtgcgaaggcacttggagtcagggagaggacacggcttgcaatgggactgggcaggaccaggcccggggtttggcaggcactttggggagtgctggggttggcagcttgggccctgagcagcccagaaggctttggtagtggcaggcacagtctctgggctgggtctgcattaaatacaggggtttcctcagtgctcgtctcgaagctctgaaggcaagaacttgtactgctgctgccggatctgggc

SEQ ID NO: 123 - DNA, 560 bp, Rattus norvegicus
  Genbank Accession No. AA801076
cattgagaaagcatagctattgtgaaataataattcgccagaaattacatctaacatctagcgctgccaaatagtgtcactgtactattttatatcattcgaaatggaattcaattctgtaactaacaactgtcctactaggtgagagagaaagattatgtgagaaaatcagaataccatgtgatttgtagatttgggacgttcagaaacattgggaactaaatttagaatgggccaaagcctggaagatgggtctcacaccagaagacattccaggagctagccattttaggagatgtccctccaaagtgtcgcgatgatggccttgcacttgggaatcaggttctgctcacttggacatccctgcgtcatggactcttgctgcccccgttccatgtgctcgcaattccagctactggaagccaccaggaatgctttctaattatcatttgcaactagaactgtaatcagaaagaaaatttgtatttttgtataactcgattgtgtgccattttatataacaggtcctgttttacaaataaattttgttttactaactt

SEQ ID NO: 124 - DNA, 533 bp, Rattus norvegicus
  Genbank Accession No. AA801165
ccgtctgtttgcgctctcgtgatgtccggccgtggcaagcaaggaggcaaggcccgcgccaaggccaagtcgcggtcgtcccgcgccgggctgcagttcccagtgggtcgcgtgcaccggctgctgcgcaagggcaactacgcggagcgcgtgggcgccggcgcgccggtatacatggcggcggtgctggagtacctgaccgccgagatcctggagctggcgggcaacgcggcccgcgacaacaagaagacccgcatcatcccgcgccacctgcagctggccatccgcaacgacgaagaactcaacaagctgctgggcaaagtgacgatcgcgcagggcggcgtcctgcccaacatccaggccgtgctgctgcccaagaagacggagagccaccataaggcgaagggcaagtgaggcggctgctggcaccggcccgcgtctctacgaacccttccccccccccagagaactctcaaaaaacggctcttttcagagccacccacagaatcagataaagagttgtgtcacggtaa

SEQ ID NO: 125 - DNA, 492 bp, Rattus norvegicus
  Genbank Accession No. AA801212
aaacgatagtacaaaattgtatatataatatagatctatataggtatacatacagagatgctcatccacacacatatacacggaagcttgtgcatcagaatcaaactgtttatcctaaataaaaaagaaacttttgttttcctgaaagtttactatacataaggctgccggacaacttgaaaaccaaggcaacactgagaagaaccccggggcaccctcctctccatggccttggcagagcacacactgggccaggccagcgagcacagttgctactgtaacagttgacatagcgagacgccagaaactacgtgggaacagaggggtaacctagttagttctcagaaacaaatcacctcagaacaaagtatgtggttgggaaggaggagagaaaggaaaggtgagtcccacagattagagatgaccgactaattaggttccagtgcctggcaaaaccttccaaagacaagagccgtgggacagcagaaacag

SEQ ID NO: 126 - DNA, 485 bp, Rattus norvegicus
  Genbank Accession No. AA801346
gctgtgttgtctcctgagcaattcgcaaatgtgccttataaagccacactgggccactgggagcagtggaggcatggcctccccttccgtgcaccagcagcctaccctcctcagatacccctgggtttggcctgtagctaccacagccagttcctggactgtacgtgtctgccagacggaaggagaagagaaagtggtacgatgccttcctgacctcacccggccctcctcgcgggacgcaggcactccaggtggactcgagggccatcgctggctccacctctaaggtcaaactggacgtcagacgtcggggcctgggtgccagagggacccagaaaactgaggtccccgtctcagctgttaaacaggctgtcctggaggccctgcctggatctgggggtgctggagcagcatttcccccagggccacccacccttttttgtaaatcttgattgtaaatccaatacagttgtctttttcactca

SEQ ID NO: 127 - DNA, 176 bp, Rattus norvegicus
  Genbank Accession No. AA817692
tttttttatttttttttcggacatcctatctttattcactttgctcataggttcatgtatccttagcccattctcgggatggtgttcccaccatctgccttgggtttccagtgacagggagaatcttccttatcacaggggaacccctaagagctcaggcacacagtgaggacaca

SEQ ID NO: 128 - DNA, 429 bp, Rattus norvegicus
  Genbank Accession No. AA817695
ttttttttttttttattagtatggattttatttcttaagtaatttttacattgtttaataaatgaacaaacattaaccctaaaattgtagctgagttctcattgctatggaagagtcaacactgagtttacaggaatgcttataaatttcattcaaatacagaaaatatttcagcatcaggataaatgactatgcatattcaggtgatttattaatctagtacaacttccattcttccacatctgtagctttggtgtacttgctttcgaccagagctggtcaagcctgctttggaaaaatcactgaaaaatcttcaactggattatgccgatctttacattatgcattacccagtgccaatgaaggtaggtgattgcaattgtcaaatgtacacatcttttcagaaggacaggaatatcatctttatga

SEQ ID NO: 129 - DNA, 472 bp, Rattus norvegicus
  Genbank Accession No. AA817715
tttttttttttttttttactttaatgtctattaaataagttggcaggagaaacagaccaagttgtggaggtcagaattctgcaaaaagcccgatcccacctgtctgcactccagtgtggtcctaccaggactagggagtgttctccccaaaaccaggactacaaaaaagatggtcagttccttccaggttaggctggtcagaggagagacacaccaggcaccaggctccttccccacggccttctttctacagtgcaagcactcccttctctcttcattctgttcagcaaaggcccttccttgccttcttttgccttcagctctggatgactcttcatgcgcacagcagctggcctagaaggccaaccaggcagcagccattgttcagtggagagtgcagccttcatcagactgggggacaggcccttgaagaagccccgggtgccttcatgttgtagcacctgctgggcga

SEQ ID NO: 130 - DNA, 522 bp, Rattus norvegicus
  Genbank Accession No. AA817726
ttttttttcttttttttgaaacacaaagtcccatttagtgtttttttctgatgcacaaaggagttcactcaatacattaacaataagcaaatcatacagatactgaggggaaggatgtccccttgactacatacacatatatgtatctattcttaagaacagcaatcaagaggttaacaataatggaaggaagaagtagacaggtaagtcactgccaaataacacaagttcataatgatcggttactcaagtaacctggcaaatgcctgctcagaatttacatttactttcctcattgactttcttgcctttgtgtttcagtgaatttggactaggtccaaaaactagaccttcaaaactccatctctcacattcagtgctgaagatgggcatgaaggtggagtatacttgagaacatgcatggtaacgaatgtcaaagagttttctcacagtgacctttcccctgtctgcttcttcccacacctttagaaatattttcatgcttcctctggagacattaga

SEQ ID NO: 131 - DNA, 396 bp, Rattus norvegicus
  Genbank Accession No. AA817729
tttttttttttttttttaaaatataaaggtaagtttattccagctctcaagaaagttcatcaaccacacaggagggggtcagtaaagtcagagggagaaaaaaggagggagaagagaaagagagagccagagagagaacagagaaagccaagatgtctggattatatagggaagagcctctctgtgagaggagggttgggtgggctgggagaccctggaggctacgtttgtcttagtacattaaatacacttgccctggctctgaatcccaacgtcagcctccagaaagtctgaaaggagcgggacaaatccttgcaaggtctgatttccagagagtgttacagaattacttggcaccagaatctgttttctgagctctaaacccccctcgtgccg

SEQ ID NO: 132 - DNA, 617 bp, Rattus norvegicus
  Genbank Accession No. AA817753
tttttttttttttttgtcggtcagtcagatgaaggttatttattggtgtgactttttccgtagtgagcttcctttacacagcatagtgtaagtagcatcagactgaatgggggctgttaatgcagtcataaataattataataaatatacatcaagtaactttacagcacacattgttcagggccaagactgggatctgtctggacctcagtgcgctctctaggagcagcagctgagttagcagcagatatctcactcacagctgtcatctaatcaaggaatgggccaacagaagcttccagaaccctcctggggaggtagctgacagaatcccaagtccattcgtgggacaaggatagaagggaaccaaggatctgaaggtacaggaatgaaaactcactttaaaattcagaggctcctgccttctgtcgaacagagtcaggatccttgaggtcgctggggtggtcccacacagcggccacgatcttctgtgagagcagggcttgcagccctgtgactggcgtggccagcacactgagctggggcatatcacttccccgggtggggttgggtggggtgttttctgtcatggtcctcaatgcctttcctaagtgtaa

SEQ ID NO: 133 - DNA, 584 bp, Rattus norvegicus
  Genbank Accession No. AA817825
  misc_feature (1)..(584): n = a or c or g or t
ttttttttttttttgctaatgctctgaaaacactttattacacaaattacattcagattctgaaaaatagtgttctaacagtgtaaccatctaaaaataagacatcccggaaacacaccaactgaggagaaatttaaaaaaagaatttaaatagagactttttaaaatttctctcattgcaatataatgttagtgattttaaaaaaatagaaggagatttagcagcttttcgtcgtgtggcaggttggttctcttcactgccacaggctgagaatgctgaacaggaaaggcaccaaagaaagacactggcgatgggtgtggactgggagaatactgtgttcaagcagagaatagggctatttacatccaccaactaaaacgtctccaaatgtgaatgagctaaacttccctcgggggttggagcgctaccttggaagaggagggcggcttctctacgctaagttcatataaagacaatggcactggagtgaactggtggggaactcctcacctagaaaacagaagccaacggagccaaatgaagtaaataaggtgtgtacagtcncacactgacgagtacagtt

SEQ ID NO: 134 - DNA, 605 bp, Rattus norvegicus
  Genbank Accession No. AA817829
tttttttttttttttttacttttaaaaatactattttatttatactcatgtataaaaatggctatcctgtcatttttatatacatactgataatggaaacaattcagtgtcatgcatttcaaccgtacaaagaacataatcatggaagcacggttacaggggaagcagaagagtctgagtagtgatttcattctcactgaggagcggcaccctgaagaatcgagtccattagtaacactcaccgcactgagagcagaggggcgttagcgattgtacttgattatttttactgagccatttcatcttcctcacagtgagaagaaatacaatataaccttaataagaaaacgacctcattacaatctcggtaaaggtctacggcttatggagtggagcagagttcaggtgtgcttgcgggctccggcctcaccgtaccatcccacctgatgtgctggacagaggccgctctctcatgcgcccgcactaactccatgggagctgcaatagaatgaaccatttctgtggcgttcccaggtctcactgaggaagaaaagacttcatacacataaatataacaattgatctgtctataaattatagtggta

SEQ ID NO: 135 - DNA, 612 bp, Rattus norvegicus
  Genbank Accession No. AA817841
  misc_feature (1)..(612): n = a or c or g or t
tttttttttttttttttggttttctgctcacatttattggggctaaagagactaaaacagttaattttcttcccaaagaattgggaaacgaaaacatataatacaacagtaatttaagtaagcacatgaccaaaacttcctggatcacgaaccaacaggagatgtgaatagcctgtagatatcaattccaacagctttacaaaatgtcattcatctaaggcatttctgtggttctcacggccacatgttcacatacataaaggcctctattcatggacagagagatacgttctttaggagcagtgggtgcaggaggcgaaagcagttacacgcttagttactgagtaattttaaagaggaaatttggcgttccaagaaacagttttgtacatccaaaaaaaaaaatcaatgataattttccacttggattattttgtgatgcagactacaagaaaatccatgctggattatttgctttccaaaggccactttcaaagtacagatttcgagtccagaacaaatacccacagcgagaacaaacagaacggctaagactctaacatttgcctccatgtggctttcctcctcnctcgattctctgacattttctga

SEQ ID NO: 136 - DNA, 635 bp, Rattus norvegicus
  Genbank Accession No. AA817843
tttttttttttttttttgaactctacccttatattttattaaaagggtaataaacattatgaattaacccagctgcttacttgaattacaaaataacatgattcaatatgaaaataagaaactgtctacaaatctctgacagtaataaatcgcaatatacaatgcatacaggcgtcacagagcaacacactctcgtacaaaacaaaaatatttttaatacctttaaaatccaatttttttcttttaaaatcattcatgaaaaagattctcaagtcagaattaacacctcaattagtcaggcatcaggaagctacgttacagctacttattatacaaggaggcggcctcactctcacttcctcccaatgcctctgctccagactccgtcagactctcgctcgcgctctccacacagcccggctccatccttccttcatatcatgaaaactgaatctgctggacaccagaaatctgttgataggacgtcgtgtaaaccataacgttttgttgttggccatctgcagttattaacccagccggtaactggttagtgaatgcctcttccgtgagctcctcgctgagtccatctgtatcagacacggccccaccaatgcccttctctcacttcatggcct

SEQ ID NO: 137 - DNA, 619 bp, Rattus norvegicus
  Genbank Accession No. AA817844
tttttttttttttttttgccactaataaaatgagtttactttattgtaaaagtttcccaatacacacatgcagagccacccacatatggggctttaacagagatcttataaaattatttccgcttaaagtattaaagtatacagagataaaaatattagaaaagaaaaaatgttaagtcaaggttaatgctcaaaaagggtcaatacccaatatttaaaaagggtcaatctgcagaattattgctaaaagactaagcttagaagtacttagggaaaaagatactatcttttcagaaaactttaaaatctcagggtatgtgtcttaagaaatactacaaaccacaaagcaatgaccctctgaacatttacctgtttcacaagtaaatcaacctaaaaggaagaggtcagaggaaacagcctatgaatcagaactcagatttctgtatttagatctcttcagatctccttagtttttccaatggcaatcaacagtccaataaaaaacttacagttaatataagacagtattagagtaataccacaaaggttcaggcatttctccaaagtatagacaagaaggaagatacatgtagccaatgtctgacataatttgagaata

SEQ ID NO: 138 - DNA, 622 bp, Rattus norvegicus
  Genbank Accession No. AA817849
tttttttttttttttttacaaagatttttatttggttcacagacgaagccattcacttggtctgcttaaaaaagtagagacacaatgatttacatcttaaaatagtttccttgctccagttctacttaaagatagcacaggagcagatccgctctgcttgtcttgctggtttatagggtgcaactcatcctcctgggttctggctgctgggtacagggctgagagtggggttaggtttggaaaaaacatggctgtgggtagcacgagttggcttttgttgtgtttctttgcataggtgttaggagccgagagcagctagggtgaggatccagaacacaggcttgacagtccccatcctgtttgcctgccactggcctggggcatcttgcttatctttgaggaagtcctaggaaatagtttctgtaatgcatcctgatttgaaatcagtgaaagtgttttggcagtgggaaaataacaatcccacttcagagatctcacaaacggaaaatttgcctcgcaaaaactcctttaaacgctaactgagacaaatgattccgtgggcaaggagactgtcagccagagctctgtaaaatgcattctgctagttaacagttctttcctt

SEQ ID NO: 139 - DNA, 574 bp, Rattus norvegicus
  Genbank Accession No. AA817887
tttttttttttttttttagtagaatctttttttattcagaaaaaaaaaaaaagaacaaaacaaaaaaaaagtaaaacaaaaatgaaacccaaaaacaattttttcccaaacacacacaggagggggtatgggtaaggggaggtatctgtccatccagccccagcccccagcccatgtggttttggcagcaataagggaaatggggtaatggcccaaaaaataatggtgtgtgtgtgtatggaaagaagggggtgcaaaagccaaagggagcggtgggggaagggacagatgaggtcagtactgggaacgccgcaggtgagaggccatttcataacatttcttgttgatcaaaccaccgtggacaccttctttgcccatcagcaggactagcgtcttggcagtcatggtgacagtgacattgaacgtgggggctcccccggtgctcttggtacgaagatccattgtaaattccccgtcttgcagcagtgagtcacggatcacagaacatttctggcccccaagtgtcagcccattcacgaaaaaacttgaccggtctttgcctaccaggacacca

SEQ ID NO: 140 - DNA, 386 bp, Rattus norvegicus
  Genbank Accession No. AA817925
tttttttttttgcaattttgagatgtttaataagagtttgagcagctgcatccattcatgccctcttctgtgaggtagtgacagccccttttcagaaaccgtggtcactgccttgctgcaggcacggcagtcctcagaacgggcactgagacagcacctcatgcgtgtcaggtctttaattttttccctgccagagctttttctttctttgcttcgttgttactgtgttttttctgtttaacaattcaattggcagaaaaatggctatcgctggtggacattagggttgcagtgaaaaaaaaatccccctcccccaattcttgcttgccaccgtgggagacgaggtgagggttcctagaggtttcccaacccacctcagagcttcc

SEQ ID NO: 141 - DNA, 415 bp, Rattus norvegicus
  Genbank Accession No. AA817951
tttttttttttttttttccaagttgtttccctgagggaaatctttttatttgcttttagtaaaatatgtggtctcttaagagtggaaagcagaacagcagaagggaggaaaggtttctgttactgacggagaacaaaggagcggcctgccggccgctgtcagccggcagggtcaccttctctgttcctgtgacctttctccctgcctttctctcccatcctaaaggagcggcccgacgacttgtcatagccatccacagccccaactggaactgcattcaggctgatgatggggcctggccctcaggaaacgtttcctttcttgaggagaactggggagaggcagaaggaaggggcaggggcgctctgtgggagcacggagagaggcggccatctctcactgactcctcgtgccg

SEQ ID NO: 142 - DNA, 469 bp, Rattus norvegicus
  Genbank Accession No. AA817954
  misc_feature (1)..(469): n = a or c or g or t
tttttttttttttttttgcttttccattctttcaataatcgtttattgagtatcacatgtcaggtagtgagccgggctctggggccataatcgacaatacagggctcagttcacatggaaatcacaccagtgggagggacggagggatggagggatttatgcatcattaagtgtgaggtgactgggtcaattccaaacaagttcatacaaagatccagaaaagtattaaaatgccagttcatcaaatcacagatgaaaaatgggtcaggtggtcagcacccctctagaaaattcagcataacaatgttaattatgataacacagttcactggggagcagaaaaccagaactgggcaattcagttcgccatttactcttgcatcctgnggcctgctgtgagagacgacttatggtggttggcactggagaaagccgaagataaaccgttgaagtgtttctagaaagctca

SEQ ID NO: 143 - DNA, 617 bp, Rattus norvegicus
  Genbank Accession No. AA817968
tttttttttttttttttaataaaaaacaatcagtcttcttggctgaagattggtaagtgtgttttcaacctcagcagttctgaaactgactcctgtcggtcctggtagaagctgagacccgtgatgagctcaacgtctgtgacccgagctctgtgcaatgccagcaactcttcaacccatgcagactcctgctttccatgtgtacagctctcgatgttatcaggcctgtgaggcaagaggaaggctgaagactctaaggctgtacactttaaggggctctcagacagctgcttgcagctggtaagcacaatgaagaagtgagtgggaatcagattttcttgactgcggatgactctggtgttttgtttcaggatctctgaggaatcataccgtccatcataatcaaagtcgaacacggggccgctgacaacattgacgccattcctttcttgggcataccttcgcagtacggtgtcatgaaggtattgccatataacttgaaaactctggtacattggcactatgttagaagtaagcaaggcttcagaatatatttgacgtgagactctgtttagtcttggcggtgtaaggaacccataactgagcttagaagtgct

SEQ ID NO: 144 - DNA, 390 bp, Rattus norvegicus
  Genbank Accession No. AA817987
tttttttttttttttttcacaataccagatcaggatttattcgatgaccacattcagttattcagacatagaacaacagattgcataaatatcaatgttcataaaatatttatcacttttgaaattttaatcccatgggaacatccctggagggagaccggacattttctcctgaaacactttatcaaaggcttcagcttgggatacagtgaagtgattcttccagtccccaacagtgcctttcctcatgaggccaataccagtagaaattgattttttcatcaggaggctataattggacatgtcattttctttcatgacttggcaggcactatacttgaggaccacatccagctcatcgggctctagttttttccccaggaagtcaca

SEQ ID NO: 145 - DNA, 581 bp, Rattus norvegicus
  Genbank Accession No. AA817997
  misc_feature (1)..(581): n = a or c or g or t
tttttttttttttttttcacctagagacaaatctttatttttaaactctcatctactaaattagcgtttcccaccaactctgggagcagagaccttcacaggcttcacaatcttttgtttaggggctgcctttgtgggagccttggcagcagccattgctgtcttctttgatgcctgcttagccttttttgcttccttggcagccctgatagcctgttctcgctgagctttcctaacttctggtttctgattcctcttggccattatatcagccagagaagcgcctgtgatggcccgctggaacttgactgcacggcgggttcttttcttttgaatttcttccgactgtcctttcttgtgttttcttctgtagaggacagtccagttaatttgccgagggttccttttggaaaggaatgcggactcacatttggcattaagaaactggaaaaccttcccatcggtcctggcgtancgccgcccgtgtcncgggtagatcttgtacccactanaactgcacagctcgaccttcatggtgacagatgtcggcctgccgggggaaagcctcgtgccgaattctt

SEQ ID NO: 146 - DNA, 612 bp, Rattus norvegicus
  Genbank Accession No. AA818020
tttttttttttttttttgagcttttaaaaatgtattttaatctcattccaaacagaaatttctagatacaaatacatctcattcaatcattgtttaacggacattctgtaacttaaaatattataaggattcaatattttcatcttttataacctcaatatattatatatttaatatataatatatatacaatacatacacttagcaggattacaaagtaattctcaaatttgatcagtattgataaatatttttagattaaacataactatttagaatcaaagaaaaagtaaaatacaggaggcccaaaactaacagtgagactgctaatgttcgtttggccaatcatttcaaaagaactttcaagctgggtggcacacactttaaaacaatattcctgctactctcaagtaacagtgcttgtagacattaggcgatttatatctccattcaatttaaaatgactatgcaacttttcttactgtaatatacagtagctttctcttcctttctgttggattttttttgaagactaatacattaccaacagaagtaattgtagttcctttcccttccctcgagcatggctcagtttgaagattgttctacagg

SEQ ID NO: 147 - DNA, 504 bp, Rattus norvegicus
  Genbank Accession No. AA818025
tttttttttttttttttcctatagcatagtgtttattattccattatgtggaagacagtcaagataaactgctttttcaagatcgaaaaaatgttggccattacagttttctagtaaaagctagcaaagcccaggcaatattcagagatgtgggataattcaggttggagccgcccgtccacacttctacaagaacagacgttttgtgtgtttcctttcttttttgttttgttgttattgttgttttgaggtttttcttttctatgtatgtatgtatgtatgtatgtatgtatgtatgtatgtatgtatagacaggctttctctgtatagccttggctgtccgggaactggctggctttgacctcacggagatgcacctgcttctactcccaagtgctggtattaaaggcatgcaccaccactcgccattttgtttttcatttgaggcaaggtcttactatatagttttaggtgacttggagaccactgtgaaggtcaggctgg

SEQ ID NO: 148 - DNA, 532 bp, Rattus norvegicus
  Genbank Accession No. AA818026
tttttttttttttttttacaaaaggttaagctctgtttatttggagtcacaaggagctgattgagtcactgtgactcaagaccacaaagaaaccctttgcctccacttcagtctcaagcctgtggtgaaaacctcgaccagcacaagtgctcttggggcccattcacaggtttacaagtttctcgttgagggcaatctgtgactgggtgagattggccaggtaggtcaccatcagcaggtcgttgatgttgctgttgagcatggtttcaaagtcatcaggaactatcttgggtacttggttgacaaggctcatcaagaagcggcctactgtgttgtcagcagacactttcccagacagcacatcctcagcatactgcaatacagtgcttagagcatcctggatccgggctgaggcccctcccacttgctgtaagtcactcgagagtccaatcacccggttggggctaaaacatgtcttcatgatgaggtcaactccaatgcgctcagtgtcataatacgcatacttcactgt

SEQ ID NO: 149 - DNA, 565 bp, Rattus norvegicus
  Genbank Accession No. AA818039
tttttttttttttttttacaacttgatgtttattcttttggaatgctaggttcagcattacaggatggttgtcaaggctacccgagtgtgacagacagacttcacatctgggtgctgcggagctccgagttattaaacaaaccttgctcttgtacaactgaggtctgatggttttaagttgatgcctgggtgcagggccagacacaaccttagggatgtttcttacctgtacatacatatatacaaatatattccacaaatgtgtgtatacatgggcatgtattaatttacgtggggaatttataaaattatatatacatacacatacatgcatatctatatacagctccccaccctcaccagtgagctgctgaagtagctcgttagctccgtgctcgattattgctgtctggtataactacatgatttagtgccaaagccagacacattctctggtgtgggatggtcactgtcatatagacacgtgtatccttgtatgccgtgtatgaagagcattgctcccatgtgtcaggcatgccctaccacagtaaactgcctttaccac

SEQ ID NO: 150 - DNA, 367 bp, Rattus norvegicus
  Genbank Accession No. AA818062
ttttttttttaatccaccatctgttttattaaacacttatatatccctacctgacctttcctaaaaaggactcatggtctccaccctctggctccaagactccaggtgcctaatctccactgttctacagggtgacaatagataatgttttcaaataacatggcaatgtggactggtacaccagaagtctgggccagagtcatgatgtcagttttgatcttcatcttgacctggtaattcctcttcctcctcctcctcatcttctttttttgttttgttctttttgttttatatggtggtggtggtggtgatttgagacaaggtttctctgtgattacagccttggctgtcctggaactcactttgt

SEQ ID NO: 151 - DNA, 366 bp, Rattus norvegicus
  Genbank Accession No. AA818065
tttttttttttttttttgaactcataaaagaggtttattgacattttgcttttttacatagaaagtctctaaaatatgaaaattaactgagtaaatgagaaactatacagtaacttggtcagatagacacaggttgagtagccaaactaaagacagcagtaatgtttaagtaataggattagatatttctagacaaaacaaaccaaatgaaacaaaagagatggctcagataaaaatgagagaatgcagataatgaaatgagattgattggaaaaatgtaagcacaaccagacaactgtgcagcttcaagaatggaggtgagcatcaagcacagaaaaagggaatttcaaagaccagcttgactgg

SEQ ID NO: 152 - DNA, 321 bp, Rattus norvegicus
  Genbank Accession No. AA818069
  misc_feature (1)..(321): n = a or c or g or t
cggacgcgacgccatctttatcctggatcttggacttcacgttctcgatggtgtcactgggctccacctccagggtgatggtcttgccggtcagggtcttcacgaagatctgcatgccgcccctcaggcggaggaccaggtgcagggttgactctttctggatgttgtagtcagagagggtgcggccatcttccagctgcttgccggcaaagatgagcctctgctggtcaggggggatgccctctttatcctggatcttggccttcacgttctcgatggtgtcactgggctccacctctanggtgatggtcttgccggtca

SEQ ID NO: 153 - DNA, 525 bp, Rattus norvegicus
  Genbank Accession No. AA818089
ttttttttttttttttgattgtaaatttgttcagaattccttcaactttaattgtgggggtaaaatcaagcagccactgaggaaaaatagtccctggaagcagtcgaaacgtttgtgtagtggacacgatgagttatttattagcacaggttgtcacaagtcgccagctgttctcattcttccactgtctccttcttgccagtctcttgcccttcaaagagggggtacctggcctccacatcagcccaagtgatgttgccattggccagatcacggaccacactgggcagttcagagacctctgcccttatctgtctcatggagtctcggtccctcagagttgcagtgtggggggtcttgttcactgtatcaaagtcaatggtgatgccaaacgccacgccaatctcatcagttcttgcatatcgccttccaatagacccagaggaatcgtcaactttatgagacacgccatttcgagtcagagcttccgataattccttgacaaatggcataaactcttggttt

SEQ ID NO: 154 - DNA, 175 bp, Rattus norvegicus
  Genbank Accession No. AA818090
tttttttttttttttttgctgtccatactttattagttgccgtatcgagaaaccaattcaactcttcaggacaagttgtgttctctacggggttggatttataggaacagcacacatgactcctgaatcatcatgtcatctgatcccagggtatcctgagatggatggtcagtct

SEQ ID NO: 155 - DNA, 482 bp, Rattus norvegicus
  Genbank Accession No. AA818105
tttttttttttttttttagggagacagaaacacaaaaatttaatacctatttaacagaaatcacaacaggacacagatacaacactacagtaaaatggggtgaggtgagaaaggcaggacacaagatggatcacgacaactaagggagtgacttctttggtgcccgaggcccttttacagctgacccatggctccaagtaatacggactgaggaagttcagcaagtggcagcatcaatgagtggacctggagcttattcagcataaatattcaaggatgtctagactcaagggtggagagggtcagcactgtaacaccaggagcagagttcctacggtacatctcctcctcctaacactaagaaggcaggtccctcataccttggtctttcaagacatagcagcaccacaccccactgccccaagcagcttcactctgctacaagcctctccctgcgaatgttttcagagtgattgaatcca

SEQ ID NO: 156 - DNA, 535 bp, Rattus norvegicus
  Genbank Accession No. AA818107
tttttttttttttttttaagagtagacatccttttattgttcaacccggacttcccagctcgagggacaggaagcagcaacggtggggctgaatacaggtgtctagacatgtcaggccgaggtgttctttgtagggtagaagccctacaaagggtttgtcagagctgggctgggacatagcagatactgggctggagttgagctgagtgctgttgttaaatgaaggtgaatatgagatatggtgaatgcaaagtgagaaccaggaagtgtggagtgagcccaggctagtagcctaaccaatcttagcagtcgactgactgagagagaaggactggtgtgactgattttaaaacaaagcaaaaggagctgggaatgacgggaggccttgtacaccagacctataatcccagatacctggaagctgagacaagagagtcgcaagttcaaggccagcttggacacgtgtcgagactctctctcaaggtaaaaataaaagaggattgcaatttacttcagagtttgactggcaccctgg

SEQ ID NO: 157 - DNA, 567 bp, Rattus norvegicus
  Genbank Accession No. AA818123
tttttttttttttttttacacattgaaagttccattttatttcaaaatgataaatagaccggcatagttctgactgtactatctcagaaaggcttgtgaagttctttaacagtttagagaggactccagtcagaccagaaggctgccaatcaaacttgtgattggcagagacagcagcctctttgatcttcagaggtttgtaaaagctttccaccctaatttctgagtatcataaaaagtaaaaagcacttttattctgtccttttcccctttaatttttcttttttaaaccagcaaaaggactacttatttttatgacttcatttttatgagcacaacagttctgtcaattacttagagaaggaagccctcagagatgtgtcagtggtgctgaggtccaccgaggcccacaccaacaggtgtggcattccatgctatcacttctacaaagaaccatgaagaatgcttgtagaccctatgtacagcatatagtccacacatgcttgatgtgcgtccataccacgatccagtaacagcaaagagaatcccctcttgaaataaaaaaaa

SEQ ID NO: 158 - DNA, 528 bp, Rattus norvegicus
  Genbank Accession No. AA818142
tttttttttttttttttccgaagccacggcccaactttatttacactcattgcaaagcatgactgagggtaaaggacaggtaccaggggatggggggctgggggtcatggagactgtgcgggtgcacggtagggttgcaggagaaaaggaaggcggtggtgaggatggacagcccctctttcagtgtcccccaggctcccaggcgtccgggggcagagagcaggtgaggctgccttcaggatttggacttggacacagccagtccaatgagtccagccaggcccgccacacccagggccatgccaccaacaatggccatgcctaccagtccatctggaaaagcaaagagggagacgtgagcggatcagcccctaccctgaccacactcccctccacagaagagggggacctgtatgtagagtctgagggttggggctccagggctaccaagacccttgaaaggtaggtttgataaaggactgtgtgtgtgtagggggtgtgggcagtgttcccaaggcccgggcctga

SEQ ID NO: 159 - DNA, 363 bp, Rattus norvegicus
  Genbank Accession No. AA818158
tttttttttttttttctgattaaaacaatacaacattctaagatgtcttttgtttattttattgtttatcttctaatagcccacagaagagactgaaaatagttgtgggctaatcttaaacatgaagtagagaataagcactaaacactaaaaaaaaaataaaataaaataaaacttttaccttacttattaaactaggaagaattttcctgaaacgcacctgttaaattagtctataatatattaatgaatggaggacatgtatttcctagtaaatattttaaacatgaagtatacgcttgggggaaaaaaaacttctcaggatatgaaatttttcaagtctcaatcccctgaacagactaa

SEQ ID NO: 160 - DNA, 357 bp, Rattus norvegicus
  Genbank Accession No. AA818163
tttttttttttttttttagttagccactagcttctttatttctatggactgcagaagcctcagactatcacaggtgtaggaggtgacattgctggatagataacaaggggcacaagttcaagtgagtgggaaacctaaatggtcacagcctacacatcacagcgtatacagaatgttgggcatattaaatgtagcagaacacttgggtttctggttgccttgctactaacctgactcttgattttgtgtatgtaagtttctatactcacttacttttctccataagagaagccatacatactgtcactggtaattgtaaagaattacagttccccttatcaaacaattacaatttta

SEQ ID NO: 161 - DNA, 564 bp, Rattus norvegicus
  Genbank Accession No. AA818192
tttttttttttttctttaaaaaaaccaaaacacagcaatcactttattcttaagtttgtactttacaaaacctcaaggaagaagtccttgagggagaggtgtggagatggtatgagggaaaggggacgaggaacaagcctgctcatctggggcatcaggcagatgctaggtccaggcaagcgcagtaaggccttgcacactggctgcacaaagctcggctgagtggcctgagagtgtttcagccctgagactgttgtcatttgataggcagcctctggtcaaggcttcagaggaagtagacttctgccaggccagggagatggccagcagcaggtaaggctacccgtctaggagcttcaggatgctctcccgctccttcagggtcttccaggcctggtccttttccttctttgtgggggtacgcttcttctgccgtgcagccatgatcttgcggaaggcatccatgacctcattgtctgccatgcggacccgctgtctcagctcctgccggctcacctcctcctttgccaacctgaaaggtttgttctgattgcggggggaggt

SEQ ID NO: 162 - DNA, 569 bp, Rattus norvegicus
  Genbank Accession No. AA818202
tttttttttttttttttgatttatgaaaaataaatttattacataacaccttgttttttaacaatgttcaattttttttattcagaatacttgtgtcattcatgtaaaatagtttgatacagtacgttgtatgttatagctttttattttcccctcaaaagttctaaggctctcccactccctctcctttctgaagtaagggcaccctaaaaatgtgcgaacaactttttaaaaagaaagttaactgaacaaaactgtaatagcactacactaggcagcttaaatcaggacagaagagtgcacactgatgccgtgcctcacggaggtcgccactcacgcttttgtaatcagaaagcatgctcacaaatcagcaacaccaacaagaaaaaggaaacactgtctgcgacaatcatttcagtttgcggaaccaacaggcttctatcaatgacaacatattaatcaaatagcagctttaggaccagtcaagtcataggttgaaaataaaaacagacctctaagttggaaattaatctttgggagttctgaaacctgtcagtagaaactatgtg

SEQ ID NO: 163 - DNA, 461 bp, Rattus norvegicus
  Genbank Accession No. AA818224
ttttttttttttttcttatacacatgcttttttattcatatagatttctgagacaatactgtaatcttgaaaggaggttcacactattacatcaacagtgaatttcagacagaggcaaactgagcaccataatttacaaatagaaagaccatgctggaggacaacagaagttcactaagggtgcacaatgtatccgagaagttcttaagcctcatcctcgccctcctcctcctcgaactcgccctgctcatcagccgtggcatcctggtactgctggtactcagacaccaggtcattcatgttgctctctgcctcggtgaactccatctcgtccatgccctcgcccgtgtaccagtgcaggaaagccttgcgcctgaacatggcagtgaactgctccgagatgcgcttgaacagctcctggatggcggtgctgttgccaatgaaggtggctgacatcttga

SEQ ID NO: 164 - DNA, 437 bp, Rattus norvegicus
  Genbank Accession No. AA818252
tttttttttttttttttaaattaaacagaaatccaactttattttttgttgtaactgcttgaggatgttttattaattaagtgaaggtttgttatcctttattaacgatgtattttgttggtcagtactgggctgacaaagggtttcttgctaataaatttagttgcccgaggcaaagtctgcgtttggcagttgggcttcctttgtctgttatgtcagaggtcttacagaaggagctgctgaggagggagcggtggactcaatttaccctcttggtcctggtcccaaaggagcccagctctcagagcacctctggggacttccagagcccagagactaatgcagtctctgctctcctgagctggccgactattgtacctcccgccccagccctgaggaaagcacttgcttcacagtcagaagccagagtcaagagc

SEQ ID NO: 165 - DNA, 548 bp, Rattus norvegicus
  Genbank Accession No. AA818287
tcatctcttcggttccctttaatcacgtttcaacatgagccaagaatgaagctttcacagtcggccatacattcacacaggcacacattgtcaattttctgcagtaagaacactgagagaaaatggcaggtaggaattttctgccttgcccttctttacttaagaacagaaaatactagaaagacccgtccacacctcaaatccactggctatgcatctcctcaacgattgcaggaatttcggtttagtttacagcaaatggcatttgccgcagtccttccttagactagtgcaggcacggaaagatcacagtggtgctggacagtcctgttccatccggacacacctgctggaggtcagatgctaacacaaagaggatttatctctgactcagatcacccactgtgtgggccagcatgtttgacccacccagagcccatcttacacggcctgggagtgacttcttggcagattctgttgactgtgcaactgaaacatgcgtagatgctatctattccttggagcgcttgcccagagtgaaatggaca

SEQ ID NO: 166 - DNA, 551 bp, Rattus norvegicus
  Genbank Accession No. AA818355
tttttttttttttttttaaatgttactgtttttattctgtaacttatcatcattcagtggattttcaacaatatttcttttccttgttgttctttttaaagacgattttaagaccatgacattttaagatcatccgaaattaaagacacattgtaagccagctccttggtctcctggtccgtagcaaatagcaaactatcaaaaacaaatacagtttaaaaatgtttaaggtaacaattgttcccccaagcctcagaagttacatattataaatgtgtgtcacctggcagagagggagtgagaaaggagggattgggacatcatgcatgttaaatgttttaaggaagtgtgcatctactgggctggggagacggcttagtcagcacaagtaggtataagggcctgaatttggcacagtcaaaaacggttggttcgatggactgtggttataaccccagagctggctcactagctatcaagcctagtctaagctcctgcaagccccaggccagtcaaagatcctgtttcagtggaaagatggatgacgcctt

SEQ ID NO: 167 - DNA, 539 bp, Rattus norvegicus
  Genbank Accession No. AA818394
tttttttttttttttttacagcctctaagtcatcatttattgatttctagagcacccatcacatgattaaggtgctttacaacaatacagtaaacatcacacacaaaaaaaaaagctcacatagttaaatacagtcaaattacagaacttaaaaaaaaaactggaatgaagcaacattatgtcaaacttcaaaaatattgagaagtggcagtacaaaaaagggtaattccaccaactagagaccagacaatgaaacacaggcaccaagacccgaaggaggaaggtttgtagagtatgaatgagcatataaataaaatttcacaactgggaccaaaggccattaaaagataatatgacacccaggtatcacaaaatagaaaaatcaaatgttcaagcattaccttctaatgacaagaagatcaactctgtgtgattttaaactctgaggtcaaaaagccatcaatattatctcattaaaaaaagactaaaatttgcaatcctctataagaacgttgaacattagttaacagccaacaatt

SEQ ID NO: 168 - DNA, 340 bp, Rattus norvegicus
  Genbank Accession No. AA818412
tttttttttttttttttctctgtgcacacagctttattggatatcgctggagcgtccccaagtggctctgattactggtgtgacaggaggaggtggtgaagaagaggaacaattcatttcgggcaatgccttcgccaagacaaatgcgctttcctgtggagaagggcatgaaagcttcactctttttcagtgccccattggcatccaggaagtgttcaggattgaagctgtctgggtggtcaaagtactgtgggtcatggagagctgaactcaggatggggtacacttcagtgttcttgggaagcaggtaccctcggaacatggtgtcttcctcgtgccg

SEQ ID NO: 169 - DNA, 564 bp, Rattus norvegicus
  Genbank Accession No. AA818421
tttttttttttttttttgaaaaaaatgtatcattttatttgcacacttagaaaagttgtacacagaaacttattgtttgtaaaacagaactgttaggatgacatttttatttttaaatcattaagactggttgagaaatagaacaaaaacatagtaaaatgtttaaaaaattaaagaacattttccaagtataaattttataaatacaaaacaaattcacaaatgactttgaatgctaaataaatatctagttaataaattcagttggtactggctacagcacatcagagctagcgaactggactcactcatgtgtagtgttgaaaccctatgacatggagctcagacacactctctatggtgtgttctagcaggctcaccgtggagacaagacctccttactactggaactcctaaggctcaatgacaaaatagagcatagatgaaaaatattttccaagacacctgaacacatgaatgatctcaaaatatacacaagcctctgtaacccagtactgtacccagtacgtctatgcaacttagtagacactgaacaaaagctgt

SEQ ID NO: 170 - DNA, 519 bp, Rattus norvegicus
  Genbank Accession No. AA818474
tttttttttttttttttacaaaaagaacgatttttattaaaaaccttgggggccaacattgaaggcatggttttgtacatgtttttggaagggcatataaagtgaatttgagatatattaaatggtttcaattaccagcattgaaacaaaattagtgcaaaaaaagccaaatacaattgtgcaggcaatggttttgggatcttagaggtgagcttgtttttgaccagtgggacaaatgagcctggggttgatgtctcttggttgtggtatcatccttttcttcatcaaaggacagactcataccaggatcacaaacacacactggtttcagcaaattgatagtcacagtgtaaacagggccaagcaaccaaaacctaagaacctaaagacgagcaagataaagacaattagagtctactcatggagttttggcagttttcctaaatctaagtgtttagaattcacaatagagaagagctgtttcaagatgtcaaagaatgaagtcaaaaaataaaattc

SEQ ID NO: 171 - DNA, 555 bp, Rattus norvegicus
  Genbank Accession No. AA818512
tttttttttttttttttacagttaagcaaagaacttccagttttttatttttaaaaattatttaacaagaaaaacagtcaatcaagtcttaaaaaattagaatggattaatttacaataaaacagtcaacttaaaatatgagccccttcaggaggaccatggaggccaatagttctcctttaaacagcaggattgcacagttgacgttctgacctagatttaacagcacagaaatacaaaagccaaacaacttccaaccaccttcccttctcttcagagtttaaacacttgcttagagaaatactcatatttttagaaaaccagttgtatttttaagaatatctacaactaatctcatcgagaacactcttaaaacaattcttataaaacacaaataccttaaaataactttgtggcacatgagatagcttaaagaaatagcacaataaaactaatgttcaagaatgatcatcgctttctcttctaaatagaagccacccaggcaaaacgtttcccattctacctctgtgtcccacaatcagcagagctaattct

SEQ ID NO: 172 - DNA, 507 bp, Rattus norvegicus
  Genbank Accession No. AA818521
tttttttttttttttttacattgtaatctatttattttatacacgtgacgtcataagcaaaggctttgcttgtgttctagctaaactccaataaataaatatgtacagatatgctgagcctacaaaacagtaaagaaaaccttttcttcacaaaagatacacatatgatacatttgttccttacactgacatatgaactcattcctagcttacttaaaacaaaacccttctggactctgtatgccaatatctagaggcatgtacctggtccttttattttatccagaaagcaaagctatgcagagaaaattcctcagtttctttattaaaaaatggcctgcatatggcctgctacttattattaagtgacatttaaatgttctcaagaagttggaaactctttagaccagttgtcctgaaatgactggacaatgccctgtggatgttgtcaaaatgcagcttcttatgaactggctcactggggtgggagtggggtatggtgggggt

SEQ ID NO: 173 - DNA, 565 bp, Rattus norvegicus
  Genbank Accession No. AA818534
  misc_feature (1)..(565): n = a or c or g or t
tttttttttttttttgtacatagatttctcatagatttatttctgtgtcatgttatatatagacctattcatatatactttttatttttaatatacaatctatatttccttccccaccaaaaccacaggagatataagttctggcaggatttccattgtgtttcctaagatgattagctaaccaagaaccatttcttaacatctcagaaatagttgtcctcaggctctggggtcactggagcagcagtatccccaggcccaaggagatgagagaggacaagagacaatgtagtgtgatggggttctgggaggaaaatgtccagtgactcccagggtagcagactgactccagaactctaaggctgggatgaaggtggagacccccttccccatggcttttcagatgcagcccactaggcaggaggaggagctgcaggttaggcatgcangggtangtgtgggtagtggagagccagcaccctctgtaggactgccggcctgctcaatgccgggggtcatgggcagacacagtgctaaagaacaatgggagcaagcgttgtgggga

SEQ ID NO: 174 - DNA, 419 bp, Rattus norvegicus
  Genbank Accession No. AA818574
tttttttttttttttttgatttttaaaaattatttaatttagtagtttttttttttgaaaaaaagcaataaggcaaaaaaactgaaaatatatatagatatatatatagtcttattttgctttcatgtgactttattccatcttcaggacttctaagcttcttccgttagcagggatctgggaaatcaagctagaaatgtagtgcagatagaggggaaggggctaaagcaaggaggttccttgggaaatttccactctatccaaagcctctggaatggtattttccccaaggacccacactggctgaggctcaacagttaaggaacaaaaacaaaaacactaacaaaaagtacacaaggaaggcacctcaatttatgaccctcaaccaagagtgggttgcacaagggttatatttctga

SEQ ID NO: 175 - DNA, 468 bp, Rattus norvegicus
  Genbank Accession No. AA818595
tttttttttttttttttaaagctccaacatttattatgtcaatgttaagcacactttttaaaagacaacatagaatgtatagaaacgaggggttagggactcatgctcatctccacaatacgggtaattaggtcggctggtttcacaagggttggacgcctcttcgaccgcggggcagtccgagggccctctgaatgggacggattcactgttccaatgtgggtctgtttttttgttttttacgttttattaaaaaatataaataaaatggcactgcaggcccaggctgggaggactcggcaggactcttgtcttcttggaggctactgtcagaaaacatcacaaactagcaggatgacggagctcgctgacatcggctgggcggcgcatgtccagccccgcccctgggggcttcagagtttctcagaacttaagggctcttgagcttccatccgcctcgtgccgaat

SEQ ID NO: 176 - DNA, 488 bp, Rattus norvegicus
  Genbank Accession No. AA818612
tttttttttttttttctagaacaagggctgttttattttcccacaaatctttttaatataaaacaaagataaaacacatctcaattctgcaatctgtcagcatgtcttcttcctacaaggtagatactacatagcaaaaagtctttaagaacatttggttgggaaaaattttctcaggcttctcacggaagcccaggcatggccaaccactagagcagtccttgtcttttcagatcctcgtatgtcttcttgttcacaacatttccactggagtcttcatattcttcctcggtgtcaggctgccatcgttctgaagccttctgcagtttcagcttggcccacaaggagacagcatcttcaatctgtgtcacatttgcaaagtgggcagtgtttgggatgcccaaacacctcatgccatgagcatgacgccattcctggagggaaggaaagggacgtgtgaaacagggatggctgagacagcacccact

SEQ ID NO: 177 - DNA, 470 bp, Rattus norvegicus
  Genbank Accession No. AA818615
tttttttttttttttttaaagataaaaacatttcttttaattggtcttggctttgatttgtaccgccaagccctggagacaccgatacaatttgatggtaaacaaacagaactgcggcagttagagagaacacagacccacttcccaggcaggcaactgtttcccaatccccctcatgctacttctgtgcttctgttcagaaaggtgatactgtgtcccagccctagcaaggctgaggcaggaggaccaccagtgtgggaccagtatgggataggatacataaggaaaccttggttcttgttgtttttaaagggaaagaaaaaggtaagtttgaaaccgaattgtgcagaaccgatcacaactcatactaaggatggagatagtcttttaccaaaaaccaacccggtcaccagcactaagatttgtttctctggatttgaagaaggaattgagaaaatgatctgcaccaa

SEQ ID NO: 178 - DNA, 530 bp, Rattus norvegicus
  Genbank Accession No. AA818627
tttttttttttttttttagtgcacagatatcttacatttattgaaatcaaataccgaaacgttggtaactgatttacagaagcaatcacagactgcaaaaacatgtgtgtcacacacacacacacacacacacacacacacacacacacaccccaatcaaggaaaaactgtgtcctcgaaattttccagtccaaagttctgttggtgcgcctctcgcacccacggtgctttcccatggcttccacacaacagctgagacttctgccctcttcattcttgatgagatttttcagcaataactttacattcatacattgctagctgacgaccaatgtttcccatcgttatgcctccagcaaaaaatatacatggcaaccaagagcggacatagagaaaatctggagatgtgtattgataaacaccattgtagactaacagttgggtgacaacggttgctaagaaagcaattccaacaccaaggccaaaaccacttctagatctgtcaaaagtccaccatagtcctactgaca

SEQ ID NO: 179 - DNA, 488 bp, Rattus norvegicus
  Genbank Accession No. AA818664
tttttttttttttttttgccagtctcccttctttattgatctctggctatagcaggggcctgggagaccaagagcatgggggagtcacatgcgatttggagtgtcaggtctaatgaccatggagatggacttcacaagaacagggcccactgtacaaatgcatgtatttacaagagaggagaaggcagtcacctggacttggccttatatggggtgaggtgggacaaggagcctgaggacaggaagaggctttacctggctgcactctgctctgggtgctccaagttgcaacagccctgagcccctccccatctgccttccacccaccgggggcccaggggaggggactctcttagtgggccagttctgggagaagggagtcaggaaggacctgctctgtgacaacatggattactgggtaatactttaccctgattgcactggggctagctgctctctccttcctttgctcataagatacatcctga

SEQ ID NO: 180 - DNA, 489 bp, Rattus norvegicus
  Genbank Accession No. AA818692
tttttttttttttttttatttcaatatttttttattagggcctataaagcatccagagataaatatgtgatctctataaaggactttctttctctgcattgtcccttcagatccccagaggccatgccacagtttccccatcttcgttgcacactgaagagttcagaacggtgcctcaccctcggtcttctcatttatgaatcaagttcatttccaatccactactcagagggagcgtatttttttctgttccacaaagagaacttttttgttcactattggatcatagtgcagaagggtcagcttctctcggagtcggcttctcttgtagttgaaggagaaacctgtcccggcttggctcaccagttttaccagaatagtttttgacttgctcttggcaaaagagacggcagaaagcagcatggcgtccgtacccctactctcacacagacccgccgaaagagctcaacaaccctcgtgccgaattct

SEQ ID NO: 181 - DNA, 584 bp, Rattus norvegicus
  Genbank Accession No. AA818700
tttttttttttttttttgcaatttatttctaaatatcacaaacttttaaaaaagcaacacattcatactaaaatacgtgcatgagcaaaaataaaaaataagcacaggagtacgaaaattaacatagtaaaattttaatacagtattctggatacaagtagaatagcactaagtaaaggactgtagttacctcagcagcctgggagtatgggttgagatcaaccaaggtttagaatagccccttcacatttcatcagtgctgaccaaagccaaagcaagctaggatggagactacaactaaccttccatgttaaccagttattttaaggtgacttaccctcacttaatggcagttgaggtaagttaaacagagagcccttacaaagactaagaaccaaatgaaaacttgtttctagcctttgttttaggtcaccttaaactaaaatgcttttacgtacttcttaacattcatgtacacattctttcaggccaaagtttcagcttgggaatcttgccaactgtatgtccaacttctgaacatttgcaatcagacaaatttactgtataaaacagtaagatttact

SEQ ID NO: 182 - DNA, 557 bp, Rattus norvegicus
  Genbank Accession No. AA818702
tttttttttttttttttcaggaaccaagaggattttatttgtgacgccctgaaaccacactccttcccaggggcccagggatagaagcaagggttgttgtggtcctaggaggaaggggtgcccacctctaccctggaagctgccgccatgatctcatgctctgggctgctaggataagggctacacgtcatcctcagacacaaggcagtagaagtctgttcgcgcactgtagtttcgagagccaaggtcagagacatccatttcactggcatggccctctcctatggagaccttgctttcgtgtagtggagttggtggctccccaaagacaggtccacggacacccaggtctccctcagggtctggatccagctctgactccatggcccggccctgggcagcacgtcctctcacgattagcatgggatctttgtcatcctgaagtcgggtttgggggtctccctccacgggtctgtattgcaccttccgtggtagtgccaactgtagctctttccaaaaatcagaggaaggtgtcacggagccaggcttccaaagca

SEQ ID NO: 183 - DNA, 566 bp, Rattus norvegicus
  Genbank Accession No. AA818717
tttttttttttgtttttcgatctttatattttatataattaataaaacagtgcttgtataaaaattcacacaaagttgctagagagcatacaagttccaaaaaatgtcctgggtttgtggtacattcagttttctaagggtgcactcagatcagtgtaacaggcagacatgacgtggtatctcgttctctttggtaaaactattcttgttatatcactcctcacagtagtcactctgatatccactttgtgcagggtctgcgcttcctgggatgtcagacattaaggctggatctacaagaggcaagggctgcccacagcggtgagtgacagccccggggccctcaccccatccccacttcagaatgacccagtgacctccaaccgggggggtctccaggtccccctggatcaggtaagaagcaatggctgggggaatggtagaaactgaggcaatctctaccagaacccgagtggcccacactgtggcgtgatcaagccaaatccagtcgccactaagtagatcccattggtcagttgatgattgctgctgatgtgaacccctca

SEQ ID NO: 184 - DNA, 596 bp, Rattus norvegicus
  Genbank Accession No. AA818741
tttttttttttttttttgttgcctttattttatccctatttgaccatcaaatatgtttacagaagatggtttacaggtgcttgagcatcccactggattctctaccatttcaaggtgcaaaagaggcttacagtgtgtttcattaaacaaagcaaagctgcgacaaaacaggatcacatcaatagtagtatgcatcagaagagtgtagtaatccatcaaacacaattgggcatctgtgcctttcctcaaaaagaacaagagctctacactgaagaatatgtagtgcacaagaagcattgtttgtaggctgtgaaggaacataaactggcataatgtcacttattaattcaagtctcgatgacctatgacctctctgtgaatacaaaggggtccaatgtcttaggcacctgctcatgggactgtatgtttatttccagggtgcacagctccatacaaagacactaaagatgggtttggaacatggcagcatttacatatttgaaaaagttcaggcacattcggatacaaaagaaagggggggaaatgcaaatagaaatttctcttaagtctctgaaacacagtgcaaaattgagaca

SEQ ID NO: 185 - DNA, 588 bp, Rattus norvegicus
  Genbank Accession No. AA818743
tttttttttttttttttgcaagcgacattgctgtcccaaaatgagttcaaatggtacaggggctgctgtccacccaagcaaagcaaaccttgcacgtttatacggatgcacggagcgtccaattcttacagtgtagacggctgacgcccggggcgagactggttgagcctaaagcagcagcacaaggatgctgggagatgcttgcacaaccctggtacccgcggctgcgtgaggcgttctcctgtgactctgactctctgttggttgctgctcgaagaactgtgtcttgttgtgtttttccttttgtcttcagtctactttacagttagagcatcgcaaaaaaatagaaaataaaaaaataaaataaaaaataagactccctgcttggtctgtcagctgttcagaactttcatagaacggtgtcatgaggtatcccttagtgtctgctatgtagtgctgtggttgtcagagagaatgtggacttacctgtaggtacagtaactgactttagtgtgtggtctacacgagacagtgttcatgttaaactctttcttccatatcacatatgatgtgacttttacccccaga

SEQ ID NO: 186 - DNA, 544 bp, Rattus norvegicus
  Genbank Accession No. AA818747
tttttttttttttttttgggttttacattcgaatacagaactttattaggaaaaattgtaggtgaagatacatcatttttcattgatatgacttcaaagtagaaatggcctctcaaataactgtcatatattaaaaacgagaataagaaagcacacactgcgtataggaagctgccttctcctggaccattttcacattatctgggagacagaactgaaacaaaatacagtattcaccacatgcaacactgaaaccatcgctgcgtagacactgcaagctctgcggaggaatgacttctgtgaggaagcccctggtgacgccgccgagataatcacccatgagaagataaacagaactcgatggagaggcctaaaggcctcatgccaagtcccacagaggaatgcagccttttgctctccaaaccctccctcaaagccgaccaagcaatgaatcagaggggtctgccacctcggctgcacttccttcccactgtccccgaatagcaagcagcacagtgtaaacacaaggtacaaatctgggttt

SEQ ID NO: 187 - DNA, 488 bp, Rattus norvegicus
  Genbank Accession No. AA818770
ttttttttttttgttttccctcagaaagctattttatttggatttcacacacaccaaaagcagagaggagactgtggggctggccctctttgggctggagtctctggctcccctgggcagtcggttcccagcctcccaggcttgtcatcctctgaaggctgagtggggtgtctgccctgcaccacagctcttctccaaagccgaggaaaacccatggggaatacagggtaagaggacctaaggatcatgggatgggagcccacattgaacctcggtgaggtagtctgtcgcctgaggcccacacgggtcctgctgaggtaaaatttgtaagtttatttcagggacgtgggtcaggactcctcggtgccagagtcatcctcttcatccccaaagcagctgtcggcctcctccacttcaccgtcctcatagtagtcgtcgtagaagaggtctgagccctcgtcgggcgccggcgccttggcctcgtgccg

SEQ ID NO: 188 - DNA, 606 bp, Rattus norvegicus
  Genbank Accession No. AA818781
tttttttttttttttttggacacactgtatctttatttctcatttatctagcatatacaataaatgctgaaacatgcttaacgtttggagttgtgtattcaataaattcaataaacagataagcagtgatacaccaaatacaggcattataaggattttttttttaagtaagtatctgtttagaatacaatgttacaaaagcaagaattggattttaataaaacaatttaataaaacaaggcacaatgtttaaggcaaaatttatgaagaaagtatataaagttaatataagatcatattttttaatatcctttggggaaagaggcacaagaattagaaatagcttaaacatttttttagaatattagccataagaaagtaaaataaatttgatacaataggactctattttttccagaaaacaaactccactgttgaatcatatttctgagttccattttaatcatatatatatttatacagatatttctaatacacagactttaagtacagaaaattaagatgtcagagcatatgtaatgatttgaccaatataaaaggttaacattttttcagcatcttttgttgttttcgaaacccccgact

SEQ ID NO: 189 - DNA, 537 bp, Rattus norvegicus
  Genbank Accession No. AA818798
ttttttttttttttggtgacgccagatactttactcatctcaggcagtctggactagttcccctcccgtggactccagggtaacaccagaactgtcctagaccatagctgtcctctctggcggctggaggtaggcctgcagggcacggtggaggaggaagcaggtctgtgggtggagggaagcaggtctgaaggtggagggttccagtgtagttgtggctcatcctttcctatcacctctcggggtgcagcccacactctggtcctcgtgtccacatgagggccactgtttctagctgaatggacatatccagtgtcgataatcacccctcctcatcatggttcacagtgttgcttccagggacatctacctagacaatggggtccccaaatgtgcaggcctcctcaatggcgaggttgtagctggaacctgtccctcccttataggtgctggtcacaattctcatccagcctcgctcaccccagggctcgccccatgaattgcggacaatccaatactcgatgccatcattgctga

SEQ ID NO: 190 - DNA, 562 bp, Rattus norvegicus
  Genbank Accession No. AA818818
tttttttttttttttttacttgatcttttaatgtttaacactttagagacataaattacattaattattttacaaatgttaatgttgtgaaacacttacagtgataatatcagtatttcagaattctttttagtagatgctatgttgtgcctccatgaggtccgggaaggtagtcaccggcgcgctggggcatggcgggatgtagagcctcctaaccctaggatggctgaatctccaggtactcggcaaaactacccagaactggaagtatgcagcagagggctgctggcccgcttctccagccggctgctctgaaggaagaagcccaggctcaggcccaggctatgctaaagggacccaaaaatcacacccttctgcccattaagaccccaactgcattctggccttctctgtatgaagaatgctggcgcccacacgagctgcttcctatgctgtgcacactggtgccctgtgcaccgatcgctactccggggacattgtctgaggaagtctctgttttcccagcactggctcatggcttggactcaggaagcttgacctt

SEQ ID NO: 191 - DNA, 479 bp, Rattus norvegicus
  Genbank Accession No. AA818875
  misc_feature (1)..(479): n = a or c or g or t
tttttttttttttgcttaattcttttattggaaaaaaatgtatcttaaaagtccatcatcaactttttaatataaattatgactcaaactcattccaatcaccttgttaagtggtggcagcagacatactagagaaggtagctcgaggcagaagagcatcagcaggaaggactgctcaaaaaactaacgcacaactggagctcagggtcacccacactatgtccaaccttttgccaatggccttcctgggagcatgctgccaggggacacaggtcctccagcaagtattcacgtagcctccaattaataagctcctctagggctatgaggtgaactcccttagggaggcangcctgactgaaaccgcacggaggcaaactccgagtggacatccgtgaccagtcttagagcctgagacaccagagtgcagagctttggacaaatgaaagtctcagtcactagaccgggggtaactggac

SEQ ID NO: 192 - DNA, 562 bp, Rattus norvegicus
  Genbank Accession No. AA818900
ttttttttaatttttttcattatagcaagttctttcattttattgctctttgtaaataatttagccatagcaaaggttagttcttaaacaaccataatcaaaaatttacatcaaatattgttttcctctgatatacattacttctggaaataatcagtgaactttagaaatccatgatatattcatgtatgatagtatgacactagtaaaaaccagtaaaattcttcattgtaaatatataggtttgtgctatgccttcaggcgagtcataaccaactcaaagagagatagtgtggacagttcccatgcagacaatgtttatagaatgtcagaggcatgtggtagatgtacattcgtgtcaaaatgagcattcaattttggcagacttgcctctttatttttctttagaaatgtgtagtggatttgcaaacaactttctcagatcactgtgactttggcattgaggattattgctgtagagtggtataaactaatcacatttgccgaagaaaaataaatcaaagcccatgtactgctaacactatgccgacacttcatgcta

SEQ ID NO: 193 - DNA, 582 bp, Rattus norvegicus
  Genbank Accession No. AA818907
  misc_feature (1)..(582): n = a or c or g or t
tttttttttttttttttgaaatttgaagtctttattgaaccaattgcatgttaggttacaaagctatttcacttttccaaaatgctgtttctctttgtagaccaatctggccacaaaaggctacctggctaagtattagccagaaacttctaaatcccagtgtgatcttcttgtggcatttttccaacaaataatgcagaccaaatcacaagatggccacctcactggtcacatggtccttaggttaatgagcagaggctgacaggctgtctcctcactcttccaagaaccgcccccaagtgcacacaggccctgcttcgtctcctcatcggcccatcttctggtctccttcctcaccacaatcttcacctgaacagcagtcaaaaggcgcggtcggtaggccgcggaattatcactgcgcatgcgaccattagggtccgtgcttctactgccgaaatggagaatcccggttccttagcagcaggctccgtatcccgcggccactgaggaaccatccggggatgcagaccgagtacggtgggctggagaactgggagaatggggggcggngggcaagactgg

SEQ ID NO: 194 - DNA, 612 bp, Rattus norvegicus
  Genbank Accession No. AA818910
tttttttttttttttctctttttttacaaaaaaaagaaaaaaaaaaaacacttttattttccacaaggaagagcaataggaaaagtcaaatcatttcccacatggttttcttaaaacagagcctacaaggacatattcagcaccaaataaaagattacaacagccatagaatataatctataaagcaaacatttaatattgcactttgtttcgcaaacattttggattttacttttcctaaatgaaaaattaggaattcaagatagcttgaatactagagcgcaactgtgaccctcagatgttatgtcaggaattgaccaatatttagaatagtgtaatgcctcaaaagagtaaagaaatacttaatgggaaaaataaaactttacttcaccaactcttaaaataattttgtcaccaatgccaattatcagaatattggtcattcttgcttaataaagtattttgtagaacatggtagtgagcgccccgaggccatgcacaccaacaattgttccctagtcagacataacacagagtcaggtgtttttacacaatccctcccaacaaaaacaaatccaccaaatgccctttatgccaaatatcccatcagct

SEQ ID NO: 195 - DNA, 428 bp, Rattus norvegicus
  Genbank Accession No. AA818971
taagcttgcggccgcggtacccatgtagacacagccaatggcggcggtcccgtagctgtgagttcgtgctcccagtgtcaggcctcccgcacaacctccaatgaagtagttcagggggtcatctggcttctctcggacctgggcactgacacaggtggtaaggccaaacatagctccaatagcagctgcagtgaatgtgaaccggccgaccctggccacggcttccaggggagaatctgcagggttgtgtgtgatgctgtaagcagagcttattaggccacaaaggccgcctaaggcagtagtgatgtaggccttgcgatgacactgggtgccgtcgggggtctcattgtaggcttcgaaaaaccgcttggccatggccgtacctagccagcctagcagactttacggcgtttgggcgcctcgtgccg

SEQ ID NO: 196 - DNA, 582 bp, Rattus norvegicus
  Genbank Accession No. AA818998
  misc_feature (1)..(582): n = a or c or g or t
tttttttttttttttttgatgttttatatatattgtgtttaatctgataaagtatatgatccatgtataatgatgtatttaacatatctatgaagcacccaacagaggggcagctacttccttaagacattataaggagaattcacttgctgatcactgaaggaaaggcaatagacagaggggaataggcacagtagtcagaaaacatactctccctattgctagtaagggtagcagaagtttccaaattttgtactatggtttctaggaggagccatttggagcagatgataaaggaatgttacataaatcctagaaatatgaaggggctaaattacatgagtccagtaccgaagggtataggcctgcttcaaactcaggaacttaagggaagtctangagcaatctgacaaaaaggagttatggagatctgttggccattcacactgcttccccagagcacagacagcagctctcttttgcagctggctgccatttattctctcttttcaatcaccttcactctttgctcaacatccaattacatcccccggcccaaccgacatcatcttgtgtttgagt

SEQ ID NO: 197 - DNA, 566 bp, Rattus norvegicus
  Genbank Accession No. AA818999
  misc_feature (1)..(566): n = a or c or g or t
cggccgcggctgcctgngcggccaccgcggcctggttggcttggtgctgcgcagctttgattttggcctgcaagtgtgcaggagggtgaaaatatttgcatttctccctcatgcaacgcccctttatgtaatccatacaaacggttacggtgttgtcgtttgtgtcgatcatggtgctgtctgccgggtgtgcaaagcggcagtctgtctctccccgggcacagtttcctcgctggaactccctgcatacctccagtttatcggtcctgagaagtttctgagttgcagttgagcccgggacagtgaccggcggacttcccggaacaatgacaggtgtggtgggtagaacctctgttgggactaaccccactccaggggtgacaggcgctaagtaaggagcaaagctaatggccgcatttgtccctatggtgggacctacaggaaaagtgggcacagggtggagcggtgttcctggaaacatgaattgcatctgctgggcaagcatcgctgctgcagttttttgctggatcaaattgttcctcccattgatttctagctgagttttt

SEQ ID NO: 198 - DNA, 188 bp, Rattus norvegicus
  Genbank Accession No. AA819021
tttttttttttttttttagaacatcaggcatttttaatccatctttacaggttacctagaccacttttgagtaagacaactgtagacagttagtaactgccacgatttaggacgccagttggtggcacgtgtcaagttccacagagtcctgccttgccgggtgtctgaatgtacagctcggggtcact

SEQ ID NO: 199 - DNA, 318 bp, Rattus norvegicus
  Genbank Accession No. AA819041
tttttttttttttttttagccttaggcatgtctttattcacttgaatgctgtacaaatattacaatttccttttactgaaaaaagtataaaaataatctttatataggaattcattcgttactgtaaatctttctaaatctctgcaatggctctaaatgagggtaagtgaataagtggaagtgaaggagaatggagggcaggaggtggagccactccaggtaccaacccacccagactcctagctagacacaccgattccctattaatccactccatggctacccagagatcccaggactcagggcatagctgagaga

SEQ ID NO: 200 - DNA, 583 bp, Rattus norvegicus
  Genbank Accession No. AA819055
tttttttttttttttttagcaatatactagcatttatttatttatttatttatttatttatttatttatttatttatttattttttatttttggtgtgagtatcctagacaatcaaactgaactattcagaaaagaagataaaagatagcacttccttttgccttgcttataggtatgctagttggtttgggctgttggttgattttcttctttgaatccttatatgacaactgctggtatgatgaatgctggtccttaggtaggagactttcagaacagttccagctcagggtgcatcaggtcctgtgatgaagtacattgtgccttctgcaatatgtgtttatcttccaccaatgcaatgcaagtaagtagtctcttaggttctataagacaaccctgaccaacaacttacaagagtatttctcttgtccagtattactgtatttattaggtgatcgttggtgtttggaggggacattatcaacctttcaaaacacatgatcatttatgaagtctactaagagttgtaacttattttgagcaggtgggataattgatgtgaccatcaatgcactgtgtacg

SEQ ID NO: 201 - DNA, 414 bp, Rattus norvegicus
  Genbank Accession No. AA819065
tttttttttttttttttcccaagagttagtatttcaaaactttattttctcaaatgagcaccaacacagatcagcaataacagaaataacgcacttcttactaatactgaatcattattatgtacaaataccggaaggaggtgaagacaaattattcaaaaacaatcgccttcgttattgaagcaaagtgacctgggaaaagaattcccacccaagaaaggaaaaaaaagaaaagaaaaacaaaagcaatcccaaacccaacaaatacagtttgtaaacagacagacagacagacagacagacatatccatggtgcacagtctctgcaggctgggaaagggaaactgactcctgttctcaccaaaccaccgtaagatgctgggcagctctaacccaggaggacaatgcctttct

SEQ ID NO: 202 - DNA, 281 bp, Rattus norvegicus
  Genbank Accession No. AA819111
tttttttttttttttttagcattagcaatttgttttattttttccttttctgttgcataggaaatgcagtacttgcttccagtaattgtattgtgatgtgagaaggtggtagcactaacggttgaatacaagagttaaactaatccacaccagctcaaaaaccctgtggagacttagttgataagaatggacgcccacagtgattctcaaccaattacaagttttcacagaacacagtaaacgaaaagggtaactatgagagtcagtacaaatatgctaga

SEQ ID NO: 203 - DNA, 510 bp, Rattus norvegicus
  Genbank Accession No. AA819118
tttttttttttttttttagaacaagtatacaattctggatttttatttagataaagcttaagttacaggaattcagccttctgcacacccatccttccctctgctgtaaggaacttggctcccaggcagccctgaccccatggaaagacccaagcttctacatcacatacagcttcaggatctgttggctcctggggcttttctctctgctgtttcctcgccctggtggaatggggaaagctggggtctctgtccagttaaggcagatgcaaggtgtctgctccttgatgaagctgctcagtccttctcctaagccagaaccatcgatatgagccaggtcccttcctgaagccacgtgtttgagagctatgagggcagtatgctgtggggaagccccaacgagggacaggctgggtgtgtgatgctgatcatgatgggacacctagagacatgttctcaggactctgctagacagacacacccaggctacctggtaaaagtcagttctcg

SEQ ID NO: 204 - DNA, 555 bp, Rattus norvegicus
  Genbank Accession No. AA819140
tttttttttttttttttcatttccatcccgtctttattgcttctgcgatcagtacaaactctcagcttcagtgctggcattccctccttcctgtctcaggaaccagtcattccaacttccaactcaaaagacaccagagacagctttttttttttttttttttttttggttttttttttttgtttgtttgttttgctttgtttttaataggcatgcaaagattaaagtagtgaaataaaaaataaatgaccctagattgggcaaagaaaaccatctttatgaagaagaaatttaaatgctggatcaaaaaatttaaaagacctggccttatgggtgtgtgtttatcggtaatttaaaaccaggcgaagttggtagtaggcaaatttttaaaaagtgatagagtagcgatggtattatttgaggtaaacattatgtattcaccttctgaaatctacagtgatcttaacttgtgctttcaatcaaatgtggtaaggtgggcacatgcctccatacccacatacatagcatggacccatcacttgtcagtaactcagc

SEQ ID NO: 205 - DNA, 488 bp, Rattus norvegicus
  Genbank Accession No. AA819193
tttttttttttttttttgcagaatagaacgtaagtttatttgtagtaaaaaccgtagtcttgtggggaaaacccattggcaaatgtacagttgttccatcagggggtgctgctggctgtgggacccccacatccctgacttgcatgcattgtgctgcaaatgttcacagctgatctcaggcccccagtccttagtcggtgtccagtctcctgcagaggtgcccatgccccagcctgcccagcaccctgctcagtgcagctcaaaaacaacaaaaacataaaaacccaaaccagacacacatgtcaaaacaaacacagaacattcacaagaacggggctctggactatcctctttctcagtgtccttcgttatcatgacacgtcatgacaagctaaaatatacatccttctgctatcatagaatctcttattcacagatatataatgggagatttagatgaaataattacaactttccccctcgtgccg

SEQ ID NO: 206 - DNA, 329 bp, Rattus norvegicus
  Genbank Accession No. AA819259
tttttttttttttttttccaaggaaactggactcatttattctttcattgaaagaatttggtctagagttggacgcaggaagatgggagatgctgggacagggagatgtaggaccatcctggtcaggtgatgagagcaaaatggccgggtgtccggttttcctttcccctaactcggagtttatgtagtaactactctcctttcaggagagtaaggagctggtctgtaaaaatgccagcgtacgtggtcatggccgccgagcttttgctgtacatgtccctcagtttctcgtccacgctggtcaggtatgtcatctggtcctcgtgccg

SEQ ID NO: 207 - DNA, 654 bp, Rattus norvegicus
  Genbank Accession No. AA819268
ttttttttttttcttttaatttaaagccacaatacacagaggaaaaagaaatgcaaaaaaatctctccgtgcaaggacaaagaggcctttaaccatggtgcttgtgaacgctttctgaagctttaccagctacaagttgggactttggagaccagaaggtatacagggccgaggagcctgcacctggggccgctcggtccagcctggtttagcctgggtgtcactgggtgtggtgatcccagacacatcgcactgtggattgtttcctttttaaatgaacggatgacatgtagcagagagccgcgtctgctcagagagagaacatcgatgcagtgcgttcggaggaaaaacaaaaacaccagaaaacctttttgttcaagcttgtcaaaccaacaacctgccaacagagaaaaagagtgtggacaaggggacttaaaaatgacattcagtatataaaacatgtacataataacgagtgactaactatcaaatagatggatttgtatcaataccaaatagcttctgtttttgttttgctaaaagctgaacgttcagcgctatgcaattctcgatttttagtacattgttaccagtttccgatcaccttcagagtaagctttcctcaccccaggattttgttgcttaaaaatactg

SEQ ID NO: 208 - DNA, 630 bp, Rattus norvegicus
  Genbank Accession No. AA819269
tttttttttttttttttcagttatgtaagtatttaatcagttctttagaaaacttcctgattagtaaagttggcttctttgaatagccttaaacattggtcaccgtttaaacaagacatcctaaaacaaacaaacagaagcaatcacataatgttcatagtaatttacaagaggatggtacacacgcagatacagaggtagaaattcactttacaatgtttcactaatacacatataccaaattcaaggcacaaaatagtttgctttacaaaaaaatactgtaaaaatgtcatttgctgttctacaatgtgaatatacctttcaaggaatctttacacccttcacaatactccatacaagatccgtcccccacactaatcaaagctggcacgaatgtggggactttttaatgcagaaattcccattatctttgtagagctgctgtgttcggtagacaaggtcctctctcctcccttaaacatgagtttgcagctccgtgaggaaagggcactttctatatgcagcaaaattcacaggtagaaaatgtataaccatttggattaaccaggtctctaaacatgtaatctagtatttcagagatttgatttaaaaatcaccaactatttagtc

SEQ ID NO: 209 - DNA, 501 bp, Rattus norvegicus
  Genbank Accession No. AA819288
tttttttttttttttttaaagtttacaagcacattttattatttagaaatagaaacatttattgaaagtgggcatcacgttaaaagggaatatttgcctgagattagcagtatttccctgaaaaaaaaagttgacataataagaacaatttagcaacataaaataactacactatgcccagagtaatgaaaacatagagatgaaacctttccccaaggcaatgctgatccacctgctgtgtggtggatgagctgcgactgccacgcccagtcaggtgggcgcgcacaagctcgcacaggtgaaaagcaaggcagcgctccgagcacctacttcgaactgcaggcttgcctgggtgctagaatacctggaccttcgcgtttacacaggagtggacgtgggctagtggagtggggtttttttagagtatagtagaagcagaccatttcttctttttagaaagtactgaactcggctggctccatagctgatgcttccgcagtt

SEQ ID NO: 210 - DNA, 336 bp, Rattus norvegicus
  Genbank Accession No. AA819333
tttttttttttttttttggtttgactatttaatgataaagcaacataaaaaaaaatgactctttcctcacagtagtcagacgccctcactttgtatgaagacagccactggcaggcctagaaacacatctggacctgaagcaggcaccgtaggtcgtacgcaccccaggaaaaggctgtgctcaatagggctgcaaaatgattttggctctggggactgaaggaggacacactgatacagaatcaggggtatgtgactctgagcgaccgtctgtcacctggaccaagcatgtcaaatggcgtttaggggagtttggtcggtgagtcaaaagacttc

SEQ ID NO: 211 - DNA, 516 bp, Rattus norvegicus
  Genbank Accession No. AA819337
tttttttttttttttttgaaaatgatgaagtgttttatttatatttagtctttcttcaatctgaactgtaaccaaattttcaaaggttagcaagtcattacactcatacatctcataatccctttcatcacacagtaggcacacatatacagcatcatgtcaatataatgttatccacacagcataaacagtttaagcagtagacgcatttcacatgaaagaggctctatgcatcacatggcctgtcccaataaagagcagacattagaatgtcattttagcagttataatattgatataatcaatatggctaatttttatacccatcatatattttcataagtcatccatatgtaagaagcaaagaacaaaggctgttttttgttatgtgccaacttcaaaatgacatactaaccagacatcggcattcaaaagctaggttgaacaggactggccttgatgcacatgcagtagatttggtttcagaatagaaaattaaatggtgatgtcagcagt

SEQ ID NO: 212 - DNA, 513 bp, Rattus norvegicus
  Genbank Accession No. AA819362
tttttttttttttttttgctttctcctattttatttaggtctctctcttttttttttttcaaattccaaccagaagctaaatacaaatggaaaccagtaagcactagttttacttcaagagtaggatcattccgatttactccagtaaaagtatgcaacccttaagcaaagcttttcttcatttaaaagaaaaacaaaacaaagtaaaagctatacagtagtctttcctcatattcattgcacaaacgagttctgcttccagaactctccacactctgtaggtatttttacaatgtaagagccccacttttgttttctatcccaaacactcaacttctttaggatggtgtagaaaccaggatttctgcaaaattcactggattttttatttgtaattaaaatttctaacaccaaaaaacaaaacaaaaaccaaaaaagtcctctacttatgatggtttttgcagctatgactgttcctcggttttgtagctgcttcagccacaccagactcca

SEQ ID NO: 213 - DNA, 422 bp, Rattus norvegicus
  Genbank Accession No. AA819381
tttttttttttttttttgatagtgaaaatatatttatttttttaatacaatagctgccagcaatatactggtgttgatgttccagagagaagaaaatgcaagcattttgtaaagagctttcattcctacccaaggaatcccatgaaatgctccaaggctgtccagcattaccgcctgggagtccaacttttatggcttgggactcaactttttttccttgataaaataatttgtttcccccactttgatcattacaacaatgaactttcagaagtctgtgagttttgctaacaaatgctctcttgctctctctctctctatctgaaccaaatgttgattattgccagctcaagaaactggtgaatccgttacaacacagtgaggtgtggaccaaaatcttcatgaaaaaataatttctactt

SEQ ID NO: 214 - DNA, 402 bp, Rattus norvegicus
  Genbank Accession No. AA819383
tttttttttttttttttcaagatttcaaaggacatttattatttctgaaaggtctgagggggactttacaagactcggaagccagtaactacaaaggatgataaataaaatacaaagccagtatgttgtggcaaatttccagaaaacacactgaaaatctttacagttcagaactgcttcactttatacataattacaaattactatacagcgcttgggttgaacccgactttttacttaataggcttagtacagaaatgttcatacagcatttggagacaacaagaacagaggtataggtgtatcctgcccaccttctgtacagcctaggcctcaggggcaaacctgagacgaacccgctgggttaggcccatcccagcaggtggcaaccaaggcagggca

SEQ ID NO: 215 - DNA, 305 bp, Rattus norvegicus
  Genbank Accession No. AA819438
tttttttttttttttttgagggcaaagtcaaccttttagggcattttcggcccttggaattttttttttcaagcaagaccatgttttccaaaggggcaacaatttcagggagccccttcttccggccccaaaaaaaacccctggctgcaaacgttaaaaacttgttccaccttattggggctgatgtcaaaaacccttgggggacctgccttcggctccccaaaaggctattttgtttcaaaaagtaacccttcaacttaccctttacaataaaaaaaatgtacccgattctaggcaaattttcc

SEQ ID NO: 216 - DNA, 192 bp, Rattus norvegicus
  Genbank Accession No. AA819450
ttttttttttttttttacggttttacaattcatcgaggatttaattaatttttcggtttcagtttacgctaggaactctatatgcatgggttttttataaacagtcatagtttgagggataacagttgcatggatatcaggaagttttcaggtctcatgaactgcgaatgacacatagtttatactggggat

SEQ ID NO: 217 - DNA, 181 bp, Rattus norvegicus
  Genbank Accession No. AA819459
tttttttttttttttttcaacattttccaccttttattacccaagtgtgtggggctggagatgtagggccagggcaacggcaggtttcaataaataagaaatgggatgcgcattgggccccgcgcctgcacggccccacataaataacgaggcactgggccagagcaaagactaagacagc

SEQ ID NO: 218 - DNA, 481 bp, Rattus norvegicus
  Genbank Accession No. AA819501
  misc_feature (1)..(481): n = a or c or g or t
cggccgcgcttgcggagctgtcaccatgcctctggctagagatctattacacccttccttggaagaggaaaagaaaaaacataagaagaaacggctggttcagagcccaaattcttacttcatggatgtgaaatgtccaggttgctacaagattactacagttttcagccatgctcagacagtggttctttgtgtgggttgttcaaccgtgctgtgccagcccacaggagggaaagccaggctcacagaaggctgttcatttagaagaaagcaacactaatcatctatacaagttcctgaattcgtgtttttcacagaaagccttatcaactttagttactctaccaagacaatgtaattattgtttgattttataaagtctacaacaatgatctcctattttggtgtcagtttttcaataaagttttacttatgaaaaaaaaaaaanaaaaaaaaaaaaagtttcctcgtgccgaattct

SEQ ID NO: 219 - DNA, 462 bp, Rattus norvegicus
  Genbank Accession No. AA819517
  misc_feature (1)..(462): n = a or c or g or t
tttttttttttttttgtggcatctgggactcgctttattggacacatagctgtccaaaccttgctctgagggctggggcctgaggcccaggcaccaagtctctgaggaagcctagtagtcagggctgcttggatcgaggccacaggcggctggtgagtgagccaaagaagaggccctgcttgttggacttggagagctccgccaggcgctgctgctcctcctgttcaagccggctctgccgctgtttgaatgcctccaatgggtcatcctctagagcatagtgctccagcacagtccggacgtcctctacttggttcagcgcgatggtcttgaggaaggcagacaggtccagcaagacccggtcatctgagttgccatcccaaggccgcaaggcgacaccattgaagggctgtangcggaaagcttccttcttgcagtccacgactactactcgggctgggt

SEQ ID NO: 220 - DNA, 575 bp, Rattus norvegicus
  Genbank Accession No. AA819527
tttttttttttttttttggagttatttaatttaatttatttatgtaatacagtgtagaaagctatcatggcataagcaatgattctgtacaatcatcctgcagaaaattatttttggagaattcttggtaattggagaccagcagaacactccctccccccacccgtaaaagtgcttacgatgaacagggattttttttttaaatttttttttatcaaagatccaaagatacatggacaaaaaaaagttcaaatcctcaatgcctaatgtgtgcacataaaacaggcacaaagaaatcaatgtgtatcctcgtattcctatatcgcaaagagagcagaagcagcaatctgtacagtaagatgcaatcatggaaaacgaacttttctaaatcatttggaatactcaaaaatgtccaaaatgcatagtgatcaggaaaagaatacttaagagaggagaagcagctaaacgcccacgttcacacgaagcatcccccatcgattttttttaagcgtatttcaagtatgagtttttcgggccacataccacaagaataatatacaacgggctaaggggct

SEQ ID NO: 221 - DNA, 549 bp, Rattus norvegicus
  Genbank Accession No. AA819547
tttttttttttttttttaaagggttcaccagtgcaactttatcacgaccatcaaataatgggtttatttgtactctaagataattaaatattaacatgcaccttcccatcaggtgacctcatgggtcatggccaatatagaacttggacaagaaatcttttggccttggtgtttctgtttcatggaagaaccgcataatgtgtgtccgctgcttccacactttaatggtttcctggagctccatctttcccttaatgaccaggaggtcaaccactctggggtcggtgacatgggcattcttcatgaacatttctcggactttatcccgtccttgtttcaccgtgatatccagctgcattaagtgcacagtgtttggcacctcccggtaccaagcgcggtagagctcgcgcaccctccgcttggcctctttcaggtcccgactgaaaatgggcttcaccgaggtactggctgcagaagcagcctggcgcaggccgctggccgcggccgctagagtttttttttttttttttgtgttgttttttttttttt

SEQ ID NO: 222 - DNA, 513 bp, Rattus norvegicus
  Genbank Accession No. AA819623
tttttttttttttttttggaaataaacacaacacttcctttattatataagtttggcaaacagcacaaaaatccagcaacattttaaacatgtaaaaaagtcaaatgtcaaacagtactgagtatagtttgaaacattagaaagaatgagtgcagagttaggattctgaagctagcagagcaaggcttggtttctgaacatgtacatgaaacacacattaaaacacaacaacataatttatctttacaaaacccacagccaggcaataggaacataccatgcttaaccaacgccgctctgctctgtaggcttttatgtatcaggcagcaactgagtttcttgtacttgtgcttcgtttggggcgctttgcctgaagagaagtcacttcacaggattacatcttgctgaagcattccttagcattggtccaaacctgaattccctttttgcacatgctgatctgcatgacagcaatagctgatgagggcttcctttaggtcccggttcctttgt

SEQ ID NO: 223 - DNA, 612 bp, Rattus norvegicus
  Genbank Accession No. AA819640
tttttttttttttttttcctggaaatgtaaattgttttaatatttttaaaagcacacagaaatcttgatttattaaaaaaataaatatacaacacgacacatttattcatgatcctggggctcttaagaggtcaaactaatggatgtgtcaaaacaaaaacacaaaacacatgatgtgttctatactgaagcactttccagttgtaagacacatctcttcaaggctcagaagaaacgagaaccagtctcctgctgcagaaagcatttccaggctcggcactgaggctgagaacaagccatagggccttttctcagtcagccccaatctctgaagctgaggcaggaaggcatgatgctcccaagcaggtgcagaatgattaggtggctcaaggctctcccaagaatctccaatcctagcccataaagcacaggactgttttgtcctctcttgcggctctgacctatgtctgagaacaggaggctgagaatgtacacatgtcaaatattgtcactctaacactgaatggacaacctgattctgccaggagcataaggtgtcatgactgccttcaacaggtttcacgagtggtcagtcttgttggggaagactgc

SEQ ID NO: 224 - DNA, 585 bp, Rattus norvegicus
  Genbank Accession No. AA819643
tttttttttttttttttactactgagatgtcagagtgataaagactgaccgtcatttttaaaagaactatgaagttatctgatgtggtatgatgcaaattcctgattcaaaaagctatttaaagatagataaacttgccttttgtaatgaaaaatttggtctaacagtctcatttgcttcttggtaaatagaaaatatactatttttggtgaggagaaacctttcaaggcaatgttacctttttttcaagagcttaatattttctagggtgaatcagatcaatgattttgttaattacaacataaatacaataaatgaataaataattattagataaattacacataatttaaaatacttttaccaaaacaacatataatcaattaactatctatcttgctatatagtgttttttaatcttaaattaaaaaaaacttgtacaaaaaagtttggtttttttttttttgattaaaagcactgatgtgtcaatacatatgtatatatatgtaaacaacacatgtaattattccaggagaatatacttttaaatatttaaggcttccctgtccaatcaggttcaacagt

SEQ ID NO: 225 - DNA, 573 bp, Rattus norvegicus
  Genbank Accession No. AA819653
tttttttttttttttttacttctggttttgatcatttatttcagaaaattgaaatatactatactcgacattgttgggcgtcttcaggtcatcccgatgttctcagtttcccagatgctttgtgtgtctgccttgtgctattaattttcctgtggccttgttggtcagatccactgaggcaaatgccagcgttcttccttgcttcagaatatgtgctgtgatcactatttcttctccgatcttagcaggtgacatgtacgttatgttcatgtcaatactgactccgggtgcccctctttctgtgcacattagagccatggtggatatgctgtccacaagggttgccgtcaagccgccgtggagagtaccaaacttattagtgtgctgctcctccactttcatttcacagattagcttttcaggagcagcagagacaagtgtcaccttttccaaaactctatcaaaaccgggaactttgaacataaccttcattatttcccgtagattctgggtcatgttgctcatcgtggacgcaaagcaagagtctgggctctgcgagaatgaactttggaa

SEQ ID NO: 226 - DNA, 127 bp, Rattus norvegicus
  Genbank Accession No. AA819657
tttttttttttttttctgatccaaacacgctgctttattcatacccggtcaaactggtcagtgcagaacctggggcctactgaagggcctctatcaatgccttgccggccatccacatggggcccat

SEQ ID NO: 227 - DNA, 485 bp, Rattus norvegicus
  Genbank Accession No. AA819672
  misc_feature (1)..(485): n = a or c or g or t
tttttttttttttttttagacccatattaggtttatttaataacagagcactcgcttctttaaataaaatatctcaaagttctagctttgcctcaaacacaatgttgcacccaaacagaaaagcacaaatcaaaccaacagaaagatagttttttttaaaaaattatctccttaggcctctgtctttaacttccccttgttcctatttctatgagagagaccgtaacgcacaggctgaggagacacactgccaacaaggctaatgtgcaccagaccgaagagggacagctcggctttggccagccctcttcctgcaggataccaatcctatgtttgcgtcaatcctgacctgctcagatgaagcggcactcaggcactagtcagccgttgaccatacaagaacagagaacactggagtagacagagctttctccaggaatgctgacaggcgtcnctcccttttgagaagtcctttgctttcctga

SEQ ID NO: 228 - DNA, 554 bp, Rattus norvegicus
  Genbank Accession No. AA819679
  misc_feature (1)..(554): n = a or c or g or t
tttttttttttttttttactcagacaaaggtgatttatttgaatatccaaagcactttataaaattatatagaaaaatcaaaatcatcctgtcgtcctagtttgtgctatcacattttagaataacagacttgaaaaaagaatccttgttctatataaagtattcttgctgtcacctacagggaaggagataaaagatgtcaagtagaaaagacagtgaggaagttttagctggcatctgcccagctactggtgaaggcactagatgctagtgtgtggctggtgcctttagtgaccccatcaatctgaacagataacctgttactcaagtcactaatggtcgtcatttttgtcagttcacgcaaacccttctgcttgttaaaatgacgtggagactaaacagggctgccatttgagacccttccccaggactgcagcgaagaggccattcctggttctgacgagtagccctgtgaccacattggatgctgtgagaatgtcctatcctgtgtacaagtncacaagtacctgggcatcgcctgtacgccactaaaa

SEQ ID NO: 229 - DNA, 329 bp, Rattus norvegicus
  Genbank Accession No. AA819680
tttttttttttttttttccaaacaaatggccatttaatagaacaaggagccataagaacattgtcgtggcaagatatggcaattggtccgtccttggtccatcaccccacaatcaacacaactgagaagccccaggaagtcccggaatcctatgtggcacccagtacttattggccacccacctgtggggcaacagtgttcgcagattttataaccggctacaggtagaggtggctgtaggggataacaagcagccaacccctccacaaccctccccgaggctccaggtgatatcacaggtacagaaagcacgaagcctgagtgtggaa

SEQ ID NO: 230 - DNA, 456 bp, Rattus norvegicus
  Genbank Accession No. AA819681
tttttttttttttttttcaaggtgttacctgattcgtttattacagaaacagtgaaatacatggacctaaagtgtggcaacaggggtgagagaggccagggcagggcggctcagctggccagccccagccccaaactgacggaaaagccagcagtaggcgcatccctgaggtgcatacccacttcccccaccttgggagcctcaatctagaggactctagagagcatattttcctgagggcccttccgaagggggttgggggggtttcctggggaaggagcctagacccttgaagcagcactcctccacctgaactgctccctcttcaccatcctattgaggtggggaagagactggagccatggggaatgctgtgagggttgtagggacccagcagactggaagagggagttgaatgtcagctgcttgaagaaaggtccacggtgctggcactga

SEQ ID NO: 231 - DNA, 372 bp, Rattus norvegicus
  Genbank Accession No. AA819749
tttttttttttttttgtctttattctgatgtttatttgtgaacatcatagccttgcctttaggtcaccaggagcctccaagctctctatgctgtcagcatgtgtgctgtagtgtgcgggtgagagtcttcttcagagttgagatgttctcactgcagacttccacattattcagagtcaccaggaaggacagcttggcttcatcagtgctctcgatgcctttggtgtcaaacttgccttgctggaggctgctgtgcatgatgttcacggcactcgtcaccccacgctggatgtcctgtaaggtggtggctgggaagcccattcttagcttattacatagaacatccctgaagtcagcttccagctctctggt

SEQ ID NO: 232 - DNA, 463 bp, Rattus norvegicus
  Genbank Accession No. AA819767
tttttttttttttttttgagcttaatgaaatttttattttgaaaatatggcaagagtctaaggcacttcaaacatttaaatacatatacaggacccaagtaaatgccgcggcacggtagaaatacatggagaactacactctgcctccctagacgcaaatctggaacccagtcctctaacccaattcaaacctttgtcaccagacacagacacggttgggcagttgcttaaaccgttacgttacacgtagctctttatgactgtactgtggaatataaaagctgaaaatactgttgtcgatttcatatagaagtcttttatataaaaaaaggcgtataatacatccacctagataaaccaactgaaaatatttcttgtaagtttaaatggtttgagagttccactcttctattgttaatcgggaaattatcagcctgggggtgccaagctgctgctgatcaaa

SEQ ID NO: 233 - DNA, 145 bp, Rattus norvegicus
  Genbank Accession No. AA819776
tttttttttttttttttctcttccttttcttcagcctgatcaacattgacttccttgtcacgttccttctccacacatagagtcatggggtagccaataaactgggaatgtttcttcacaatttcttttattctcggttcctcca

SEQ ID NO: 234 - DNA, 615 bp, Rattus norvegicus
  Genbank Accession No. AA819812
tttttttttttttttttgcatgttaaaaaacatgtttattttacagtatgtacaatcaggaacgtatttaaaaccattatcagttaaaataaatgaagcataaaccacaatttagcttgttcttagtgtatacatactcacatcaaaatataaagaacacatgaacgtataccagagtcagaggcgtgcgcttcgctacaccttgccatcgatcttggtaagacagatacactccattggaaaaacccatcaataatgattttaaccaaactaacttcctgtgatctgtagtaaccattatgatgtctgtatgaggtagtaactaaattattttggccatgtattaatactctaaataaaaagaaatatggaagtcataataaaataaggccaacagaagtaaaagtccatgaaaaacgcgaccatgtcactgtggaatgtgacggctcttcagtgtgactgaaatgtctagtgtggagtcctcagcagtgccagtctctcctgtgcacactgtcgccctggcgacagctgcagtgttctaccacggtaccgccattctgtgatttacgttttgcaaaggtgtgtcctaagcacagacaagctatcgcacacgat

SEQ ID NO: 235 - DNA, 413 bp, Rattus norvegicus
  Genbank Accession No. AA819853
tttttttttttttttttagtttacattctttattttcaaaattcgtgtcctacatctcccgaaccccgcgccacgcccctagctgtcccggatcctggggtcccaggcttcttgactcgccagacatcatgattcacacattcgcaccgtcagtagatcctccaggaatgcagttggctgtcaccccaccatcaccgccccgaagaaggtcttccctctcctgtagtccaccatgtcgggatgactgatgttgacgtatatcctctcgccgctccggagctgcgccaggccgccgaaccccacgctcgtgtaccacaaagacccgtacccgatgggatccacaacaggggtcacggtctccgcgccctccagcagcagctcgggggagccccgcccataggcgccccccgcgc

SEQ ID NO: 236 - DNA, 510 bp, Rattus norvegicus
  Genbank Accession No. AA819870
ttttttttttttttttcgagattggctgtctttattactgaagaacactctgtgcttaccaagggatgaacagcttcttatcaatttactgcttcataattcaacacctactatgtgcctttgtcactacatggtgacccatggtgaccaagaaagtttctggctcccggaccatgggacggtaacaaaagtgcagtgagcaaagggagtttcaccatgcaaggacttagggttttgctccacccactgtttactggaattaacatgcactgaagaaactaaagcctttaaagggcagagtggcattgctttttgttgtggtagccctgggtgggagctggtgtgctaaagcctggctaagtgtgagagggttagagccctgctgatcacctgccggctgtgttccctccctttaacagttgagtgtttctgaagcaggacctgagcaggggctgcctcctctctgaggtgccgggttgttgcactgcctttgtcttgttttgcgtcctc

SEQ ID NO: 237 - DNA, 632 bp, Rattus norvegicus
  Genbank Accession No. AA819905
tttttttttttttttttcacttgagaataacacactttatttaactcaatcacaatacagttagttcaaggaagccaaacacttgcccagtaaccaacactacaagcctcagtaaatgccaataaggatccacacgtgtgactatcaattatacagaaccaagtttacatttctccagcttgaatttcttgattagattaaaccatttgcaatcctgcactgccgcagcacctcattgaagccctcacagagcttgacatcgctctggttctgagcacactccagaaactgcttgatctctagagagcaaggtccaaaagactgctggttctgcagcggggctccctgaggctcctggtaagtgatgtcaggcctcgcaggctcagcattagcccctccgctgaagcccccagtgatggcgtgacccagggtgtgccccaccgcagaacccacagccacaccggctgcagtggtagccatctgggccatcaggcctggctgccgaggggcagcagcaggtgagccgactgcagatggggcggcagctgtggctggaggctgagctgctggtgctcttctgggagcagccctcatctgaggggcccggctggccggaggagtcacccgggaag

SEQ ID NO: 238 - DNA, 447 bp, Rattus norvegicus
  Genbank Accession No. AA848218
  misc_feature (1)..(447): n = a or c or g or t
tctcagctactgtatgcgaagtctgattatattggtgcgtttttacagttagggttttgcaataacttctatattttaatagaaacgaattcctaaaatccctcctctccccaatttcaggaatttaaaattaagtagaacaaaacaaaaacccagcgcacctattacagctgtcatccaccgtcatgggaatcagttttcattaaacttgaagcagttgtggcatcatcggcagtgttttggttcagacacctattcacagaaaagcatgatgggaaaatatttcctgacttgagtgttcctttttaaatgtgaatttttatttcgttttaattattttaaaatatttaagccttcttcttgatcttaaagatcgtgtagcttggggttggggacggatgaanggcgagtgagtctaaggataatgaaataatcagtgactgaaac

SEQ ID NO: 239 - DNA, 412 bp, Rattus norvegicus
  Genbank Accession No. AA848238
gttcctagtcgtgggtgtgctgggtggagtgtgtgaaacacgacgtcatcaaaggagacagacagtattttgactaatatgaagtagagattaatttacactacattgtacatggagtaattcaactgaataaaagtgtcacgggtaaagctttttaacggttaatttctgtcaaacagtagatgacaaatggccgatcttatcagtgtctctcttgagccccccttccccctgctgtccctccccagatggggcgttgagtccatatttaaactggccatcctcacagttgctaacttagcaagtgcttttctttaggacccccttcttaacgagcaatatgtctgacctgtactataagatctttctgataatgcattcggagatttttttggtagatagtagaagtgcg

SEQ ID NO: 240 - DNA, 672 bp, Rattus norvegicus
  Genbank Accession No. AA848306
ggttacaaaagtatttattttataaaacttgtatttaaaatagagcttatctgtctactcacaaatcctaatttaaaacataacacattatccttagctaatctgatgttaacctttacaatcaacactcatttttgtaattttattaagaacctgtactaaatgaagtttttaatcagaaaacattcccttttatcttaaaagtgcttcttaaatgaaggcaccaacaagaactactttcagatggtacagaatttcttatttcttgaagactctgtggttgaccacttcttcattagttacctgcagcaagacaccttcctgccaaaggaaaaaaaaagtatctgaagaagtttatcatgtttgtccaaagaacctaagtaacttcagtggtggttttaggattaaagcagactcactgatgtgtatacgccctgaatatcacatttctggaaaggcagtaaagcctagaaatcagagggcgggcggttttaggaaatttcaatagccaacctacaacattttagggcaggataatgggcaaaaattactaccacattttaacccaattatttagtcagggtacataaagggttttgttgctgctgttgcacagaaatttctactgtccttaacctatcagactcatccctgacaagcaggtaaaggtgg

SEQ ID NO: 241 - DNA, 622 bp, Rattus norvegicus
  Genbank Accession No. AA848309
caggaaatcatatatttatacagagtcatggcttaaaatatattataaaataaaactattgtatacctgagtttgactaattctaaagtaggaaatttttattgattgaaaccaatgaacatattcataaaagaatgcaaaccttttctgatttacaatgtgagattcccatgtcatactcattacaggtaaagtgttcattcacgatctgaagcactgagaagtgcagcattattaatttgcagcggtatatataaacctagatgatttttaagtcattaaagtcagaaacattcagggggtgggacaagaggaacacagtggaattaactcctagcagtattgaagcattttagatttctttcctgcatggcacatcaagcaaaatcaagtggtaggatgaatgccaaaacatttgatggcttgtggctgcttccctaattcattactgtaatgggtaaggttccatattctactggggcaaacatcatcgtaccttctgcctccagatctgcagtgatccctgaaagcaggactgaggggaagcaacaaggcagcaatctgacagaaaaccagtgtggcattcacttcttacttctttctaacagttttctcaacgctt

SEQ ID NO: 242 - DNA, 675 bp, Rattus norvegicus
  Genbank Accession No. AA848315
  misc_feature (1)..(675): n = a or c or g or t
tgaaaaattcaaggcatatactggatctgttttcagaagagccgtttctcatacgaatggaggccgtgaacgccaccttccacctgagctgaggacgttctcttctcaaatttaagttcccccgagtacatcatggctctgacttgggttaagctcttggcaccaatgtcctgacaggaatgctggatgccagcaatcaaataagggacaaacttgtggatagaccctttgtcctgcactgcccctgaaactccttgggccactttgatcttgtcagcttcactgaaatatcggttctggctgctgaggtgtttgtccatggcatcaagagagcccataccacgatacttcttcagccggatcccatcggagaagaagtactcaccaggggcctcagtggtggcagccaagagggagcccatcatgactgtagaggccccaagagccaaagctttggcaatatgacccacattctggattcctccatcagcaataacagggacaccgaagcgacgggcatactcagagaccttgtatactgctgttgcttggggtcgcccacaggccaacacttcctgngtgatgcagatggaaccacttcccatgccgactcgcagagcgtccacacctgcgtcgatgaggttcttggcttgagcagcagtgactacattgcct

SEQ ID NO: 243 - DNA, 586 bp, Rattus norvegicus
  Genbank Accession No. AA848378
gacgtcagtgtcttttgtagccaagattgaccaagagaggtggcaaagaagtatacagtttttgagaattgtcctgaaatactgtaatgggaacctttaatatgaaaatggcttccttttgactttgggatgtttcctgtggatgatgtgggtatgtgtgtacatatatatacatacttttttaaatataggctaacaagagtcatgtctttcacttttaagttcagggagcagtttgttctaaccacacagacattctcagtgtggtatttcatggagctttagagacaaactggtatctcattatgtaatgaaatataaacataccatcatgttattttaatgtcttcaaatacatgatctgaggggggtgtgtcacacacttgtgtaccaactcttagttgtgccttgaacatttgcattgactacctgcaaacaattactaggttaactagaattgctatgcagttctatcttgcaagtgctacacagtaactgcagtttaaagtatatttgcacattttacatgctatgctatatgattgcctttgggttttctgtacagattatttttgttgatattcaa

SEQ ID NO: 244 - DNA, 574 bp, Rattus norvegicus
  Genbank Accession No. AA848389
  misc_feature (1)..(574): n = a or c or g or t
tctcgctgcccttggttattctaaggatgacattccttcactggtgaaaggaacactgccccaggaaagggtcacgaagcttgcgccgcgtgcccagtcagaggaagatttgtctgctttgttcgaagcatcaatgaaactgtactaattaacagattaatgaaaagaatcgccatcggcccttacaacggaagctatgagagcagaagttggtcagggctggcctttgccgtcttatctccacacttaattccactgttactggcttgaatgtgacgtgattttatccttcgggggattcctttgtgctcattatgtaagaccccaggagtcagtgtccctgcaccaaaccccatcaaatacagaaatatgcctctgtccagacactgcttgtctagaaattcaccctgaagaaatactagcattagtatgcaaaaaacatgacaagggtgtatctgacagtatgggtagcaaaaattaaaacaatctgaatcttccttcctaaatgaatcctaatatagtcagtaatagaatactgtggtgttgttaataaagatgaagccaaactcttgan

SEQ ID NO: 245 - DNA, 558 bp, Rattus norvegicus
  Genbank Accession No. AA848407
gaaaaatataaatgctaaaatatctcatcttcttcatctcttaattccataaaagtcacaatagaaagcttcataaaactgtaaaatactatgttataggaattttagatttcatattggaaaaaaaattattagtaatatattgaaatgttttctgttctttatcattttgttccaccatgttgatcctacttcatttaaaataaaaagatgcatcatttctccaaagttaataaagacttaagagaataaaaataagactacctgaaagtgtgtactgattgtgaaacgtaatgtgtacggatatgttccagccgtgaacttggctgcaaggaggcgactctgcagtcgatgcacattgtaggcctgggacaaagttacttcaggttctaaggattcactgggtgactttagccctgagtttcagtatttgcctaggaaacagaattcaggattcttgtgtgtatccacagagcacaatgaaatgagccaggaataagatagatccaaatctctggtcgaaacacagcctgccccattcacatatattacagaagg

SEQ ID NO: 246 - DNA, 564 bp, Rattus norvegicus
  Genbank Accession No. AA848437
caaacaatagacatttatttttcacttctcaggaggttgaaagcccaaactgctatcaggtttggtttcccagtgcctctccttggctggttggcagctgccttccggctgccatcctctctcggggtgtgaacaaaccctcggggcatcttccgtgtcctttaagtcagatagaagtatgagcctgccctaagaacctcattcgacctcaatcacacccttaaagtactatctccaaaaacacttacttagcatttggggcttccacacctgaactttagaatccagcccatagcaaggaccccacattgtctttctgccatccctctacttgctacgcaccatgattctcagacaggaatgctgtaaacccgatcccatagtttgtaaatatctgttaaatgactagatccatttaagtcgagctttgggcttcagagtagtaagagcctttggcctacacagaatgcaaagtctggaagagaaacaccattttccagctctgaggtctcccatcttctcattgatagttacttggatacggagaatctcccagagtctgag

SEQ ID NO: 247 - DNA, 501 bp, Rattus norvegicus
  Genbank Accession No. AA848496
ggatagaggtttgatttgctcttgaatgttccagggtggagacaaggagaaagcacaggtgtggaggtctactcagtgcagtcgtctccctcatcctcatcctcaccgtccacagacagagcagcgtacttgcttgcagaactgaacttagaggctcggttctcctcagatttctttggctcaggtgcagatctggagtcttgatcttttttgccgtccttcctatccaactccttccagtggtctctgctccctccatccccaggaccacggctggagtgtccagtctggcctttggtggtgctcaccccatccactttagtttcatctttccttgatggtccttcctcagagggctgagctggagcaactttccctccaccacttgtaggggacggctgctctgtgtctgagctctgagatcgagcaggagggttagagcttcgcttcacccacgcattctcctttggtggaggggctggcattacctttagaggctgg

SEQ ID NO: 248 - DNA, 565 bp, Rattus norvegicus
  Genbank Accession No. AA848545
aacagatgtaaactatttattgaatatttgccaccaaatattgttaaatacattatcttgcagcatatcgctttcaagttaaaatgtcagaaacaaacaccaatatttacatttcttgtaaggaatgttatataatgacacattaaggcgtaaattcttttggcttataattcttaaaagaatgataatagcaaaagtgatgcaaaatcttcagtgtgaggttatgattaagctacattttacaaaaatacggtgtaagatggcgataatcccattcaacatcctggattagacccctcaggagggctggtaatttatacagtcagactttaaatttacagataagtgcagtttaatactgccactgagaagtacatctctgaacatatacagcttcaggccacagttttgaaggtctgaagtatcaagttggtttgatgaattagccggttggcacttatgaacacatttattgccttgccatctttaaaatatgtcttcagagtgtcactgaaacttttggagtattttacaaattctttcttttggtttcaagtgccctgcg

SEQ ID NO: 249 - DNA, 437 bp, Rattus norvegicus
  Genbank Accession No. AA848597
caataccacagatacttttattacttcttggaattcacatcccaagcccatcttcccattgtccgatcatctaccaacccaacaagtcaaactctcagcggtctgctcggggaaaactacagctcccaaaatgctctacacccaggcgggctcccttaaaaaccggtgcaatttcaagttgcgcgcgtttctttgtcattggttttcaaggtgtcgcagccaccggcggtccatggcgatgattggctggcagctcctgctgctcaagatcccagaggaggcgacggagcctgcgtagttctcggtgtaatgcatcatctgtcactgggcccgtgaggcgcaggcgtgagctacccaggggtaggatgagaggaggatgcaaggaaaaactttcaaagatacccctgtgtccacagcatctcgctctgcaagtggtg

SEQ ID NO: 250 - DNA, 416 bp, Rattus norvegicus
  Genbank Accession No. AA848646
gaggcagagaactcctttattgccacaggaagcaagtgcactcatctcttcaacagttttaagaatcacaaaaatgcagaattcacacaataaagaataacacagacttagggagaaatggtcccttgggttatattggctgtaatactgaggtaaccaattgaccttgttcagtggaaatatcttaaacaaaattaaaaataaaaacccaactagttataacatctaatttatatttaccaaataaaaatatatattatttgctttaatgtatagcaagtttaatacattagtgttcacaagataaaaactgtattctactgaaaatttgtgtgtgtgtgtgtgtgtgtgtgtgtgtgtgtgtgtgtgtacgcgtgcgcgctctacatgagtgtgcgtgcacacttctttatctc

SEQ ID NO: 251 - DNA, 546 bp, Rattus norvegicus
  Genbank Accession No. AA848776
aatataaagatatattccataaaagagtttggcaggtcaaaaagaagcttcacacttcataaaagacaagcattcttcttcctctagtctatagagaattatttaaaaaattataacatcatcatcagcatcatcatcatcatcatgaacacacacccaccagtgtcaccagtatacaccacaccagaatgtacactgcggtaagtaactgaaggcagcactcaatccctgaacggtaaggacagatagaagctataaagaagcattagaaagtagcccagcccgaagtgggcagacacccagcatgcctcagggtatctagtacgtaagacggacaccattttccagagcggcctcagaacagtgctgacagtacgcatggcgtgtgggcggggtcaccatggaagttagataggacgcgctgagcttccacacagcatctgctgcctgtgcttgtcggggcctggctgcaggagtgctgccctccagggacagcacactttgggccactggttgtttgtggtcatgggaggagcccagtttcca

SEQ ID NO: 252 - DNA, 595 bp, Rattus norvegicus
  Genbank Accession No. AA848826
agatacataaatgtttattcacagaaaatgcctgttaatggctttaatattgaacatggttatcagagttcacaaaaaaagcataaagtgcaaaagatctgtaaatcccccagagcaatgactaatgttacctcagccagggtacatgccacctgtacatagcacactctacataaagtataaaatggcatatatctgaaaatactctatttgcttggttgaattattgtagttataaaatagttttaaatctgacttgtgtaggaaaagacacacgccatgttttttaaagtctgtgggagaataatgtctataaaatctattgagaatcccaatctggtcaaagatgtgtcattgggcagtgggaccaacagcacccaggtcaagccctggttgggaagaatccaagtttggctggaggaaggagctgggggaggccctagttaggtgtccccagagaccgttagtggtcagacctgaaggaagaagagaggcaggatttgaaggttcaaatcccagtggatctgggaggcggttaggagaagaggattcgtgagggaagtttcagacacctgagaagtccaaccaatagaat

SEQ ID NO: 253 - DNA, 659 bp, Rattus norvegicus
  Genbank Accession No. AA848828
agcttttaaatttcttttgtttaataatagaaaacaaaaagtaaaaccttctataatttataagctattttctgctatctacattatatataaaatatagactcttttactttataacacacatcttttccctttgataaataactttaaaatatctagtatacatgccttgacttttttttatatataagtttggttttatacatatacatacatatatacccatgtttgtaaaacaataaatatacactagacaaggacaaccaaaccaatgcaattttggctttaaaaaaggaaatgagaacaaatgacagactataaaagcaccaggcagcaaacaaagccataattgctagaaagttccccctcccctaaaccagagacagggcacagggtaaaggaacagatcaggtcgtaggcatttgcttcttcacctgggacatcaagcacactacaaataagccactgaatttcttagaagctgtggggctcattaaacagcctagcccttgtggtggctgcgggggacagcagagagctggacagggcgcaggagacaacagtgacatacatggtggactccatggccatgatgatttctggctctactggctcaagcaaagtttggttgctgcactaagcatcaagcatctcagcta

SEQ ID NO: 254 - DNA, 413 bp, Rattus norvegicus
  Genbank Accession No. AA848902
acccctggctatcctagaactctccttgtagaccaggctggcgcctaacttacagagctatgcctgcctctacctcctgaatgctggaattaaagacacgtgcgaccacgcccagcccgtgaccctatgttttaatcacagctatctggcaagggtgtaactgataaaataatacagtatggtggaaatataacaggtggactttacaaggaaggacatagtgtatttgtaatatcttcatactgaatcaggaaaaggccgtcatgtaaagcacagttctttgaagctgaagcaacactgagttagctgggtgagcaggcgacacacgagcaaactggagagaagagttgactctaacagtgcagtgtcagctctcgggagaaggagacacaagcaacatgcaagtatcatga

SEQ ID NO: 255 - DNA, 411 bp, Rattus norvegicus
  Genbank Accession No. AA848904
atcaacttttatcagtccatgcaacttcaatgccctcgatgaagaatgcataataagccatacttctttttttcttaaaagaaaaaaaagacttccttctgcaaagagatatatttgccacatcagtccctgtagcacagttttcaaaaccatctgtcaaaaatacagtaatacaagactggctttagtgtcactagcttacactgcttttcatgtgtttaggccaccttttgttactggtactgtatcatgcattaaaggttatcaaaggcttaatctaaggtccccgtaggctaatgccactgaagcgctttcacaatctcaacatacatttgaattgcaacacacagatatttctaaagagtattaactactgaacccttttatcattagaaaaaaactcgtgccgaa

SEQ ID NO: 256 - DNA, 582 bp, Rattus norvegicus
  Genbank Accession No. AA848948
  misc_feature (1)..(582): n = a or c or g or t
caaacaaatactttttataagaaaaattccctttaaatatttatatacatgttaccacgtaatactgttaatcaaacccatggtttatttgtttaaataagattaaataaattgcctagatcttttaaatcaaaccttagtatggtataatggatatatgggttccttagacaacaataagaagcatgtgttcttgtctctagatcaaggagagctttatcaagtggtaagcgctgtgtgatggtgcagaagtctaagttttgaaaacaaactcattcagaagatctgctgctcaaatagtattttttcaaaaccaggtggaggagtatgataaaattcactgaactggcaatccaaaattgcactgtcgtcaacatacacgactggatacacggtccctcgtatacctgatgctggacaatgcatgtttttcccattcaaatatacatttaattctacatggtcatatgttatacccactacatctccctcctgaggaaggctgtttgctggcagcctgtttttctcttcgttgttgtggtacaaggctccatcatttctcatcnacaggctatgcatgtc

SEQ ID NO: 257 - DNA, 338 bp, Rattus norvegicus
  Genbank Accession No. AA848963
taggttctataaaaggactctttcctgagtagtacatacagcagcttagaaaatgtatcaccagtacaaagtaaatgtatccagaattgaataaaatgtagccaaaaactaataatcttttatgaacattttcataattctctatttgttttctttttttcattcttgatttttagctttgttctagtcttctgtcagtataaaatcccaaaagtgccttgacaagagatgacctgtgttctctgacaaaagagcagcaggcagtacaggaaacctgactcaggaaggcaggcctgaaaagcaaatgccctgggtctgaaagagagaggagagcaagc

SEQ ID NO: 258 - DNA, 444 bp, Rattus norvegicus
  Genbank Accession No. AA848979
agagttcaggacatttatttcacatcacacagctgtacatttttctataaataatgtggagctgaaatatttacattctccccctgtccagtccttagcactgaagccaggagactctgcctgcagacaggcatgtgtgttgggctcagccccgccctgacccacctagctccagctcttaggcagagcggctggtgctgtctaggaaaccatcacctcactcctctgtcctctcatgccacaggccaggaggaccaccgcataaatcccagcccagcacacgcagtcattcaggatcccccacgggtgcgacaggcagcagcatgagctgcagccacaatttaggagctgaggaagcaaagaggttgccacttactgagcttcctttgaatcctccctcctcctcccgggccctcagccaggaaggctgtctccaagtgtctc

SEQ ID NO: 259 - DNA, 419 bp, Rattus norvegicus
  Genbank Accession No. AA848990
agagatgaatgtcatttattatgaaaactgctgttacattatagccaacattccaaaacagtatgttaacaaatgcttgtcttgattataaagtagctcggaaatcatgatccttttcaaaagtagttcccacctgctgagcatttcacatgagtcaggacactgctcatctagagtccagcagatgagacacaagagcacctgtgacatctacacagctatgagtgttactgctacaacgtaaaccaacaacccacaagaggatgtttgtaaaaaagcaaatcgtggctatgctgtgtgtcaatacttttgaggtgggagaatcccaagtgcttctgtccttccttcccctctgagttcagtgagaggcagagggagggaggacacgaacactgggctgaggagcactgcagctccct

SEQ ID NO: 260 - DNA, 657 bp, Rattus norvegicus
  Genbank Accession No. AA849028
aaccgttaagccatctctttaattccccgtgtctactttttaagaaaaatgttctatatgaaccaaaaagacatacatagtaatttacccttcaagggtaaatgatcaaaaaagaacattttaatgttcaaatatacaaagcacaataaatacagttacctattgtgtaacacagttcaagctgaatagacagtggatataaatagacggtaaaacatcttgggttatgagaatgaatgccttttgccctgtaactcttgaaaagtagtcagattatagggagcaagatagcaactagcagtttcatcactatggggttttcagagtattttataaagggtaagaatcggtttctattttctgtctttaatcttgcatgctttgacagttgttaggcaactgaagttgaattagacgtgtatttttgtttttttgaaacagagtttcttttgtgtagccctgcctgtcttggaactaactttataggccagggtgtcctagaactcacagatatacctataagaagcttcttgttaagtaagattctccagatttgcctgaaactcactcactccttatccaaagttgacctctaaattctcctatcttaccttctagagaactagaattacaatgtatgtggcaacatgccttgtc

SEQ ID NO: 261 - DNA, 554 bp, Rattus norvegicus
  Genbank Accession No. AA849030
aaaggaaaaaaataacagtcaaactttattccaaggtctgcaaacattcagactaatcaaagtggtactgtaatttcttataatacatcaataatacagtttttgaagtctagagaattaactaagccctaaaccacatgccatataattccaaagtaacaactgttaacaatgtgacattagccatgaacattacttaatgaggacataattaacaagctattcttacttaaggcttccttttagtatggaatttccaacatcaaaaattctattttgaaggctaaggaggttgctcagtcatagaacacattcacagggctgccccagcaaatctctcgccattcaacaactaattcaacgcactgatgagcccaaagcaattggtcgcccaatgtcaaccttctgccagcataggcaactcaagccaattcagtgagaaaccaggagatataaagatacgcggctaaaactttctccacttctgaagctgcaaaggctttagatgagtattaaattatatttaagtacttggtcatagagaactatttttc

SEQ ID NO: 262 - DNA, 323 bp, Rattus norvegicus
  Genbank Accession No. AA849210
attgaaagaaacttttacatcttttcttccaaaataaaagtaacaagtgactgtgactctgaagccgaggccagagcagaagacagaggtctcactttgaattttctttttttttctttaactttttttttctttttttgcacagggcatggcttgaattaggtttatttttcttaactttaaatatatatatggaaatatatattaaaatgttctctaagtattttctgcttcttgcaggtctctttttactagatcatggccactcttcccagctcagccctctgagagcaaacatgtgttgtcctttctaccacccagag

SEQ ID NO: 263 - DNA, 401 bp, Rattus norvegicus
  Genbank Accession No. AA849222
gtgtgatctgcctggaggagctgcttcagggggacacgatagccaggctgccttgcctgtgcatctatcacaaaagcttcatagactcatggtttgaagtgaacagatcttgtccagaacaccctgctgattgacccttctgggcctgcttacggactcctctcaaagggacagccagcccctgttcctgggaggaggctcctcggacactggacagagctgagcttgggacaccagagagaacagggcacccttctgcactggcttccagaaaacggtcctccccgaggacacccagtggatgagagcgagtctgagagaagaatgaattgacctctatccttcccctcaccctcgacccaggagggaaagggcattttctttttcacctttgaaaggcg

SEQ ID NO: 264 - DNA, 317 bp, Rattus norvegicus
  Genbank Accession No. AA849354
acagagcctgggaagagacccggcatccaccaaaacaagtgatttattaggaccgcctgccctgggagctgctgagcaccccctactgtggccaaggtcctacagagagttcatctcgctgatgggtgacaactctggccggcccagcactcactgctgggtctgggtccctgagccctcaggtcttgagatgcagtctgaacagatgggaaaggtcacttggccagctcctcagccactgcttttcgcatcttgtccttgaggtaggcggttttctgccattcagacttcaaatccagccactcataatatgggac

SEQ ID NO: 265 - DNA, 268 bp, Rattus norvegicus
  Genbank Accession No. AA849365
aatatacaaaagtggtccattcttcagaccgtgaaaatggcaagtcccggccagatctagggtgggggatgggggtgcccagctgcccccagtcgcctgtcctccgtgcgatgtctttgtctggatcttgatccctgagggaggcttgaggttctgaacatggatggcagatcacaaccacagttctgggctcatctggaccaccagtccttgggcctcaaaagttgaactcctggaccctcaagtcccaacgactttccctttgggt

SEQ ID NO: 266 - DNA, 395 bp, Rattus norvegicus
  Genbank Accession No. AA849426
ggcagtccccagcacacttctttattgaatgcaaaggtatgaacgtgtaattacaagacatacaaacaaagagcctatgctgatcccctggggtggggtagtaactacctttcctgggacatgctaaaggcctgctgctcatccagttgtcggccctgcttttaacagggtctgttgtccatggcaaagcagctgcctttttgtctgcactggacagcagcagcagcagcagagtctgcagtgctctcttcccagtcatggaggctgtgggtccctgtccctgcccacatcctgcctctgcttggctgagcctgaaggagggcacgacaccagttagcccggcccaagcctcatctactgcagcccagacttcatcctgcagtaactactgtacg

SEQ ID NO: 267 - DNA, 535 bp, Rattus norvegicus
  Genbank Accession No. AA849497
  misc_feature (1)..(535): n = a or c or g or t
gagttcataaactttattcctacaacagtgggtctttagcacaaaaagtacaagaaaagagagtttcgcctacaagtgcctctcatgggcagggttctgttcctggtgcagactaggaatgttaactcccttggttctaggaccagcatatcttaatctttcaacgaagcagatgatatggaagtcctctggagactgaagccacttgcctagtctcttgagcaaatgaacagacactgctatcatttgacaaggaattcagactcagaacagagacaacaaagtattttaaaaaataattattcatagacttgctaactgtcacttataaaggctagtgcaggcccanagtaagaactggtgctttctgagaaagctgaaaaaggattagaggtgccgcctgcttctaggtacgccctcacttacactctgcatagctaactctggttaaggacatggtgttcaagtctctgttctgggcttggagatctctgtagcctaagagagtatcagtgcatggttgacctgagccctg

SEQ ID NO: 268 - DNA, 507 bp, Rattus norvegicus
  Genbank Accession No. AA849518
ggatttcacatttgctttcacttttattgttaggtacagctacgaaaccaagccacacgggctcggggctgtctgcccagttaggggagccacccagacagcaaggtccaggacggctcgctctcagatgtcttgctcgatcccagtctcgggtacgccttcccttctgcctcttcctggcccccacccttttcacttcgaggttttaccatcaagacacagtctggtaaggtctcaaagtgacccatcacaaaaccaaggcagctttaggctgtgaaagcatcggacctttggcaagggttgtcctccactctcgcctgctcactcgctgtcaggggcttctttacagatctgtcttttcttcgtaacgacaccaacacgcagcccgctggctgtccaggtatggcttgcagcctaaatggatgacgctgtcaaagaggagctccacggttgtctcgcatgcctggacgttctgagagagtccgagtgtcttctgcacgtctctgc

SEQ ID NO: 269 - DNA, 509 bp, Rattus norvegicus
  Genbank Accession No. AA849531
aaaacacaaataagtatttctctttcgttaatggcaaatggttcaaataatgttgaacacaaatcattgactaatacagggcattaaatatgaacagacttttttttttaaagcaaaagaatagaggttatatacaaaagagacctacaatctataggccaattcaaaaaaggaaatgtgtttataaatgtgtggtgaaaccagaaccttccacctctgctttggagaagggctatcatacaacattcagtcagctgaagatggattggtacaagtgtctatacagaaacttcaagtcatttgtgcatgtgcagaatcatccagatcttcccgactgaattggcagtcctgtggctttcttccttttccatattcccaacaaggctacatgaacttcaactcttggtgagccgcttacaacagcagttccttacgagccaacatgacaggtgattcaggacttccctacgagaaacaactggccaccacacaaagtatcacaatgaacg

SEQ ID NO: 270 - DNA, 504 bp, Rattus norvegicus
  Genbank Accession No. AA849619
ccatgtaccatgtatattcacaagtttttcctaattgcaggttaaacaaacatacacttaaacctgtatcagtgtaacaaagccaaagacgactaacttactatcaggaaatactgtcactgtgcagtacttgacagaggaaacactgccactgcacagctagcattttattcagatagcagtctcattacacatggtccaagataagaactcaaatcagaagttaaagattggtcttcaaacatcatagccaacaatgccacgtttgcctatgatctctccgatataaaaccacatccacacctcagtggccaccaaaccattcagcacagcttcctggaaaagaaaaagcacaaattttaaggtactttaaaaagcaaacaaaaacccaacacatatttgaaactgttctcaggattaacagagaatgtaaggatgatattaaaatcacagaacagttttagccaaagctaggaattactgatattcaatgtctaacttctg

SEQ ID NO: 271 - DNA, 666 bp, Rattus norvegicus
  Genbank Accession No. AA849729
accctaaatgctttattttccacgacttataaaccaaggcttatccagtcttaggtccctaaggggccagaggtcccaccatgcaaaacagcaaacagagccaagacttaaggaaaggctgttagtgtatgatgggcatttctggtttccatatccggggctcagctgtgtgaaaaaaggcagaagtttttagcccgtggtgtctgggctgaataaaggaatgtgagagatgaggacacttggagatgcagtaagaatcctatctttcctgggccttactggagccatgccacaggactgcatggaggctctctcagagagtcagccctcgttcctcgaacagctgttttagtgcctcttccagttgctggttcgttccttgaagcccttttaccacctgtgctgcccactcgaagtactcctggactcgatgttctgaccagcctttaggggtgcagcgattcaggtcccttagattgtgtagcttgtctgccagcttcactagtttggcccctgggctgctgtggggtgcctgttccacctgttgccgctttctttccagtttgggcagagtcttgtcatctgttacctcctccaccatgcgtcgaacctgtgctccaaagtgcagctctacctcatccaaggtagtatctgtgtcttctactg

SEQ ID NO: 272 - DNA, 592 bp, Rattus norvegicus
  Genbank Accession No. AA849743
cagcaaggggagcaggctagctccagaccaccccatcccatgtctcaaggaagggcatctagaaagggtatccagcacagagattccccgggaactcacaccggagcatctggagttgagccccaggaccaagagcaaatggtgggaggtaggcatcaagataatctttttctacacaagcatgtgagtggatctcgaccctctaagaacacctgtgccccaccgtcccccctcccctgcatgaggaagagtcccggtcttctagtccttgaggacagagctgtgacatttactgcaacctcacttttttcagaacagaggacaaggcacctcaaggtcaatcccccgccccaacagctgctcacaggttctcatgctgtctccctcctcctgagcagagaacctgagagaaccaggggagtgggcactagggtagggtgaagccagagaggctgttcctcacccagcattggtgggtagggtgcaagggcaagatggaaggagcccttggacaaagagaccagcacaagccagtgaagggcaggcagcagactgaattgggctcaaagcctgtggggtgggggggatgggc

SEQ ID NO: 273 - DNA, 582 bp, Rattus norvegicus
  Genbank Accession No. AA849796
gaaacaattcaataaaccatttatttgcaaataaataatgtatgtctaccacacctaaataaacatttaagaactagtaatactaggatataacctcagtattacattgtaaatggggaatcaaagtccagagttaggatgcccaggctgaggcgctgcctccgacttaactgctaaatcatgtggggagtgatctttgatactttaagtcaacttcaatacagaactatcctttggttactccatacagttagggaacttgttttctacacttaggcatgacccttcaattaaaatggaagattcttattatgaatcaagagactcatctacacggttggaggatccacttcatccatgctctgatttagtctttctgaatggactggtttctaacctagactaagtacaggcctgaaacttcaacagccatcaggaaccatggagcgggccatgaaggtgcttcgaagggccacagactttttcaacctgggacagactgcaacactcgtgccacaccccatatgacaaaaagctggaaaacaaggtgtgtgttttcacttatgtatcaccagatgcaac

SEQ ID NO: 274 - DNA, 612 bp, Rattus norvegicus
  Genbank Accession No. AA849797
gcgttaaagcctgagtgaacatttgactttacacatacttcaaatgaccatgcatcctggactccaggggtcactgacaggattccaaagcaacaaccagcagcaaaccaaagctgggtaagattttcaagtctgcaggaccacggtaatgctagtttcctgggactgagacctaagccacgaagagacacttgtccagtgaagtgtgtatgacatgaagagtggggaagggcttctcggacactaagaactttcttgtcagaaccatgggccctgtcacagagggaaggcttcgcttagcttagccccatttactgggggcttataatcttctctcaaattctagaatcctcataaaaactaaagtcttcttagaaaatataaaagcatatttaaataagatcctccaagggccatggccttcccagacattcacagttattaaggtaatgaatctatgtacagatgagacgtggacttcggtatgtttatgctcacccattcttccccgatacacactcacccctcactcactgagcattactacagagctattaaatagcaagccctgggctaggaaggcagagagaaacaatgaacacacagtctcca

SEQ ID NO: 275 - DNA, 423 bp, Rattus norvegicus
  Genbank Accession No. AA849805
aacattaggaataaatcactcattcaatgcaggtgtgtatggggagctgggagcttccatgtagatgagggaacgtgcaggaggaaggtggccagaggggatgtccccactgtccagactatagacagcaacatcaagagagtcacaaagtagccccctcgtgtctcctcccatcttgtccttccagaggagtctatgtggtgcctagaggcaccagggcatctggaagtgctgggctgggagtggagtgcagtgtgtggcctcaaagttgtgcagatgcttccgagccagaaacagcgccagttgcctccgtccatctacactcatgtcttcccccacactccaggggaaatcaggcccatgctctgcctggtaggagcgaagcacagacacacaccagtcctcatccacctcccagcgact

SEQ ID NO: 276 - DNA, 196 bp, Rattus norvegicus
  Genbank Accession No. AA849898
aaacaggcaaaagtgatttgatttattttgagccagggtttcagagttcaaagccccccaaccacatgtacccaagcaggacaccaaagcgaaaggaacaaaggggaaaaaccctcccccatttctggacacacggaaaccaaaggaggagcctggggacaaaacccattcgggggacaaggaggagcgccccccc

SEQ ID NO: 277 - DNA, 519 bp, Rattus norvegicus
  Genbank Accession No. AA850040
aagtacataaaggtttatttccacaggcctcaggtaatgggcagaagtcacaggacaatctctcttcctcttttcccacaaaaaaaaaaaaaaggttgcatattttggtcagtgtgtcctagagagaattctgggtttgcgataccaatgctgtgcaagactctggtgtaaaccaagccccaaacagctgcagtggaggtcttagccctatccaggtccctacgaggaggcctcagctgctgagcgtgacaagcaggaggagtggacacggtgacagtcatctggcaggaaggaggaccgccagactccttggaatgctgtgtttttcttccccccttttttctaagttgttcccccatgggaatcggggcgggggagggggttaagactttttgggaactgctactgtcctgcagctgcaagaggaatgcctgctgtgtgtggtacatgccgacccaggatggaatgcagaatgaaggatgcttctaggaaacaagtctgcttggaatgctgggtggc

SEQ ID NO: 278 - DNA, 412 bp, Rattus norvegicus
  Genbank Accession No. AA850055
aagctccagttgtttattacaaaataacgactccatatacaaaagacacctgaaaccccgtacagccacggtggcctgtacccccccagggcccctccctcaggcagaaggtctcagattcgaaggtctccagacaggagggcattgtaacgggcaggtgtgaggggcaagtaggcacctttgtcctggtccaaaacataaagggggtcggacaatgcactggggtcaaagccctcatttgccatcctaaccttctgctgtttgaaggtctcaatagtggccaaagactcctgcagcctgaggaatcgaggtcgggcatacggtggcaagttctcagaaacatgggtgtaaagctgtgaaagatccaaagcctgcgggggccgcagaccaagggcgccattcctgccctgcc

SEQ ID NO: 279 - DNA, 466 bp, Rattus norvegicus
  Genbank Accession No. AA850060
ggggttgcggctatttatagttgtgctacttgaatgatagtggtggctgggtggtcattgtttgcggggatttttattattattgaaatcactcgggattaagtgtgtgtaagataaaaattagtgaaatagtgatgagaaatgataggaaatatagtttgattagtcctttttggttggatattattttagatagttgggtttgggtgattgaggttgattttgggattgtcttttctagtcagattaggtctagtaggtttaaggataatttgtagctagaatttagagttttttgaggaataattcggtgtataattggtgggggtcagagtgtatatatcatgaagagaattgtataattgatcatgttacgaatagggctactgataggaataggattgagaaatagtcaattttgaaacttatagtaagtttaatagaattaatagttagtcaatgtcag

SEQ ID NO: 280 - DNA, 491 bp, Rattus norvegicus
  Genbank Accession No. AA850130
ggtgacctaaagcttttatttcactgatggtccagaggctggcggtcaatccctacagggccatctcagggcccacctctccttctccctggccttgggctacccgttgctccctcagttccctccgcttcttccttcggagcagtcgccgctcacgttcaaactccttcatgcgcttcacatagtcctggtgctcgcagtagtcccagtcatgctgctcatgcttgcaggccacgaagttgggaaagctgtcgcgtttgcacttcagcagccggatgaggtagtgcgcacagtagtcacgttgctgtagtgtcagctgggcatccatcatctcctgctgtgtggccaccatcactcgctccttgcgctccggaagaccgtagttcggcgggaagctgggcatcttctcagggtcaggctccaccgaggcatcccacagatagcgccgggtcatgtgcgcccccatggctactctgccctacctttcttta

SEQ ID NO: 281 - DNA, 551 bp, Rattus norvegicus
  Genbank Accession No. AA850136
tttttttttttttttttttttttttttttttttttccctgttataaagtgattttattaaattgatttaaacatactgtaggtcaaataatatttctgaagataacaattatggactttaaagcttgacataaaattagtagcttcaaaagtgttagttgtatcccccagcaacagcatgataaaataattcaactatgtagaaatatagaactctaggactagctggaagttgggaaatcatttagtccggtgtcctcattctgtgagaaaactagacctgaagattaagcaattttcccaagcttatatacctaatagtaataaagctagaaatcaaaccaattttccctaaactaaaattctattgatgatatttcaactggctctctatcaactaaatctatccaggcttttctctaatgctccactctgtggtgacacggggaagtgtaagacactacaggaaattgctgtggtggccgtgaggccaggaaggggctttgttagccaatagccctctgtggaaagggggaaggcagtgaccagtgg

SEQ ID NO: 282 - DNA, 419 bp, Rattus norvegicus
  Genbank Accession No. AA850195
cccaacacaaacgggctttatttcaaccagacaagtgagttcttccattagcatcagcttcttcaaggctcaagggtatggaaaagaagggcggtgctccacaaggtagagaggcgaagactgaccaaggagtaactctattgcctttcaaaaagcccttggaagggtaccctcaatccaaaagaccattagctctcctgttacagtttgtgtacaacaccctcatttgaaagtgacgcgtctatcttaacgaaaacatcccagaatgtccatagatgtgagtgtatcataaattatatctacgttttagaaatggaataaagtaccaatctcagtttaaatactaaaatagaaataaaaaacaaaaaaacaggctttaacgttattacttgggatgtctcgttacacccttcctaggt

SEQ ID NO: 283 - DNA, 511 bp, Rattus norvegicus
  Genbank Accession No. AA850247
gggaaaccagctcacgtttaattgtgattttaaaattgtacaagtttttttacatctgccctcccaccccatgtgtcgactcttaaaatgacagaaaaacatcaccaatcacaggttgaatggtttagtaagtttaccccttcagttcctatatgaagcacccagtattccttaaaacacgagtctgacctggcagtggccaacagtaagtttcatcttcagagttgctatgatgcagtggcacttgtccagaactggtaccttcccatagctggggaactttaaatgtaccagtgaaaaaacctgtttccccttcaaggggaacaaagaacatgactcctcagaacccaaccagtttggctgaggtctatctgtcccatctcttaggctcctttcccccattcctttccttttctgcagcagagcagtaaagaccaaaacctaacctgagttacaaaaaaacaagacagtgatggctatagagggagtgacatggagcagctggcgtgct

SEQ ID NO: 284 - DNA, 438 bp, Rattus norvegicus
  Genbank Accession No. AA850402
tttctaaattggttttatagaatttgttctattcgttgttcctcaagaaaaattggtcttcaaaatgaccaccaagatatcttataactaaatacataagagaagagagaaggaaaaactatgaagcaaagtaagaagctgtgaggagagcacaggcagctgactggtttactaaggaaatgtagaaactgtaatatagccccggtaagattgcatgagagaacttctgcttagtaacaaggctaattttaggttgtatatcatcctcggtgtttaacatgagaagcaaggaaggcattctttttacagtgatttaaatttgagaatgaaaactgttcctacctcctcacaagggaaaaaaatgagagtagacatcctctggttcatttggctatttgacagaattcttaccctatcctcagcctcagttaggaaatg

SEQ ID NO: 285 - DNA, 457 bp, Rattus norvegicus
  Genbank Accession No. AA850542
aaatacaattcaggatttattaaaaatcagagttcccctgctgtgccctcctagcactagagaaataaataaccagagagggcgccactgggtgaatggaaagagaaggtaatctcaaggcagattcttatacctacccctcccgttgccaatacctcccacccccactatggctcttgggatatagcacctgagcaggcacctcagtccaggtagaacgtggctggcaccaaggcatgtccgccctgcccaggaggggagacaggccctgggatcacatttccagcccttgataaccccgagacctgctccccccaggggccagggctgaagcaccaattggaggcacctgaggggtaagggtggtggtggtggtggtagggagaatgggctaacaacctaggcaaaataagctgaaaggaggtccggcccccaatccatttccagccagtgcctg

SEQ ID NO: 286 - DNA, 307 bp, Rattus norvegicus
  Genbank Accession No. AA850601
gcgtaacagtgtttatttcctttaaatacatttaaatataaaacatcaggcagtggttcagtcaacttaaaaatacaagctgaatgggaatcgcatcagtgctgatcatacaaatgaaattctgcataagaaagaagcagaacaactcataagcattgcacttggactttgccagtctgaggagtcaatcacgtggcatctactactctgtttcaggcaaccttttctcgttcatccaaaaaaggaggaggtatgatcagagacacttgcagctacagcaggctggaacccaactatggattaaaac

SEQ ID NO: 287 - DNA, 531 bp, Rattus norvegicus
  Genbank Accession No. AA850618
gtagttttggcccatataaaaataacatattgcaactcaaagtgcatcttttaaaataaaccatcaactatctttatcaaataaaatatttacaccatttggtttctaatgagaaaagctcttcacgctatcaccatggggacatcgtctgagaatccggtaatcatgggagcatcttcgtcgtcctctcctaggtcatccccggaggagaagatggcggagcccagcctggagctgtagtggctgttggcaaaggcagtgaagctgctctgtaagcggcggtgcttcgtgtagaggacggcaaagccgactcccaggctcagcaggatcaggaacaagataggaaccaccacggccgcgacgtcagtagacctggcagtctggaccactgtggcatctccacctgagctcagttcgtcatacagcagcacggcaggctccccgcagatctggctaccaaagagacatcgagcctggaccgtgaaagtgtaattgtgacccatcttcaggttggacactttaaagaaattg

SEQ ID NO: 288 - DNA, 448 bp, Rattus norvegicus
  Genbank Accession No. AA850706
aaaacaagctacaaatacttctccttgctcccgcccccccaagggaaaaccacacagcacagcctacgcccatctgtgagagagaagacggctggtcagattctaaactcctacatagaggtggcttctctgtgcacatttccttcaggtcaggagacagggatggggtctgcttgaggaccacccagctccaggatgctgcagtgtttctgctcaaggctccaagagaaggggttctttccaccttaccatgcaggccagggccactgatcatcatggaatggtcatgactttcactagagcagcaggggccttctggagccaagacttcatcaaatcaagccctgaggaggcaatgttccccacatgtgggcagcattaggggccaaggctttccagacccaagatagaatagggtttaccaaagtgggtacatttacacgacact

SEQ ID NO: 289 - DNA, 581 bp, Rattus norvegicus
  Genbank Accession No. AA850733
cagagctggggactgaacccagggccttgtgcttgctaggcaagcgctctaccactgagctaaatccccaacccccctgtgtatctttttaaaaataaggtatggtggtgaacacctttaacccaggacctggaaggcagaggcaggcagatctcttgaggccagtctagtctaaaaagattgagttccaagaagccagggttacagggagagattttgtctcaaacaaacaaacaaacaaacaaacaaacaaacaaacaaaatgaaaagaagagaacaaggggacaagggggtttgggtgatgtcccactgctccagctgctttcagcttgaggccagtaggagaatgacactaaccagaaaacccagatttagaaccgcaatgagaagaaacacctacttttggaactcccactctctgttgtccaaggggcacacctgcctggttttgagccaccgagagatgcagtggaaatgaaaagcgtgctgaaagagaagacaagggttcccacgtcatcatagcccccgctgccaacacctaccacagacggcagtgaggacgatgacaacaggtctgagac

SEQ ID NO: 290 - DNA, 580 bp, Rattus norvegicus
  Genbank Accession No. AA850738
accaggcacagttatccaatacgcagaccaatacacatgacacggccaatccgcttattagcttctctgattaaacaaaatacatttcatagaaatgattataaaatgcatcgcagatagaatgttttatacttacagatcttatggtaccctaaatcattattaataaaaaccagccaacccatactgtaagtaaagttagcagaccaccacttacgctttattgtaggagaaagacatccaattaccatgctgaaatgggttttagagtccaacacagacatcctgcttcaaagctcccactgcacttacaaccccaggaacggggctttccttcccatattacatttctaggacagctttgggctgaaagattagttttggtttcagagcgaatctgatttagtatttcaatgtcacacctcaaagattcctgacgggaggttggggagaatcactccaattacgtactagtcacaggcgcaagacagcacaacacagatgggacatttaattcactttaccggacatgctcacccaaccgaaattgggaaaatttaaaggcacagatgaatagaaa

SEQ ID NO: 291 - DNA, 576 bp, Rattus norvegicus
  Genbank Accession No. AA850771
gacgggcagtcattatccagttcagcagcagtctaccacagactccattagtgattccacgttataaataacttaggagaagcaagccgagttggtactgcacccctggtctgtgggcggagtggcaccagaagatggggttcctccttgacccccagcaccttggtccaccagaggctgggtacccaggcaggggatgtttcaaggcacatacagtttcctaacccgtagcagctccagggtccaccctgagacctggttcacatctggaccagccatacagatgcatcatctgctgcaaccccttcagtatatggtgtagtcacttattactaagcaggcttcggccccatccagggctggggctgcgctcacagtcctaccctttagtctggaaacagagtgtagagaaagcagccccagtgtagtgatgatgtctgggaagcaccatggggatgttctgaaagggtaggtctggtgtctgttctgcagggacactgggagaaggaaggaaatacactaagtaaaggggcagctagcaaataagagtcaaggcactaaaggagcctcgtgccg

SEQ ID NO: 292 - DNA, 550 bp, Rattus norvegicus
  Genbank Accession No. AA850781
ttttttttaacacttacaagcaattttattgagacagagccatacctgctggtttatacacataattgtaacaggttacatccttctcaaccttctgagtgctacaaccttttagtgccattcatgaccccaaacataaatttattcttttgctactttggaactgtgattttgctactgttctgaaccgtaagtaaaaatatctgtgttttccagtggacccacagattgaggactactgggctagaaggtcctcttagaatctaaacattggccagataccactcttggtgaaaatgcagacagaaacactttataatgagattcactgtaattcgtaactttattaaggaaccgatgtcagcactgctatgtaaacaatgacaaagatcaagggaaacacatcagggattatgtagacagtaatatacattgtcctttatataatcaatgtataatagttaaggaaactttaatccttattaagcaaacatttttgcatacactgccttctctttatctttctgtgcctttatcatttgtttgactt

SEQ ID NO: 293 - DNA, 471 bp, Rattus norvegicus
  Genbank Accession No. AA850814
ccatgtgttgatggaagagaaagcagactgaagtagaaaacgcagtttctcttatcaaacgctcacatgctctgcagaggaacttataggagggtgagatcccacaccaccacggcagggaaggcagcggctgctgccacagcctaacagcagtcaggctccatcactaaggcgagctgtgagccacacagacaggggccctcttcgccgtctgaccttcagttcactcgtcaatacaaaggtaaggagatgttagttctctcacaggcaataaaatcataaaaacagctgagatatggagtttagataagatagtataatttcctgcttttaatgtacagatattttatacttgagagtccacgtacagtcagacaagcatatgaaggatttcacatatcaaatacagacgcatttgtgcattttatgattagattagtcgtcaaatgtttacacttcagagctgctaat

SEQ ID NO: 294 - DNA, 551 bp, Rattus norvegicus
  Genbank Accession No. AA850885
acttttacgcctgtaggaattgcgataattatagtggcagatgtaaagtaggctcgggtgtctacatctaggcctactgtgaatatgtgatgtgctcatacaataaatcctaggaagccaatagatattatggctcataccatacctatatatccgaagggttctttttttccagagtaataggtaactacatgtgaaataattccaaaccctggaagaattaagatgtacacttctgggtggccgaagaatcagaataggtgttgataaagaattgggtctccacctccagcggggtcgaagaaagtagtatttagatttcggtctgtaaggagtatagtgatacctgctgctaatactggcagtgagagaagtagtaggacggctgtaattagtacggatcatacaaagagaggtgtctgatattgggttatagcagggggttttatattaatgatagtggtgataaagttgatagctcctaagatagaagacaccccggctaggtggagggaaaaaatagttaaatctacggatgccccagcatgggc

SEQ ID NO: 295 - DNA, 276 bp, Rattus norvegicus
  Genbank Accession No. AA850886
aaagaaaattttattcaacatacaacattttccagcaaaaaggcaatatacaggaggattggtgtacactgctgctacagaaacaaacagaagcactgggggtggggtgggagttatgtttacccctctgcaattaactcacaattacatgtagatttaccatttccagtaagatttgcgtgaatggatactccatttggtggggttctgatatgtcccacattttggcgcattctgttttcaccttttttctccattggaaattgagacacacac

SEQ ID NO: 296 - DNA, 619 bp, Rattus norvegicus
  Genbank Accession No. AA850940
ttttttttttttttttttttttttcactgcatctttgatttattcaaataggctgtatctttttgctctctggaatttaacaaattttaatagtttatgcagcagactttttttcttctgtggtaggtttcttctctgctggtttcttggtaaccacctttttccctgcaggcttcttcagcttcttggcatccacaggcttctttccttttttgcctactgcaggttttttgtctccagcccccttctctggaacaatcttctccgatttggctgccagtgcagcagctgcggcttccagctttttcactcgaagtttgtgattcctagcctggcggagaatggtgttcctacgcatagtctttgcgtaagggttcagcttcaacatgatcctcagattcttcagtggattcttcttcaagactctgcgctgaatcttcttgcgtggtgctcgaagggctctttggatctctgggcttttcaagattctgctaaggtctgtgttcatcatcttgtgcatggggaggttgtagttactcttgagggaagcagccttacgccaagtgccatacaactcatccaacttccggaaagcactttcagtccaaatgcagaaacg

SEQ ID NO: 297 - DNA, 465 bp, Rattus norvegicus
  Genbank Accession No. AA850951
caaataaatatcctttattaaagaaaaaaggaattttgttaagcaccaaaactgtgttgttacattgcatgtacaatacgaaaggtgagtgcaacactgggtgagcaagaacttaactctgaagtcaggagtgtgagaggtaagaaacgcggcaactacgatgcagaaaggctgcactaaggagcagaaggcggcggtcaacagtgatggagattcatagtattgctataaatgcctgtttaggagtctgcttatactgctaacacttgagttagctgagcgtatttgggtatataaatttgcaagagatggcatttatagtatgctgtggacaatccacttaatgtcgtggtgggaaagccatctgtgaagccaagcacagtgcatagtgttctgcctttataacattgtacaaagctagtaatggtgagtcagtctgccactgtaattctcacttacccaaaa

SEQ ID NO: 298 - DNA, 494 bp, Rattus norvegicus
  Genbank Accession No. AA850978
acaactaacattcactttattcaattctgttctcttaactcagaaggcaacaaatgaccacataaaaaagggagcatttttgaatatatacacataaaattgatctgggtacaggtgtttactgtaatagaaaactgacatcccacatcactaagtgttctagttcattcctacaacagacacccctaggccttagtcattcgtttccatctaaggttctataggactgtcatgattacaaaatgaggcactcatacagacaggaatggagacatacatatacatgtatactgtcttatttttatattaacgccaaagctattattggagagtatctgaaagaagcccttgctcacggcagctgtttaaatgttgacacaacagcagtaagctgaaacaaaacatctgattgacagggtaagttaagtgtgtggagactgggcagttagcaaagactgtaaagcccccacaggtgattttggcatggagaactc

SEQ ID NO: 299 - DNA, 423 bp, Rattus norvegicus
  Genbank Accession No. AA851017
tttaggttcacttctaagttatgtaaaatatgtaatgtcacaactgagaatgactttctgattccgtcaattttttgtaacacatgccttatcacgatgcgtcaataccctgtgggacagtaggtcttcctgggacagctgatggtgaaaggaaggctgcagctcgttgtgagctggctacgactaggagttagtcacagaaggttcaagttaagccatgtcttcccagctttaggtcctacgcagctcctcactgagagcttcttggcagtgaactgtattatgtccttaggtttctccagcacatcatccacatctttccccgatggctcagacgcactatcctccactgattggtgggatgatggcaacttcgtctccaggctgaagcaggagttgttgatctccaagctcgacatactc

SEQ ID NO: 300 - DNA, 438 bp, Rattus norvegicus
  Genbank Accession No. AA851050
gatgaagtacacggaagttagcacacctgacggatgactatagcagctaatttttttttttttttttctgtgcagcccagggtaagctcaaacaactcaaaatcctccagctacagcctcatgagcgctgcagttctgggcatgcgtggcctctcccggcctagcttgctagttttatatgatggtaagtctccatctataaatatgcaagtgtacagaatacatgtgtgcttttcgacctggtgtttctgtatgggaaagctgccccgagaggatgctacctctgttcttctgtctttagtgatgtttaaatggtttgcattattttcatgaaatgaagtgcgttaaggttaggagactgaggctggtaaaggagaagtttcctggagatgactgtgtgcaagagggaaggccacccaagggcccttccttctgagt

SEQ ID NO: 301 - DNA, 544 bp, Rattus norvegicus
  Genbank Accession No. AA851065
aaaatcatttggcttcaggaaatatttagctcttggtgatagtacccaaaggtcagaggaaagtatttagtctccttattttttgttaattgcactagtcagctcagaactgtgtactttgactttctagtagagggccagttgtgttcctgttagccacctatcatgcatgttcttctgtaaaagcaatggggtatagcaaaggcttgctcactgtgctgctcagaggacttcctttttagaacccacaagcatagccttgggatattaaaggatcaaatgcctttgcactgatcttgggcatatccctctctgcccacctggtaagctttaaggatggttggctttaattccttttaggaagagtggtttatttcattttaaatttataacattataaatgaaggacaaagattaggtataaagtatgtattgtcagttctcaaacagcatgtaaatactgtgagtatgctgtaaggaaatttgcagtgccttaagttaaaagaaatacattgtttcaacttgtagctaacgactttgctta

SEQ ID NO: 302 - DNA, 491 bp, Rattus norvegicus
  Genbank Accession No. AA851135
  misc_feature (1)..(491): n = a or c or g or t
cctccctacgagaacatgcctctcgcaaaggatctccttcatccttctccagaagaggagaagaggaaacacaagaaaaagcgcctggtgcagagccccaattcctactttatggatgtgaaatgcccaggatgctataaaatcaccacggtctttagccatgcacaaacggtagtcttgtgtgttggctgctccactgtactctgtcagcctacaggtggaaaagcaaggctgacagaaggatgctccttcaggaggaagcagcactgaaagcccctgattcaagatgagtgggaacgttcccaataaacacattttggatatatagtgtttgtcttgtttaactggtaggaagtggtgcctcaagtattccagggcaaacagaagagtggtcctttggggtcaagaaggccttgaagattaaagtccattgaaaagtgagacttaagggccagcangatgattcagccaacagagacacttgacaacaa

SEQ ID NO: 303 - DNA, 412 bp, Rattus norvegicus
  Genbank Accession No. AA851184
ggtgacgccagatactttactcatctcaggcagtctggactagttcccctcccgtggactccagggtaacaccagaactgtcctagaccatagctgtcctctctggcggctggaggtaggcctgcagggcacggtggaggaggaagcaggtctgtgggtggagggaagcaggtctgaaggtggagggttccagtgtagttgtggctcatcctttcctatcacctctcatcatggttcacagtgttgcttccagggacatctacctagacaatggggtccccaaatgtgcaggcctcctcaatggcgaggttgtagctggaacctgtccctcccttataggtgctggtcacaattctcatccagcctcgctcaccccaaggctcgccccatgaattgcggacaatccaatact

SEQ ID NO: 304 - DNA, 464 bp, Rattus norvegicus
  Genbank Accession No. AA851210
  misc_feature (1)..(464): n = a or c or g or t
agcagctgacacaaaatagtttattaagggaacaagggaagaggtgccctatgggaaagtgctggaatgtgaagactccacccttttgttcaggaactggagcaggtctggcgttgcctgaggctgcccagagtctcaggggcgagggcagacgttgaggcttcggtcagcaaagcagcatcttcccaggagccgtcactagcctctggctcctgctccccttctccattcagaggctgcttctctggtttctcttcctcagacagctgaccctctgttcctgagggatcctcagggctctcgccatcctctgtcacatctgactgctgggtagacgcctgacctggctgatggcgagagatccgacgctgggccccgtgtcctgaattatccctttgtcggatattaacctgcaaagagaatcggtgtcggngccagacagcactccacacccactgcatata

SEQ ID NO: 305 - DNA, 494 bp, Rattus norvegicus
  Genbank Accession No. AA851233
tgaacgttttcgaacaatggcacaaataggtagacaaagctaaacaggcagcagggcttacattgtaagtttatagttaaaactacggatgaacatttcagtgcaccacaattccaaactgcaacgaagacggtaggtactcggggatccagctgaggagagatgggtcactgcagctgtactctgtaagcacctattagcaacttcaccttggcaaagggtgcttccgtcaaccttataaacaacttattggggccagcaacagggctgaatgaataaacaaagtgactgtccagaaaaacaggtagctggaatttatcatttagcaccacggcttgcacactgcatggtccacaaagccgagcaatgacatctttacccaagaagtttgcatggaaaatgaagaggaggacaccagatccttcaggcatgttctgagggggcatgtaattgaaatctgttgagaaatcgggccactcacagagccgatgaca

SEQ ID NO: 306 - DNA, 579 bp, Rattus norvegicus
  Genbank Accession No. AA851238
aaaagaattctaatttgcatgtttgcagtctgttctggagaatcagggagggtcccatccagtagggaggggtggaaagaagtcctttcctccagaaaagattcttgagagttgccaggaactcaaagtgacagatgccattcaaatacatcataagggtctgagcacagtgctggtacataccagcaatcccagtactgggaaggtagaggcagaagaatctaagttcaaggccagcctggtctatacagtgggctccaagccagccaaggtcacatagtgaaacccactttcaaaacctccacaaggccttgtccccctttcagagtctaaacagctaaagaacttctttcccctactcagtctggtttgaactttgattccttgataaggggcctacaggggcaggatacagagagcaactttgacaatgttacaagttttctctgtggaaatgaagaacactcccaggattccaatgttaactaaagttccaaggttaactagagatttccggaagggggtggtgcaagttaatttatcagttttaaatatctacaaagtgccaggatctgacac

SEQ ID NO: 307 - DNA, 488 bp, Rattus norvegicus
  Genbank Accession No. AA851240
gggaggatggctgctgtgagtttattttctgctttgtggaagacacagttatggggtcaggaaagctcagtgctgtaaactaataggctctctccagctcctgctcatgtctgtttagccttcctagtttacagggagggttgagagggtgggctctggtctagcaccacttaaacttgggcagtctgctgattctgacaggtcaggacggggccctgctgttggtctggctaggatgcatgactggctgcttcttcatggtttcaggagccaggccacaggagatcgggcttctggaggcctggggggattctgccgagtgctcaggagactccaacactgcggccatgaatgggagggtggatttcccgaaaaagaagctggtccaccagtggcccgagtcagctttgggaagacccggggagtggggcacggcgtcccccgggtactctgcacttccgccggagctgttgctggacgaggagccc

SEQ ID NO: 308 - DNA, 454 bp, Rattus norvegicus
  Genbank Accession No. AA851248
aggagaggccaaacactggtatttatttataaaaatattcacaagcctgacctcactcaccaacacaaaacactcagctaggacacacctgcgcacacacacacatggacacacaccaggccttggaaaaggctgtcaagtattttggaggacaagaaggaatgaacacagctggttggacttttggttttgtctttagggactggtggggctctggttccctgtctgggaaagtaaaaggcagaggaaggcaataaataaccctgggcctggcctgctttggtatactgtgggtgtagcccctggagggtagcacaccatgtgccccttaggcacagccttaggcagaagccagaaggagcagagaaaggtcccctgctggctccagaggtaaggtggcctgcatctgcagattctagctgtccaggtcagagggaatggtctttttccgggc

SEQ ID NO: 309 - DNA, 499 bp, Rattus norvegicus
  Genbank Accession No. AA851273
ggaaaggaacagttttattagcctggagttgaaagtctttgggaggccatatggtgggtaccgccacggctgtacaggaagtaagatgaaaccctgtccaaggcttatttggattgtagagccctggagaaggcaaactgcccaaggaagaagtagatgcgggagtcctcgccggcctgtgctatcttactgcactgggattcctgaggctcctgctgaggcccttgcttcagtattgggcactggaccatccggcctagaactttacccttggggtccagtttgatgcaggccaggcatttccgcttcctcccatttggtttgattgtacactccggctttttccagtccttcttcaggcagctggtctgctggagcttaaattccagcctcacaaaggtgccagctgataagaacaggtcatcagcactgtccacaccgatctcctggaaggcccactgcacaagcgggtgtctgtggaactcctccagagccacct

SEQ ID NO: 310 - DNA, 460 bp, Rattus norvegicus
  Genbank Accession No. AA851299
catagttgcacaacttgaggctggttaaatacaattgtttttcaaaatctctttgaattatttcctagattatacatgcaagtgaccatgaaaatatttggcattttgaaactttgaaactctgaacaggcacttgcaagaaggaaaacatggccattcttagaagtccacatttgcaatagctgctccaggacagggaacgtggaatctctggccagggctggttgctggccactttatcaaagtgccaccatagtaaaaagaaggtttaaggaaacagagtcgggctgcccagcttcctcagaacgtaaggctaactcacacccctgcactgaggcggatcaagaacactgcagtgtacagaggccagcagcccggggggagagggccccaccacagcgcaggcgtcccctgccccatgtacctcagcagtgtgtctgcgctcagctgactgcaggct

SEQ ID NO: 311 - DNA, 719 bp, Rattus norvegicus
  Genbank Accession No. AA851329
aaaggaatataaaactatttattgaccactgttcaccattatttacaataaagtaaatatacagttggatgacattctgacactacaaagttccttttctggctaattgaaccagaatgcaaatactgaaaagattgatcctacccgtaaggaatgagtcagggtaaaggaaaggcatgcagggcactaattgatattagcaaattttgttcactcacttagtcagcaggtcttaaatcgccaacatcagctccaaccatgattctatttccacatcaaacagattccatgaatcataaccttttagtacagattttaacgtcctacaaaggaatggttcaccagaggaacctttacacagacccactgacctagacctgcctctgtagaccaggggcctcttaaatcagagctctatctgcctccagagttctgggattaaaggtgcacaccaccatactcggccaagtcttgctattaaatcatactactatgttgtctaattccatttcctgaaggggtgttggtatggacaacattctgtaaataaactatccaataaattacagactctgcttattctgaaaggttatggtttcaggagaacattcacggtgatggaatctcatcaacttgcgttttcacattcagttcttttgagtattaaaaaaaagataaaacagacaggttatgtaagtgttttatgcatacactgcata

SEQ ID NO: 312 - DNA, 495 bp, Rattus norvegicus
  Genbank Accession No. AA851347
agaaatcaaaatatttattcacatgattttaaactagtcaaagctatttctttagcagtaatgatttaagtgcaagtgatgctggctttcacattggcgtcctccagagtaaagacaggtcagttgttcttgaataaatcaatgcagctctgcaacagggagacattgtttctggcatgctttatttccagttcagacatttcaattaggttctttcgaaatgctgccactctcttccgtttgaagtttatcagctcttcttttgcagattcagaaagctgttcaaacttctggcagcattcctgctgatgagtctctgccaacttgacatctttgctttttaaccgggccttgtccaaagctttgtttgaattctcatagtcaattagggcctttgtgcgtctgtataggagatcctttgcagcctctatgttgagcatgtagtatcggaggagctctgtcagttttaaatcttcctcgtgccgaattcttggc

SEQ ID NO: 313 - DNA, 510 bp, Rattus norvegicus
  Genbank Accession No. AA851372
aacaacagtctttattgataacttcccaacatctgtaaacatcaggtataaaaatattccattcagctgttttctaaggtgactggccagctcctggagataacctgatggaccttggagaaacacagctcctcacagtcaaggctgcctcttcctccagaattcaacacaacaggaaaaaagtactccacagagggaaaggagacatagttgaatcagcagctgccagtgggtaggaacaagctcagccctcctgtgcccacccagggtgtgggggatgacaatctggctttggtctctggagaccttagaagcactgttcaaagctgtggccattgatggcaggagagccaggtcgaatgtgtgataggtcctcaaagccaggactgaaggatggagaggcagtgtcagggctggtgtcacaggaccctgtgctctgctctgaggtggcgatggttgtggtgatactgggtggaacagggtcttcatcttcgtcctctaggagtgaac

SEQ ID NO: 314 - DNA, 433 bp, Rattus norvegicus
  Genbank Accession No. AA851407
agaaaagcaaatcattttaatacatttcatgaaaataaaccaaattattctgttcattaaaaagggcaggtcagaggcacatggtaaagggatcagcagacccaaaaggtccaaggggcgcttcatgaagcactcagcaccacctgtggtaaggaagagtcctgtggttggagagagtttgggacagcagcaggttaagtgtcttccgaaaactcgagaaagtcacaccttcattgtgcttgctgcaagtccaagtttatctggctaacaactcttttgttctgagaacatcttagaatcggtagtctttatagccaattagatagtggtctttgataagtctactgagccctcccagaaaaccataagacaacccaatctgaaaagttacgaaatagcaaagacccacctttgtcccagttactggagtggt

SEQ ID NO: 315 - DNA, 474 bp, Rattus norvegicus
  Genbank Accession No. AA851443
caagagacggacttttgttttaatacagtgacaataggaaagccacaaagtaaagacacacaggacagcagggaggacagggctacttaaggagctttgccacgttcagactgggcaccacaatctcctggaagatgggcacatacttggggctcgcttgcatggggccctgctccagtgtctccatgatggtctgcttcatgtcccggctggcgtctcctcgcagtgccagcagcgcaccaatatggtcatctctgatgtctggatatttgctgaccagagttgagacttctaggtacagcacacacgggtccgtgagcttaatgacctctgccactgcaacgattgtgtcacagtgtccatctgcatcctcaccaaatccagatgccagcttccggaacaggaagcggagctgttccgcctctctgaccatcttctcagcaccctccttgcgctcttcagcactccgaaagg

SEQ ID NO: 316 - DNA, 375 bp, Rattus norvegicus
  Genbank Accession No. AA851620
cataaaccaaatactttattatttgagaaagaggaggccaaattacaaaaccttcatacttaagaccacgcctaagacttctgaggacttccatgactgttagattcaaccatgtaaaaccgtcatcttagctgacaaaactcgggctaaacttggcaatttcatgtggctcgactgcgtataaactgactgaggattaagcttttgactcgagtatgttcctagtcccatgtctgtttatattacacacagatgtcccggcgacaaacaggtccctgtgctaaaccgcaaagcatttctctctgggcatgcaggccaaggcaacccaggactggcacagcaggtcccagctggtcctgcatcccctgtgtggtc

SEQ ID NO: 317 - DNA, 337 bp, Rattus norvegicus
  Genbank Accession No. AA851637
ccacgtgacagacagcatttatttcagagtccagtgttcacaaatgatgggctgaggatgaaggcagggaaggggtgggttggggactccagtgtcagactacacagcagggtatcaggtggggggtagtgcccagcaagggagacaggaggtaaaaataaccccggcctgccgaccctcagcgctgtgtcccaggccgggccctgggcttgggtccaggagctattctggggcctgggagagttacattccctggaggaaggccccctcccagcccccacctccctctttccctccccaaggccgctggccactgtgggtccctgcccagcaggca

SEQ ID NO: 318 - DNA, 292 bp, Rattus norvegicus
  Genbank Accession No. AA851650
gaaatgcaggagctttattagaaccaaaatcttcccaacgccaaagattcagaaattcattcgggcaaacctttagggacccaaagtccacagacacacaccggggctagcccaaagtacacggaacacggggtagccccccagggggctgaactaaaagggattgcggatgcaggcaacacgtgggaaggcccgcacagggaactggcgttgcggtcccaaagggcccttccaaaatttggttccaaatgacggagcaaggctgtaggctgcagccaagtttgggtcccca

SEQ ID NO: 319 - DNA, 461 bp, Rattus norvegicus
  Genbank Accession No. AA851748
cacaataaaacaatattattttattggaaatataccaaggcattacaaatgtacaaactaaaatgaatagtatttataaacagttgaaaaatataactctcatgaacacagtttatcaaaaatatttgagaacattcaacatattcatatgattccccctccccatgccattcatccaaagctttcaaaggtgaaggtgacacttagtttggttccactggttttataatttgccccctcatgttgaagagcaaagccagtgtctgtgcccacatcagctatgtcaacagagcactgagctacattccccctctctggggaaaatatttttgttggaatggttctgtattgtgatgtacagtggacaatgatgaattcaccttcacttggactgtctaagaatgaataatcctcagtaggagcgatgaagaattagttcacacaaacttgtgctctgaggt

SEQ ID NO: 320 - DNA, 527 bp, Rattus norvegicus
  Genbank Accession No. AA851785
acattctcaacagacctttaatgaccggggtgagtttaggaacaaaaaggtagatagtctggtcatagggacgacaagaagtgaggacctcagtaagctgtctgagactgctgctggcggtagccaccacggcgcatatagccttcattttttcggtagccatccttttggtctcggaaatagccgccataggttccttgcttatggtcaaacacacgttcattattctccactaggctgccaagcttctcagccagctgcagagccaagttctgttgggcagtgggctcagtacggtgcatcactaccgtctgcgttggctggtccagggaagccatcaattcttcattaatgatcatcttgctgatgatggagtgaacagtgggcagatccagctcaaacatatctgagagtgtctccatactgattgagtcatagacactgctataggtaaaaaggtaggtcctcagagactcttcctggatcttccgaactagcatggtgcgaactttgtcagcctcagggaa

SEQ ID NO: 321 - DNA, 520 bp, Rattus norvegicus
  Genbank Accession No. AA851791
ctctctcttccgcttgggtttagatatcgggccctgggatagggcagccagttgttcatgaactgcccgaagctgctcttgcagctctgccaggcgatgagccctttcttcctcggagtctgagctttcactctcctcctcctcatcatcctcatcctcttcctcctcttcctcagaggagctctcactgctactttcctcactggaggactctgaagaggatttggccaacccgggaggcaaggcagtagagacaggtaaaggtcctggttccagtggctcatctggcatcttggcatagcggaactcaaacacatcctgtaacttccgggccatagccacgacatcgtggtctggaggattgtacttatagcagttggagaacatgagccgtacatcagcagcaaactcctgtgcatcccggtaatcgcggttctccatcttccgcttgacagtgctgaggtccatggggtgcttaatgatgtcatggtagtcatgaaggccaagagcagaagcgtcc

SEQ ID NO: 322 - DNA, 545 bp, Rattus norvegicus
  Genbank Accession No. AA851803
aatacaacttgctttcaacagcaattttcaaagtaaacatatcatagaccttataacttattaaagattttatagtgtttacaaatttgattctaaaaatataccttatttgttctaaatgaataacatctgaaagacagaataataaatatagcagtgcgctcaccactactgccactaggcttgtgtacacgcattctgtatggactactcgtgggatgttcacactctccgcctgagaacacagagcatattacactccagtgtacaagacttcagtctgacagcattgctctacaagaaagaaaattaaaatgtctacttgacactgcagggaagcatgggcacacgcgcacacagacacgtgtctgcattttctctcacactcaaacagaagcacacgcacaccacagaagtcagaagaatttacccttgtgtgccagacaattaacaatttcagaaatgcagagtgagtggagagtcggccgatacacttaacccgtaagtacatggcaagggttgttaatggggtgcaaagtgcgctc

SEQ ID NO: 323 - DNA, 294 bp, Rattus norvegicus
  Genbank Accession No. AA851814
aatgagtatcttatgtacacacacacaccatacaacaagcttggttccattataattccatcaggcgctcaggtatgttcaatgacctgagatagagttgatgaagcatggcctttaggtcacaatgaagtccatcagtgagttgtcaggctgcagtgtggggattgggacatctgctacctggatgatgttgacttctaggattccatctacaattgtgatggtggctctgaagtaaccatatctgtttattcggcagttttcattggaaatgtcactcagctccatggattt

SEQ ID NO: 324 - DNA, 593 bp, Rattus norvegicus
  Genbank Accession No. AA851920
agaatgtgggctgtcagcagctggctttattggaaaaggagctctcaggagctgggtttaccagacgctgctgagtcctgggcttcagcagaatcctggccttcagcagaggccatggcagcaattcgagcctccttcttctgtcgctgcctttcttcctttaggcgcttgcgctgctgcttgtctaggtcctgtaatagttcctggaatcgggcactccttgggtccacatgatagcccagttgttcctaggcctcagcctgtaaccgggccctccgctccttgtcagcctgaattttctcccagcgttctcgcttctgctttctccagttctcaatcatttgtggcatcttggccatgcactctgcaatatgctgctctctggcttgacgccttgcctccgcggcctgctgctgcacgcgcagcgactcttgcatggtcgctaagcttgggtaccattctcgctcctcggcctccaactcgcacagctgctctgaggaaggccacagggaggcggggggcaccccgggggattgcgccgtgccgcccgaactgcttggccgcataacgcggcgttagctgccatcgcgggg

SEQ ID NO: 325 - DNA, 596 bp, Rattus norvegicus
  Genbank Accession No. AA851926
ttcagtcttcaaatatcttttattggaaggccatgcattgccttcatttattgtatttgaaatcactgtacagttacttttgtgaaaacactgcctgcattttctagtacaaaaaaaacctaaaaattgtttcaggaatgtagagaaatatccaacttaaatagcgaaaaaagtgcaccataattactgctgcactgcagtcatttctgcatttcccatgtttcttaaataactatcttgtctgataacacacaatataaagagcaattatgaaaaacagacatttacatatacttctaaagtcttattgagaataccctgttggcattggatagccaatcataggcgcagcagctgcggtagcaggatatgcatatgcctgttggttcatcccattgtgcatatttgcaacattacttccatattgctgagtgctatcataaccgttctggtaagtccctgttgggttaccagtcctaaaactggtctgtatgccagcagatacaaaattacttccaaagctcccattggtgtaatttgcagcactgtaaacaccattctgagttttagccccaaaatctctcttaagcagacta

SEQ ID NO: 326 - DNA, 591 bp, Rattus norvegicus
  Genbank Accession No. AA851953
aagcataattaaaatcaatgcagaaaaatattagctacattgggtaaaagtagtgattgttgcagtatttgcctgtaatccagtgaagacggtgtaggaaacagcatcactaaatgaaagacagaatggagggtgaactgcgaaggtcctgcatgctctactggcttccaaaggcattcagagggtcatcaaaaatgttggacactttgttctcagaccttaattcagatgctgcctcagcagattggcttttgggtttagatgctttagcctggaggccagaggagaaaatatcatctgtatcatcgtcaaacatggacttggctgtgactttctttttgggcttttctttgggtttcacagtcaagtcagcgaagatatcaatattatcatcaaataagttgggttccaaagttctctccttctctcttttttttggaaaaggcttcttaattgcttccgtagcaaatatatcatcctcaaagatgtcttgagtttttgacacaacgtcctgatggctgtcagatttccactgattctttttgcctttctgatctgcaaagaggtcctcctcatcttcaaggaggggga

SEQ ID NO: 327 - DNA, 538 bp, Rattus norvegicus
  Genbank Accession No. AA851963
ctccactgcatacatagttggtgttcaaaaatttccccaatgtttgttctggacacaattgttattagccaactcggtgaattcaagacattgttccacacaatgaacaatcgcacacatgagaactgcacctagaatgtccatcctagaatctccatccatccagtcaaagtgctgagctcactgactgaaggaaacatgacctgtgttctagaacgtagctggctatgaagtttactcatgtgtaaattccttaaaaagattaaattgtttggcccatttctatatttcataaaataactataattacaaactttctaaaaataattttacaaccatgtaattatgactaaccatatcatctaaaaagtaagtgaagtcattgtcctagagattgtctgagattattctgctgagaagcttacttcaaactcttatcactacttcctacttccagtgtccttgaattaagaacagaaattgtaactatgctattctacatcagattgacacaacctacttctaagtacactattgc

SEQ ID NO: 328 - DNA, 432 bp, Rattus norvegicus
  Genbank Accession No. AA851967
agaatggctgattcacccctgtgacttgggctggatgtcactttatgaaatggtagtttgtcacaggggtgagtgctgttaacagcagcagtcctttgtcagttcgtggtactgctttcttgttggcatgtccaccaggtcttttcctgctcatctctgtattgctaccgaataggactggatgcctgtatggagagtgtttggttgttttggttttggcttaaagaacaagcaaaagggactgaggggaggggacagctgccggttctgctgtcccacaggcattcccttcatgcagattcgaaggtgtggtctagtggttggcgcctgcccctcccagtatccccaggggctccgttacccaggcgacatagaagctaccacctgaaaaaaaacgcgtcacacgggatccattttcatatgagccctggc

SEQ ID NO: 329 - DNA, 481 bp, Rattus norvegicus
  Genbank Accession No. AA852011
gaggcagaacagattttatttcctcgtagttggagattaagacttctgtaaagacttcaattaacaagaagtgtcaatttcacctgaagtttacaaactgtaaagccttgctaaaccaccaggacacagtcctcaggagcacactcattttccccatgcctttcagtaccagcaaagtggtgctaggctttgactctgagaatgagaatttcagaggctttcctctgcctattttgtgctaatgcagaatgagtatgactaactttgagttactaacacaaaagcacccactttaatgccaatttatttaatataatgcttttatagggaaagttcttttggagagaaagaagagcactctctcctgggggagcaggagggcataattaagacacggaaccactatgtttcaactattatgaactattcttgaaactattatgtttcaagaaatgctccagctttactattgtcaaaaata

SEQ ID NO: 330 - DNA, 481 bp, Rattus norvegicus
  Genbank Accession No. AA852038
ccacaggtcagaatttatttcatagcatctcatttatagcatttttcaagtacaagatcctgtccgacatctttgacacgggaaagagaagagcacacgttggtaaggcacctgcagaggagcgaagcccccccttttggcttgagacttctgggtagctgcttgcacgtctgtcgagcagaaaacaaagtcatcgaaagtttgctctcacccaggcttgaggtgacgattttggagcctgctacagtgtggcttttcgggtgaggtgagtcggcctacaccgaggcaaggctgaagaggcacctctccacacagctcacagaatcctcccagacaccaggctgagcctccagccgcttttcagctttgaagagaaccaactttaatcccacccaggcacatgcttttaaatttctcagcccaaacttctattttcaaaacgtaaaaatgcaggaaaacctcaagtacagtcagaccttac

SEQ ID NO: 331 - DNA, 424 bp, Rattus norvegicus
  Genbank Accession No. AA852046
  misc_feature (1)..(424): n = a or c or g or t
cagagctggggaccgaacccagggccttgtgcttgctaggcaagagctctaccactgagctaaatccccaacccccaaaacactatgttttaaaaattaactttggctatcaaccaacacaccgccactagagcggggtccacaaaattaagtttcttactcactaagcgttaaggggaccaagtaaaactcttcgacgaacaaagcaaacagtttcatgatttcaaacacagtcgccggtccaagattttaaacacagtcgtcagtccaaattcaaacacganacanaagtcaaaaagacactaagagacacaacacgtccagaaaaccacagtcaggtcacaaagaagacaaacaattccaacagtcaaacaagtaacaagcagatgtgccgcgcggcttcggtaccaaactgaaaccaaaa

SEQ ID NO: 332 - DNA, 453 bp, Rattus norvegicus
  Genbank Accession No. AA858448
tttttttttttttttttattatatactaaattaaaactttattggataaagaacactctcccgagcacatgattggatgggctaggtctacattacatgctacgaagccgaacacgacagcagtttaacgtggaatgtcaaacacattagtttctcattgtacaaaaactcttttctgtagctgacgcgcaagagggaaacacatgataactcgacatttcaatcatctgtgatgagttttgtttttgtttttttttaaaaaaagtcatttgaagaaactggtgtctttagcatacagttcaaataaattagttacatgtgcactgttgaaacctccctcgccccttagtgtttcaaacaaagtcttagtgcaaacatccaagttgctcgtcaatctaaaagactgttaaactcagaatacaagttctgagttatgtgtagttaagtaggaca

SEQ ID NO: 333 - DNA, 413 bp, Rattus norvegicus
  Genbank Accession No. AA858449
  misc_feature (1)..(413): n = a or c or g or t
tttttttttttttttttgaccttttaaaataacattttatttacacatcttgatttttgttgtcctgggacatttttttaaagaccttcaagtagtttggaaacctctgcccatcggctgcttcctccggccacggccttcgcaggcgtttccccaacctgtgctgtggagcgctgctctcgtctgggcaggagggctgctctggattgtactggagtgagatggggaaagaggctggggaggggcagggcagggtccctcagtgctgcccgcctgtgccccacccccaggcactcctttccctgagttgtgtggttgccagtaagacatggaaatgccacagggcttagggggcacagccaccatcacaaagggggttctgggaagatgggtanaggaaaagagactggtac

SEQ ID NO: 334 - DNA, 386 bp, Rattus norvegicus
  Genbank Accession No. AA858528
tttttttttttttttttctggatactttttggttttgttgtttcattttgtttttttaaaaaaagaaaaagaagaatgaatgaatgaaaagacattatagccaacaagcaggtctctaaatctatccaggcaagccagaaaatgcccaagggggttagagaggttgggacaggaggtgtcagggaagggaaatatgggggggcaggggggggaaaaagagccacaggtggtgggcaattggaaagacagggtcatcctggtgacttacttcatgaccagtcaccacaaacaggagatccacctgccaggcaatgtcagatgactgaatccccagacccaaagctgggccctgtccctcaagcttgtgccctgcctcgtgccgaatt

SEQ ID NO: 335 - DNA, 522 bp, Rattus norvegicus
  Genbank Accession No. AA858548
cggccgaaattgttttatttttttggttttttttttgaccactcagacacggatttaataattgtagaaatccaaagaataagcatcaaatctcgaagtcagagtgaactcttgcctgcgggttggcttgactacgcccagccactgagctgcctcaaccagccagggatctatgaggctgacttctgttttcatgatgtcaccatatgtagtatgtattttgtctcaataaagcatttgtaccgatggctctggagcttggaggaagactaaaggaatgtgtagtgattctgagtaaggtgtggacctacacggcagaactatctgggggagggaaaaacaaaggcctttcttcccgtgtcaggacagtcttgagtggctgaactaagcacatgggccactggggctacactgtctgaactccgacaggtcctgctcctctagggagagcttgcagttgggagttttagcagataagcaccgaaacaggtttccgattccttcctgcagctgttgtgcctc

SEQ ID NO: 336 - DNA, 369 bp, Rattus norvegicus
  Genbank Accession No. AA858550
ttttttttttttcattaatagttacaggtttgtgggttagtgggatttcagtaaagggagaaaaaaaaaatcccttctaagatgggtcaatagaaccaagataaaactgcatgttactacagtcaaggacaccaagtgatcctgtgatgattccagttagtcctaaaggcattagcagtactaatgtcattgtagaaatgctagaatcacagaactcaccatttctacaatgacattagtactgctaatgccattgtagaaatggtgagttctgtgattctagcatttgtctctaacaaatgatcaaataattcctcatggccctctctgccattgtctttcaattcccactgtgcaattagacccttt

SEQ ID NO: 337 - DNA, 446 bp, Rattus norvegicus
  Genbank Accession No. AA858551
tttttttttttttttttgccttcaggagcatgtttattgtgtttgagatgatacatcggtgctctctgagctacaaagggtagaaggaaatcctttcattacaaactgacaaaggtaaaacattttcacaacagcatgaaccacatactcagaaatagatctgggcttaatacaaatgacataattcctagtcatctacagctacttttataacttcatacagataatgaattaggctaaaatgcactataatatttggtagacttcaggaccagtatccttagtacatcacaaaatacattttgatatcccaaagaagcaagacttgcaagtaggcattttaaacgtaactaatctacagctacgaagttctactcttggtagcatttaccttttgggggtctcccagtctccagagataaaggcaagagtagagcctcgtgccg

SEQ ID NO: 338 - DNA, 479 bp, Rattus norvegicus
  Genbank Accession No. AA858552
tttttttttttttttaaaattttgtatttcttaataggttcgattttttttcttaaaaaaaggaattttctgaaatcagcaacactcagttccttaatccactttcagatctttccccaccagcatggcggtcacgggatgcatacaggctttatgttcctgctaggtgcggacagcttgatcgtgggatttgtcgaaggcagcgaggtccttgaatagaggtcgtgtaaatttcatccttccttgttcagttgccatctttagggccaaaggaattgcttcttcccacttcgattgaatgcagagccgtaaccatcttctgaagcacctgtgccaggaactcattcagctgatgggacgagaggtccttcaggtcttcgatgctgaatgaatttaaatcttcctctttggcagtgacccatctttgacttaaggcgatgcaggcattcgtgagagtcacatcgtaattgggtttgaca

SEQ ID NO: 339 - DNA, 453 bp, Rattus norvegicus
  Genbank Accession No. AA858572
tttttttttttttttttctgtttgggggcgttccactttattgtttctgagacagggtttcatggagctctggctggccaacgatgaccttaaacttctacttttccaacatgtacatcctgggttctgggattacaggtgcgagccactgtgagtgatttatgtggttagggatggaatccgggactttgatgcagtccctattaactgaatcccggccctggccctatgtctgtgtacactggcagacacgttcagaggtccatgtgcagatgggtacacgtgcaggtagaagccagaggttcttcgggagtcatcaccttgttatttgagatgggatcctccactgccctggaactcaccaggcagatcaggttccctaactaggaagccctagggaccctcctgactctccgtcctaagcactgggattacaagtgcctgaagccacac

SEQ ID NO: 340 - DNA, 454 bp, Rattus norvegicus
  Genbank Accession No. AA858573
tttttttttttttttttacaggaaggggaagatctttattgcaaagtggagcttatcaaaggaaaaagacacaattctccatgtccttcatttcagcttctgcttctctttctttcatggaatctccaggatgtcactcaaagccagaattgactcttgctctgcgttggaggttcaggaaccttctatgggcaggaggatgtcccctcctcgtgatctctttgggttcatcataaagaaagccaagtagataatcatttcttcgtcggtgggatcttgccatgtccccaaaaatcatcacagagtagcccctttggaaggcgcaggtggagggatcaccagactctcttaggcatgtagtttcctgaacggtgaactctaagttcatgaccagtgtgtcttcatccaggacattaactctcttcagggagctccgcgtcgcccgaaacaggta

SEQ ID NO: 341 - DNA, 472 bp, Rattus norvegicus
  Genbank Accession No. AA858588
tttttttttttttttttccatttggctctttttattagagaaatcgagaagacagcgagtagggaaatccccatagtgaatggaaccatcacatagatgcctttctggaaccccaaccttctatgatccccaaaagtgtgcttgtgatttcagcaacttacaaaggggagaggaaatactgagaaaggccactatttaataatgaaggagtgaaggtgtctctaaactgggctccaaatctccgtggtggttgtcattgttacctccccttgtatcatcaagttggtgcccttttctgagccttatatctggctctggagtcctggtgcaccccaatcggtgttcggttggctcgttcatgggataccaaagccttccttacaaagtggtctttctttctgtcccttcttcttgggagaatggatttctaagggatggtgagttgaccctccttccgacccaggcaatctgt

SEQ ID NO: 342 - DNA, 576 bp, Rattus norvegicus
  Genbank Accession No. AA858600
  misc_feature (1)..(576): n = a or c or g or t
tttttttttttttttttagtcagtactgcagcagctccgagtttaataattctcataggctctatataccttacagtcttgggaaacaaagtcacaagccagcagggtcaatggctgatggacattggacatctgtacctatctggaggcctccttgttccttcctccaagattaagagcattcagcccctcaccttgagcttcaagcatatcgcctcttacccttcatgagtcagcaggccagaaaatctgccagcagaccctggcctgacttgactgcctgataggcaggatttcacagaagcaggcaaaatggctcctgacagagagatgccagctagaaagggagtttgctttatttgccattccctgtanggctggtgtcctcaatgagatgcaggctttgggagttcctatacacctcagtgctctgtagaagctgaggacccttgacctcacaggtgtgatcactctgcangtggagatgtggccaattggttgggtgtcctcactcttgaagcaggtanggtccccatagagatcctcagatgtcagcacccagctctgcacactgct

SEQ ID NO: 343 - DNA, 504 bp, Rattus norvegicus
  Genbank Accession No. AA858607
  misc_feature (1)..(504): n = a or c or g or t
tttttttttttttttttggctgtttaagtcagtgtcttgattcccccacactctgttaaaagaaatcttatgtcatccaagagcatgaaacaggtaattaaactaagtagtacctctttggaataaaagatgtactgttttaaattgtgttgctgtgtgtctatgtgtgggtgtgtgtattccagtgcaggtgaccttggaggctanaggtatttgatctcctggagctggagttctgggcatatgtgcctgtctgaccccttgcgggtactgaacttgggtcctctgctagagcagtcatcttacaagctgagccatcctctggtgcagagacatgttttgttgttgttgtagtttgtttttatgccacagtaccgtggtacatcccacagaggacgcaggcagcagcaccaggagcttcaagatacagaatgccggaggagggcttggattgcggctggcacagggttaagtcttacgaaaaagagcccaacatatgcgaaa

SEQ ID NO: 344 - DNA, 522 bp, Rattus norvegicus
  Genbank Accession No. AA858636
tttttttttttttttttggcagtcaaaacactttattggcagaataaaaaagtgcagcatgggaagtattgacctgccagacatttagctcctcatattcatccagagctgcctggaactgggctggtgtgaagccacgtgatatgcagcgctgttcagcctcagaaaagcggacactccgtccccctgataccaactcacggacggtagcaaatatcacatctgctggcctctgggtcctagccgtttgtcccttttcacccagaagggagtcctttgacatctccatcaaccttatggcttcattcacatcttccttctccacaatgtctaccatccgaaggcgagccagagcagtagaaagtcggagaatggccagcagggtccgggcagaagtgtaggtggcatccttactggcccgggcctctcgcctcatctccacatacgctgcagtgatgtagtcagccagagagtcaggcactgtgggctgcctctcgcggcacatggcaatgtaccgtctca

SEQ ID NO: 345 - DNA, 480 bp, Rattus norvegicus
  Genbank Accession No. AA858640
tttttttttttttttttcaggaatgtacaaatgtctttattcaaaaatacaaaataaattatctgtaggcatggacaatgacagcagtaaaccattatgtattgtcaaaggaaaccagtaactgatggttacagtgatcagccagccttctcttcagtcattttcttcaggtgacttctctgaagttattggtgaggaacctgccttgagcttcctgccacagttcattgataagggcggcgataatgaatgggaggatgaagtggaatgcgaagaagcgtgttagggttgctttgtctactgagaagcctcctcagattcattcgactagggtagtcccaatgtaagggatagctgataataggtttgtaattactgtagctcctcagaatgatatttgtcctcatgggagtacatagcccatgaatgcagttgctatgactgcaaatagtagaatgattccaatgtttcaggtttcta

SEQ ID NO: 346 - DNA, 633 bp, Rattus norvegicus
  Genbank Accession No. AA858649
  misc_feature (1)..(633): n = a or c or g or t
tttttttttttttttctaataaattcttggtttatttgagtttatctcttaactcagtgtcatgagatgttggcataatgtaagcatattgacaaaaaatatttcaagtacgggattcttagttctgtgtcataaataaatttggataaaaccgcaagccttccacagagtcatctcggcaaaggtggcccatcttctccgcaagaagcagcctttctttagccagaaggacagacattcccacaagcttggcaaactcttctgatgttaaggatcccctctcggaaaccgtctctaaggccgaggccaccatttcttcttccttgtgagtctgaagctcaattaccatgacaccactatcgaaaacccggagtctgacgggcagtttcaggccttccagcatcttgcatgcatttactaagtcttctggtgagagcaactccattcctcgggctcggttcactaaacagtacacctctgtgagtgacattattcccccacgctcctccaagggagcctgcaatatcccggccagctgcttggccagttgcatgtggtactgtgtgcctgagccataggtttctctggtgactgggttggctattcccatgctcagcangtacgacttaaacc

SEQ ID NO: 347 - DNA, 587 bp, Rattus norvegicus
  Genbank Accession No. AA858657
tttttttttttttttttgaatgaagggtggtattatattttattaagaacaacaaaactttgtaccacacagacaacatcttacttcagtggccaatcatatacatatgaatatgcccatatgtagctctagggccaactttagacatggaacattaggtaccaagttcacaaccatcaaacaaaacatatttcacactccttcagtaaagtttaattttttcagtgtaatatgagaccatatttaacagctatgacaaaaaggtgtactttttaaaaaccaattctcatcctaactatggagaaaggcaaagtgaccttcagatctatgaaggggattatcaagtcttgaagtgactttttctttgtttcaaagatccatgttaagttagtcgtagacaacctcaaatatagtgtttctcaacgcccattacatggctaagcacatctgtactggaaatcattttaatactcaaactgtagctgaatagggttgatatcattaagatagatgaattgattttctaagaagcagaggggagtaaactgcaaactcaggaggttttcaatattcaacagttcaatgtt

SEQ ID NO: 348 - DNA, 454 bp, Rattus norvegicus
  Genbank Accession No. AA858677
tttttttttttttttataaaaccagtttattcacattttagaaaaactagtttgagggcaggaactggccttcctacaacatgagtgtgaaactaagaaccaggaaacttgacggaaggtgggaagaggggagccatgtctcccgctcccaggtggcgacagacagaccggtcaaataaattaaaggagggctggacggagggagagggtatccaggcaaccagaggaggggtggcactgactggaagacagttgacacctgcaagaactggagagagcatgtggagtagcctgaggaagggggctccttttgaccccctcaacctgctacgtgatcctgcaggactgtgctggctgcttctctgccagagggagcccaggaacagctcagcacaggaagcctgaggaagaccgggcttgggggttcctttccctcacctggggtgctacagat

SEQ ID NO: 349 - DNA, 609 bp, Rattus norvegicus
  Genbank Accession No. AA858695
tttttttttttttttttccaatcttaaacaaatcactcaacgatagtttatttattccattacagaattaggcacgcttcagattacaaaaccaagctcattataatcctgaaggattagagtatcttcaagaaaccagtcacagctcaactgaagtgaacatggacacagggttggtgtctactgagggaaatcatgttcctccaatacacggaaagataatgagatgcattttcttagtcaccgaggaaggcagtttcttccttgataagctgaaactatttcttttttgtagctcttttcccttctcctttccttggcttccccttcccccggagcttctttagacgtctttgctcatccttaaagtcctgatgctcatctctgtaaaggccaagaaaacggagggtgcccatgagcgcaaaatacgtgttgtgattcgggtaccagtcgtacgtctctttcttcttggccaggggctgctcgctgaacaggtttaccactttcatggactttgagtcagtaggcctggccacttcaccaaagatacgggcactcagacgggacatgcgcactgcatattctgaaagcgacatttccccagcagta

SEQ ID NO: 350 - DNA, 354 bp, Rattus norvegicus
  Genbank Accession No. AA858704
tttttttttttttttttgattaaagaaagaactctggtttttaatagttttgatcattaaaaaagtttaaacctgcatagcaatcatttcagaaataattatttaatgttccataattaaactgtacacaacctagtcgtgggacacataagccagtgaggtgaatggagcagtctggcgcggccccaggagccaggattccagccgagttttgtcactgtgttcatctaagctgtttttttccttttcttttttaaaatcttttttgttttttttagatttagttttttttcattttttgatacttggcacagtctggctccaccgatgggcatgagcagatccctcgtgccg

SEQ ID NO: 351 - DNA, 539 bp, Rattus norvegicus
  Genbank Accession No. AA858758
  misc_feature (1)..(539): n = a or c or g or t
tttttttttttttttttcaagctcccttcatgctctttattaaaactatgcaacattctccatcctttttatctccccaagcaattccaccctagtccaaaaagaaataagaagaaggagaataatagaaattggaccagttcttaagtttcttcttccatgtttcttggaaaacagtgtgtagtcaattcttcttcatccgtggcttcactgtggcaccccatttccagtgattgatcttctctccaaacaggtagaggctggcactcaggatgtaactggctgagaagaagagaataatacccagcgggctgagggaggcaaacacggggtacacccagtttccggtctgaacgtagcgccaaaggatcctgataatgtaagcaaaattacaggcacccagcangctgagtcctagcttcttcgatggatagttgtgtggtctgagaacggtttcagccagggaaaagggaaatatggaggtatgcattgcgtgattaaaccatgctggaaagaaatcatccaagcccttggggtaa

SEQ ID NO: 352 - DNA, 554 bp, Rattus norvegicus
  Genbank Accession No. AA858760
  misc_feature (1)..(554): n = a or c or g or t
tttttttttttttttttaatttcactttttattattcaacattttatacataataaatacaaactttttacagccactgtaaagaaagcgcatctgcacggaggctctctctgagccctgacctgtgcacggtgatgccgggttattcggcctggagagaagggttatttattttttttttttaaaaaggaggcatatatttttacaactttgtttcttaaaataaaattagcagctcttccaaaaatattttaaaatataacaaaagagttcgaataactctgaggttatgggaaactcaaatccatggacaatttggttagctcaacagaatatgggtggcaggaactgctctattatcagcactttgaagatcagcanatttgaaaatcttaaaataccctttcaattttttaaacttaagaataagtttgataaacataaaaagacctcaaatagatcaacagataaatgcaaaaaccaaaaatccaaattcatggagaagattcatcagagtatcattgctaaagttattgaatgactgaaaatccctt

SEQ ID NO: 353 - DNA, 479 bp, Rattus norvegicus
  Genbank Accession No. AA858815
tttttttttttttttatgctacccaatttttgtatttttattacacgtttgtgtgtgtgtgtgtccaacagcatttttagaccttgaaaatcaactttaaaatatataactctttaagggcaagaaacttgaaactattcttagaataaagaacaaaaagatatactgccatccctggtgaatgtttctagagctcaagaaaagtgatgctttgggtgttggtttgaatgagagtgctccctctccccaatagattcatagaattaaatattgcctccaccttggtagaattgtttgggaaggattagaaagtgtgtgctgttggaggaggtatgtccttagagaggggctttgaggcttcagaggctacaggattcccacttagctctctctacctagtacttgtagttgacgatgtgagctctaagcgacctttcactcctccatcatggactttaaccctctgagactgtaagcca

SEQ ID NO: 354 - DNA, 553 bp, Rattus norvegicus
  Genbank Accession No. AA858817
tttttttttttttttttcacagttatgaagtagcaacaaaaataattttatggttggggatcacacagcatgaggaactgtattcaaaggtcacaacattaggacagttgaaagtctgccttatggggctgagacccttcccttgcccctttgcccttggtttcttgtgagactatggcagccaccctgaactgtgtactcttgccactcagagtacagcccgcatctccttattagagcaatctgagaggtagtcattccgcctacactcactttaaccgtgataaaactaaggaagagaaactaagtcacttcaaggtcatgggccagccagtcacaaacagacagtaccagtcaagctgcattgtgggagctagactgtcatcaccgtttaaagaatgggtctccctaggaattaattgcccaatccctgcagaccaggaagtgtccaccacaggagagagaagctggggaggtcacaggaccctccatgttctttatgagtttttctggggaggggttagagttcatgaatcactgggagatgcaaata

SEQ ID NO: 355 - DNA, 580 bp, Rattus norvegicus
  Genbank Accession No. AA858821
tttttttttttttttttgacttttgaataataatctttattagcatattttcaaaggtacatataatcctgagctactacatttatacatttatcattttctctctgaggtgtacatgtagttgactccaacttcgcagtaagtacattttcatattaatcaggaatataaataatttagaacattagtcttgtcccttggaatcacctactaacgtactctgggtgtctcactgtctaattttacaatgtgaaagagtttagaccactgactctcaaggaattccttctaaaccgcaaaactgggcagtgcaagggctgagtcctcgaatctcacacaaagttttagacaacaatgaagctctttatctctgatccattctcttgaagaagttgagtcattatctggccaggtgagaaatggtaagagaatctctaattctaacatttcagctaatgcaaaaagtcgtaagttctcttcacagagaagcaggtgtacacatatttcaagaagaaagtttaccatgatctaatgaaaaggactgcaacccagtgtcaacatgtctccgacgagatgatga

SEQ ID NO: 356 - DNA, 537 bp, Rattus norvegicus
  Genbank Accession No. AA858879
tttttttttttttttttgaacaatgcaaaggcatttattatagaagcactctcagaccacactggaaaggtccactcaggtggatttgggtggagactactctgtccccattcccattcatgcccttcctcatcacctaggcctggagcccccctcccacggcttgcgggctacaaaagaccccacacaggagccttctccaagtagtacacccccatcagtgacagatctctgcatttatagcaagaacagttcccactcctagcaggatcccaaactccatcccaaatgaatacagatctctgctgatggtttcgggggtcaccttgcagggtgaggcagggtgaggcgggtctgcaggaccctggggcgttaggtgaggatgtcttgagcctggtgttctaccagcagctccatgctcttcacatcagtgcaccagagctccagacggtccttcatccccttgatctgctgcaaatccagcactcgaggctgcacccacgtcatgtgaacccgcttgtccacctcgtctatgct

SEQ ID NO: 357 - DNA, 467 bp, Rattus norvegicus
  Genbank Accession No. AA858910
tttttttttttttttttccagttgccgttgctggttttaatgaggttttttttggccacagatgagggagggtggacagcctctggtgtgaggggacaggagacccaatccagacagtgctcaagacatacatctgaaaaagccaccccccattagaaggaatcactgccaaatacttctctgtacacacacttcaatgacacagtggctttccccagaacacagcattcacattaccgaaagcagcaaaattcactttaaaaaacaaacaaacaaacaaaaaacaagaaacaaacgacaacaacaaaaccaacaacagaaaaaacgaaacagaaaccagaagtgagaatcacaaaaataaataagtcagcacattctgggtcctgctggcctgagaaacagacatatccatcatagtctggttatcaggaacagcttcaaggctcaggtctctgaggtccccttga

SEQ ID NO: 358 - DNA, 527 bp, Rattus norvegicus
  Genbank Accession No. AA858924
tttttttttttttttttgccttttgattttcagaaatagaattttattgactgtcaacagggtatgtcatataaaaatcaatgcaggcaaatccattcaatgttcacacaaaaatagttttgatgtttaaactgaaatattttacatcaaacatgaaactctaatgaaatttccctttttagctccatgatttaggcttgcaggtgtgctgagtaaaaagtacccacacaccccacacaccccacataccccttatttaaatggtgatgtatagacaaagcattttcccccgagaagctgcaaagctctaagaacagctttcacacagtgctcaactaacttgcctttaagcaaaagtccatctgacaccattgccttggctgcctctgagctcccaaaagttcccagagattctcatttctagaattaattcaatcctccagcaccttctaggaagctgtctgggggaatgggttaagaagtcgtcttttttgaggtctctaataatgggtaaaaggacccactgt

SEQ ID NO: 359 - DNA, 551 bp, Rattus norvegicus
  Genbank Accession No. AA858928
tttttttttttttttttaaccatttggctagaaattttatttcagaaataagcattcagtgtactttaaagtgattaaaagttatttatggattactgtaataaatacttctcaaaaatagttactctgtaaatacacatacaaacttcagtgaagaactccttgccacaaacaagtgatctgtatcaaaatctgatgtcacagggaagctgaacggtggcctggacgggggacagaatgctcagggagtctaagaagcactccccattacatttttcattcaaatacttcccaaggccaacttaagtttgttttgttagttcatgcataatctgacagggaacataggaagccaagagttttagaagaaaaagcaatcctaatcttagcataagccacaaagaggcttttctgagagctgtcaaagctgtgttgagaaaagcaagcatgctttcaacgagacactgaggaaaacaccctgtccgactacaaatattccaaacatttgaaaacaagtgaatactgagcttcggagtatgttacactgggca

SEQ ID NO: 360 - DNA, 211 bp, Rattus norvegicus
  Genbank Accession No. AA858954
tttttttttttttttttgaacatcaaagcactttattgaccaccagtatcacttctctgctttactcgacggtgtgacaatcgtacaaaatggatcgttccagttgatccacatgcatggataactgatgggcaatgacatacgcacagtcaagaccaggcacccagtctgttacaatggtcatttaagttccctgagcgaaatcactgtg

SEQ ID NO: 361 - DNA, 438 bp, Rattus norvegicus
  Genbank Accession No. AA858955
tttttttttttttttttcccaaatttaaaattttaaaaccggggttcccccaacgggcaaaaagggcccaaaaaaaatttttttaaaatttcaaacaaaaaaaattaaccttcaattggaaaccccagtaaaaaatttttttccaattcaacaagccaccccaagaatttaaaaaataacaacccggggggaaggccaaacaaccccccaaacccaatccaaaaataacccaaattacttcaaaaccccggaaaaggcgttaacctgaaccggaaaaaagggacctttgaacccgccgggaaatttaagattcccaaagcccccaaaaagttcccccacaaaaactaaaccccccctttaacccaagccggaaattgcccaaaaccttcaaaggggaccaattggcattaaaagcctttaagccattttaaccaaccc

SEQ ID NO: 362 - DNA, 423 bp, Rattus norvegicus
  Genbank Accession No. AA859019
tttttttttttttttctgaacagaaagaacttacatttatttttttttgcttggacatagtttgtccttagacatatcatattttggattagaagctttgaattcagtcttcttgcattgtggcaacagtcgctaagattaatcaccatataacaaaaaagtttatatgcttattagaagaaatgagctaaacaatatttcaaatgtaaattgaaattgaattagtaataagcatgtgtatttctaaacaaaggttcatccataaggtttactaataaatctattgtgattttacagacaagtgggataattgatgtgaccatcaatgcattttgaacgaaatggaggtgatcctcttaattttctatatccaggtttacacatgaattcaatattctcccctgattgggaataaatccttcc

SEQ ID NO: 363 - DNA, 436 bp, Rattus norvegicus
  Genbank Accession No. AA859029
tttttttttttttttttagtttttaaaaccatgctttatttttatgtattgaaatacaatttacataacaaataatgctctaatagagtgatttggtttagttttatatggaagcgaagggggcatttttcgagttacaaagcccttctaccaagaacggattttaagaacactttttctaggtgggttgagctaatacacatattcagtgactagtcatgtctgatttctactgagctaacggtcaatggaatcaaaaggcaagcctcaggaataacacatgatggattctttaggaatgcaaagtttttgcttcttcaatacagagagttgaatttacatgcccaccatgttaaaaaaaatactacaaactgaaactaaaaaaaagtaaattttattagctatctctggggacgctttgcaattcttccctggg

SEQ ID NO: 364 - DNA, 353 bp, Rattus norvegicus
  Genbank Accession No. AA859085
tttttttttttttttatcaaatactctttaattttattaactcttggaaaatattccaaggaaataattgaaaatacagaaatattttgttagtacaaagacattacctcaactgtcctcttagtgaaaactgaatatggtctgcgtgatctattagggcaatagtaaaaataaatgtctgtgttacataagagctttgcataaaaatccctgtattgtgtgtaatgtatgatatcgtgtacgcgatgtgtgatataaaagttagcaaaatgaaaaataaaacagcctttgtggattaggcagaaaaatatcaaacccgatgccttttccttatttcagtgacacgtgggaag

SEQ ID NO: 365 - DNA, 147 bp, Rattus norvegicus
  Genbank Accession No. AA859114
tttttttttttttttttgggttttaatttaattttatttttgtcacatgggcagtataggatggtgttagcccatccttactccgcttgcattgactgtgcctcgggtcttaagacgctaaagtgtcatttagaactcactcccaga

SEQ ID NO: 366 - DNA, 376 bp, Rattus norvegicus
  Genbank Accession No. AA859130
tttttttttttttttttagcttttgtttggcctttagtctgaaaaagtgttgcttgaaagtgtacaacagagagcgggtgcaagcggctaggggtcacagagccgccaataaaaaagaatgtccttaaataaagtgttcacagagtaaaaatcagaactaccagtccttccctccaacacaacagagcacaggcacagaaccgatagtcgatgagcccaaggagtaaggaggaggctggagaggacagcagaggctaaaagaaaaggacaaaactcagtctcgggtccaagggctcagaacagtccaagtgggcagggtccggttgactgctagtcccgcttggccttcttcttgtcactgttgccattctcttca

SEQ ID NO: 367 - DNA, 581 bp, Rattus norvegicus
  Genbank Accession No. AA859150
tttttttttttttttttagacagagagaacaagctttattattataatgatttgagatttttgtgcatggtaacgatatacacacatgaatcttgtttctcccgtgtttcaagacagaattaatttaaagttttagtatagactaaagcatccaaaatactgtggtacgtatgtagctacgaacatacaaacacgttgatgcacagcgtccgttctatttaaataggcagtcagcatttcaattcataaaagaacacatgaggaggctgtatcattaccgatggcagaaaacgcaagaccagcggtctgtacacaaaatgtgtgagacagatgtgtcaaggtggaatgtacaaaatcttcaaagaaacgacaaggaaacagacaaccctcattctcataggcagcctcagaaggccgcagtcaggaatgataagaaagaacgttagcaagggacgcttcgttgatagccaaacgccccatgttgtaaagcaaaagcattgaggttaaagctgtgttgcttttgaaaagtaatggaagtgccgtacattcattggaacaagatagctgattattagtctctt

SEQ ID NO: 368 - DNA, 606 bp, Rattus norvegicus
  Genbank Accession No. AA859230
tttttttttttttttttaaaaataaaaccagagaagtttatctgaaaattaatcaggcattttcaaatactctttcacaactgagattttattggtcgaggagtagagtacacagacattccaattcttaacacacgtacccaaactctgaagagccgtagtgttcatgtaccctaattctgaagagccttaatagtgttcacgtacccaaacgaagagctacatattgtttttctgtgaacttattccagtgatgctccagcctcaaacttggccagtttccttacgacctctcataacaaccgaatgctcacaatgctcagttccaccaattcacaattttatgtcacacacagaacatactcaaaatcaccatctttcacagcacattatcacaactgttaggaaaatggactgccatgaccacagacatcacagttctgacagggcgaggaccaaagactggctttcttacaaaatggttctactagaaacacgggaccagatataactgaaaatattccagacacgaatgcatgactgagaccccaaattgccatttagtatgctttgtactgtaggatataaaactagccccctctacgg

SEQ ID NO: 369 - DNA, 489 bp, Rattus norvegicus
  Genbank Accession No. AA859240
cggccgctccaacatcagaatttttttgcttggtgggggaccctttattgtctttggcaaggtctgaagtacagtggttggaggcattggggtaggagggtctgggcacttggtttaagcggtggacagctctggtgttggtgcctgtgtgtgcccattggcatcaccggtgcagccattggtggccggtgtggactctttcttgcaaggcagtgggctggtggccttcacctcttctggcttgatgcctgtgaaagggcgctccatcttgtgctctaacagcatgtggttctggggtgggagccccacgcaagccctgaaaatattctcaatacagctgcgctggcggaagagggcattcaccacagggctgccacggggcacaagtggtgccttaaagaggaagctgagcaccgacagcactgggtggaagccctgaggctctgggtccgagtctgtgcagaagctcacacgctgacacagctctgt

SEQ ID NO: 370 - DNA, 550 bp, Rattus norvegicus
  Genbank Accession No. AA859241
cggcagcaaaggttttttggccttttttttcaagttcaacaggtctttattgaatgtcatagttcaagaggcaaatctggacacactggtatcagtgagcttgaaacaggatcactgatgcattggtgatgataattcctagcaaatgtgattgatttttacttgatttccaagtagctctcaggcatctaacctgtgaaacagtgactgtttacatacagggatgcaaggggacataagaatcagagcagaaaggaaacaacataaggtacttcacgaaaataatgttccaagaactgaaaagcctcgaaggtgtacaagaatccagtaataacaaactcatgttcaagcaggattagaaacacagcgttaaaactggactcagtgccgtgtcttcacgtgcaaacctgccaacactgaagaggatcatcccattttcctgtgactagtcaatacattacgaagttcttttgcaaatcactctgctgacaagtaacaaaactgcactgaaagcctttactagtcctcttcccctccctttctcccgtgt

SEQ ID NO: 371 - DNA, 554 bp, Rattus norvegicus
  Genbank Accession No. AA859305
cggccgcagggcagggcagggatggggaaggtctacatctcgttcaggtccagcagggtctggtccagcatcctttgtgtacagagatgctcctctttggtgcacttcagcttatcttccaagtcatcaatggtcttttccagtttggctaccgatctttcagcaaactcagcccgggtctccgcctccttgagtttatcagtaagaatctttatttcttcttcatacttgtcttctttttgagagtacttttcttcagcagcactcagacacttcaggttctggtccatcagtctgatctgctcatccatctctcggcaacgggactctgccagctcggcgcgttcctccgtgcgttccaagtctccttcaataatcaccaacttacgagccacctcttcatacttcctgtctgcctcttctgcaatgtgctttgcttccttcagctggatttcctggagctccatcttttcttcatcttttagagcccggttttcaatcaccttcatacctctctcactctcatcagcagccttctccgcttcctccagctt

SEQ ID NO: 372 - DNA, 563 bp, Rattus norvegicus
  Genbank Accession No. AA859327
tttttttttttttttttaaaccaactttgtgatctttattgacgggtgacaactttatactccgaggaagcactacactgtgtataacagggacatggcatcagaggtgtggcagactccacagcagacaccggcaagtgtccgtccctctgcccactgttcatgtgcacacagaacatgaatgcgatttgaaatctgttcacggtgataaagttacaatccgccagccacctctgcagcctgacgtctacccacatgtctgacccgcgatgtctatgtcagcagtttccctcttgcaatcatttaaaattcgtttcctgttaggaaccagcaacatatttttttttatatttatctccttttgaagtaagagctatctcatctctgataactggctcatttttgtcatttatcaaaaactaaagggtaaaggaagaaagtgtgatgaattaaaaaaattatttttttaaggaaagataaaattcattttcacaaatttacaagagctgctggtgcgggacttattccactacgcatcaaactgggacccagtgcgagccacc

SEQ ID NO: 373 - DNA, 568 bp, Rattus norvegicus
  Genbank Accession No. AA859343
tttttttttttttttttgttattaaatactctgtttattgatcggcttgtgaggacacaaacatcgcactcagtagaaagaatataaaacacatcaggactgtacctgtacccaggagccaacagcagtcctgcagcagacctggcctccatggcatctgctgttcagcctagctcaggagccacgggagggcagcttctgcccctgcctccttcccctcacccaggttctctgctcctcacttaagcagcagggggaaagcccttatttggtgggacttatttccggaatgaagtgccagggtctccccccattaaaatttcccatggagtcaatgattaaaacaggcctgctgttggcttgtgtttcttggttaggtcaccttaatgtcactaggattcctataatcccacaactgagatttgctgagacgcagtttcaggtctgctattgctttagatgtcagcacagttgacaaccccgagtggattggaactgctgtaggatttccctgccgttgtgtgatgtcatctgctctctgttcttgataggtacacagatagcctga

SEQ ID NO: 374 - DNA, 481 bp, Rattus norvegicus
  Genbank Accession No. AA859346
  misc_feature (1)..(481): n = a or c or g or t
tttttttttttttttttaagagcatatgcagcacacctggctttatttgtgtcaacgcttatttagaccacatacttgcacgaagtggcagggtcacacagaactactttgaggggtttttactcttgggtggtttccttatcttactcgggttaggaacgagtctctttattttcaggggttgtagtgttgcagctggagcttgtccaccttcagcaagcttcctcttaagtcttgtaaggtcatcaaatgaagtgtccaaaacctctttgtcctggctttccaaagactccgtctccaaactgtctgtgagaccttgggttccgtctggaagccagggcacatttaagctgggcaccctgggaatgatggcttctacttcatcagcaaagtccatggtgttctttctgaagcccaaggctancacacattttaagccaatgactggagcaattctctcgctgagctgaggtacctgaca

SEQ ID NO: 375 - DNA, 561 bp, Rattus norvegicus
  Genbank Accession No. AA859362
tttttttttttttttttgagacttatacaatcgctttattttctgtccccctccccgaaatgtaacaacattaaagccattccaacgtagatctatttctacggctccttgcatatctcattgtagctgaagttagatgtttcagtaacgaaatgaaggttatctcatcaaaatggtggcacatctcaaagacgggtttcttgttcctgtaactctctgcctatccctcaaaacctaaaaccccctacggtccagagctaacaggaagacagccacattcttcggggaagaagggacagccgaaggggcggggccgggagaaggacaaggaattggggcagaggagaccttcacttccactttctcagcaggaggaggtggtttctgagaaacaggcttagagtcggcctccctgcggatcacttgaatggggatgtgtccaggagggagatctggtccagctaggcctggcttgctttctggtttgttttcgggttgggtgacagggggaggctctcgatgggtcatgggctgaggcctgtcaaccactgtgtgcacacg

SEQ ID NO: 376 - DNA, 508 bp, Rattus norvegicus
  Genbank Accession No. AA859412
tttttttttttttttttgtattggataattttaatgaaacttgctatttatatatttacaaaaaaaagaaaaaaaagaaaaaaaagaaaaagcccaacaaaaatagatattatagtttaataataaaaagtacatccgagcactgtgggctggaggtgggatacccacctaacagcatgcccacactaacatgccatctgcacgcctggagaaaggacagtgagaaagagacactggctcagccagggaacccattccttccctcaggttcagggtgcttggatgccgatgcccaatctttcacaccctcttcctggtgcagcaggtggctgaacacaggaggctgtgggggtcgggtgacagtggggtcagagggcagtacagggcaggatgaaagacacgaggaatcccgagaaagggctgatgggagagggtaactgggagttagacaggagcagcaggcctctgtcgtaatccctggtattagagaaggaaaaacgaatgggaa

SEQ ID NO: 377 - DNA, 594 bp, Rattus norvegicus
  Genbank Accession No. AA859458
tttttttttttttttctgtaaacagactttattgactctggcgatgggtgtgcttcaggtggggatccacagaggggtttgacaaggctatgccctagggaccaggttggttctgaggggcagaaggccatccacccactcacagggctgctccaggagtgtctgccatagctgcttctcctcaggtgtggagtccatccagggcacctgaagcccataactactgccagtaccaaggctgagacgcgtgccccccaactgtcgactggccagggccccatgatcccacaaggagagctcagcacaggcctggcgtaggtcagcaggcccaaagccatcataaaccatggtgtggttgaacacagggctgagacttcgtcgaaccactcttgtgcgttggcggctggcccgactgtcatcgggcagcactgagcattgaatgtaggtatccaaggatcctggccgcagtggtacgaggccctgagcttcctttatccagaaatgtagctccccacttggaggctgccctcctccctctgagccggcagggatatacttgagggacagagacagcagtccacggctggggaactc

SEQ ID NO: 378 - DNA, 451 bp, Rattus norvegicus
  Genbank Accession No. AA859468
  misc_feature (1)..(451): n = a or c or g or t
tttttttttttttttttatattaaatgactattttatttacacaccctatcatatccataaataattgcgccctctttgtctgcacaatggttccttgacatctaacgattacagagtgaacatctaaaagtagatgggggcttactccggcttaggacatggtctcttgtgtacactcaatatgcacacccagtaacacagacatagaccagagagggtggctcccagggcctcctgggctcccagcaccaatgggaaaaccttgcccatacacaggtgagttcctgacaactggagaacagagagatgcaggccagggctccgccccacccaccgcagggccccgcccacctctggagcagctccacctttgttcaccctggaaggcatctctttggattgcaaatactttaattcacagaggggatggggtangggctggggtggtgt

SEQ ID NO: 379 - DNA, 425 bp, Rattus norvegicus
  Genbank Accession No. AA859519
tttttttttttttttttacagtgtaaaagagtaaaacacattttattatatatttttttttctttgaggaaaacagatgtgtgatagaggctgttatgaagtcttgaagggatcaaaactgggcaaggtgttttcaagccagcaagctccagttttgcagaacagctggatgacagtcgccaccagtgaagaccgcattaatacccacaagacagattgcagccgccatcacacacccgagacacagcctcagcagaactgccgggacttccagccctgggaagtaacctcggacggagggagccatcgcatctgggcatgcagtgaagcgggataggtgaaagcggcaggaggaggaagagcatgcgctaactccgctgggtacagagggtacggggcccacacttcacggctactggggtaaa

SEQ ID NO: 380 - DNA, 470 bp, Rattus norvegicus
  Genbank Accession No. AA859520
tttttttttttttttttctaaatggaaaaaaatatccctagtcagaaataaactgacaaatttacattctcctctcttaaaaaagtaaataaaataacattattcaaaatgtgaattagctataagacatacaatacaattacatagatacatatcaatacagcacattcaatctgccaaaacattaatgattaaaagccagtatggatgttgcaatatcaagagagatgtatgtacaacgatcagagcatttgtaattgcactgtacctacaggcagtctgttaattaaattacaggggctttctagagcaagggatagaaaagccggggagtaacacatgagaacacttgactacagtcagcagtttcagtgctcatacagtgagctgttccctctcccagctttgctattcaagaaaggtgatttacacggaagttgagattagtgccaagctctaatgagaccaga

SEQ ID NO: 381 - DNA, 548 bp, Rattus norvegicus
  Genbank Accession No. AA859536
tttttttttttttttttactttttaattgtttaactttattactgtcgcaccatttatacaattacatataatttcaatgcatccattgtacattttttttattttttgttttttttttttattttccattttccaatgggtggtgtgttggtgtctgagacacaggtggaagaaactggagctgcaatgaaggcagacttttttatttttcatttccactgaccaataaacagaactacaggtgcacccaaccacggacatgcattaactcgtcatgagaaatctaggtaggctaagtatgatgagagaatgtttgtcactcccaaaaatatctggagaggaagaatgtagggttggcattgagatacaatgtggacaagctaagtgggctccgtctgaaagttggcattcatccacaaacgttaaaaaaataccaaaataagaaaaggctgtaaattaataaggaaacacagaaaatactgctttcataaagatctgattgccttggcactggccctgtgggcagaatcaaacgcctccctcccca

SEQ ID NO: 382 - DNA, 139 bp, Rattus norvegicus
  Genbank Accession No. AA859562
  misc_feature (1)..(139): n = a or c or g or t
tttttttttttttttttgagataggaaaataaggagtttaataattggagggggcagcacacacactgcagcagtcacaccggtgcggtctgccagcaccggctcctgcagtgtcgcagggaangangggttggcatga

SEQ ID NO: 383 - DNA, 461 bp, Rattus norvegicus
  Genbank Accession No. AA859577
tttttttttttttttttcacagtcctttccactttattatggccccgtcctggtcttccagaacgaatggctatttaacacataacccaaacaccctcaccatggatcctgtcaacattcaaggtctcccgtttctttctcagcacattaatcagaacagaaaataaaccgtttagtccatcccaggaaaagcaccattacaataggaaacaaaacacatcaggaagcagaccagacagacaaagaatgacttacaatggaacataaataggcccccaaagtgtgtatacatagttatccatatgtgtatatatatattaaagaaatttggtttctacccccaaaaagttattcagaaaaaaaaaaagttccgtctgagccaaggaaggctgggtgcagccgccacattaccaggtgaatgtggctttggccttccttctgtgtagtaactactcctgcca

SEQ ID NO: 384 - DNA, 533 bp, Rattus norvegicus
  Genbank Accession No. AA859585
  misc_feature (1)..(533): n = a or c or g or t
tttttttttttttttttggtggtttggaattcttttctcttttgttaaaagaggggtaggaaatggggaccaggtacccctgggctctgggaaacaggcatgcagggaacccttgcaggcaggggctgggtagaagagtcctggagtttcccataatccttcgcaggaaacagcaatgctggcagataaggaggtggagtgaggcagggcccttcaaacaacagggtggcgggccaaggggcttggggctcactctaacatgcaaagtccagctgccccataaactaggttgcttttgaagagcgacatacgtataaatacataagacacagctacacgcacacatgcggagaaggctctgcattcccaagggtanggatctaggcctactggccccaagacaggagtcatcatgtgtctgccaccaagtgattctctgaaacactccaggtggtggggccaggcaggtaagtcttcgttgggatggctgcttggtctccaaggtgctgcccactaggcacccaagccacttt

SEQ ID NO: 385 - DNA, 423 bp, Rattus norvegicus
  Genbank Accession No. AA859593
tttttttttttttttatgatttgaactttattcaaaagaacgattatcagaagcagtcaaacaaagacacatacagggcagggtccagcagggtctcgagcacagaggctccctgtcctgccatcacgggacaagaatgcatcagtctgaagcagagctgtgtgttcatctgcagggaagctgctctaggtctcaactggagatagaattgaaccatcgtttgtaggtagacaggattcacagagatgttgaactgaagtcaaccccctcttcttccctttagaggtccttctagctcaaggcctcaaccctgtaatcgatgacaagctggtagtggctagctaccatcctaggtcatctctcgacataaattctgctgtgacacacaaggcagacaagtaacaacgacactccatactctca

SEQ ID NO: 386 - DNA, 314 bp, Rattus norvegicus
  Genbank Accession No. AA859612
tttttttttttttttatattgttatgcctgtgatgagtttagggttgattgttaatagtatgaggggaataatgtgtacagctatgagtgttaattctcgtgtgtgggaaggttggaagttgtttatatggctggttggtggaagcccttctttgcgcagttgaaattaaatcttgctgactaattaacttttttgttgatcacaataagggcaaagaaaaaagatcaaattagctggacacatttctgtaaatatttttaaaaaaatgctgccaaatgttctgtatctatgggtttcgtatgatcgtcaacat

SEQ ID NO: 387 - DNA, 530 bp, Rattus norvegicus
  Genbank Accession No. AA859616
tttttttttttttttttgtggtaaatagtaggtatttatttgaaatgaaaaaaatacttaagtacctggactattgcatttagcacgggctgcgactgcctacctttatgcatcagacagagatacagtgaacacccagaccacagactgcacatggtaggaattcctcagcctttacacaaccaccagagaaacagagatcggattttgcaatacagtacaaaagtccacaatcaatccagtcttagccagtatcttcggtttacttctgttgctgtacaaacgattagccgttactagggcttacaagttaatgacaggacagaaatatacatggcactgacacaaaaagtcagttgtgttaatggtcatgcaacaagtaagcaaacttgctgaaattaaaaatactttctaaaaacagctttaacagcgtaaatattttatacacagttgtttaccaagaacaaaatgtatttaaatgatacaaagcaaaaataagtttctaccacctttatacataagaaagtgca

SEQ ID NO: 388 - DNA, 400 bp, Rattus norvegicus
  Genbank Accession No. AA859633
ttttgtttttttgttttccaaaataagcccagaccattaacaattgaaactccaacaaataagtcttctccaacagcgagaaaaatgtacagttactcaaagctgattctgccagtggggctggggacagaagtgggcagggtagggtgaaaccacagagggggatggagggtgggagggtcagggtcctgcctgtcagagtagggccgcctgcgtcctgcactctgctgtcaggtgggtgggaatgatgaagggttgggggtaagggagatgggctccacactgctcattcccccactgtcatgtgtctgaagggcaggctgcacaaggtggctgtcagtttgtctctgaggaagtctgctctcttggggaaggacaggtgtcagcagtctgaaggagg

SEQ ID NO: 389 - DNA, 545 bp, Rattus norvegicus
  Genbank Accession No. AA859645
tttttttttttttttttgagaaaaggtcttcctatggtctcaaactcagggtgatcctcctgcgttggtcttccacatcctgggattacaaaagtgtactaccttgcatagcttccaacatgtttttaaaagtgctctgaaactttcttcaccagaatattttctctgagtgtatgtgagtgaagttatacatatgtacacatgcatacagaagccagaggtcatgaatgtcttcctcagttactctctatcttattttttgagacagggtgtctaactgaatctagagctcacagatgcagcttctggctggccagcaagccccagggatcttgatgtctcctgcttcccagtctggagtggcaggcacacactgcatgtcccgttttttatgacagtgctgcgagtgcaaatccaggtccttgtgcttgggtagcaatcgctccatctactgagcatctctccgacctataaccacactcctgcgctactcacagtctcatggcaaaggcaaagaacaccggatctttccgtcaacacagatt

SEQ ID NO: 390 - DNA, 283 bp, Rattus norvegicus
  Genbank Accession No. AA859648
tttttttttttttttttgcgactttgaaagattgtaatatattctgtggaaaacattcggcagagcaaaagccctccctgggccctcccgcagtatgcaaccagtggaacggtctggaaatctgcagctctggaaaggtccctggctcagtccttgaggaatgcaggcagctatatgggaagaacctgctccaggatggttctggatgagatggggatcctatcagggaagatgacttcaaattcgataacaaggtctccacgtttctcaggtgttttgggga

SEQ ID NO: 391 - DNA, 371 bp, Rattus norvegicus
  Genbank Accession No. AA859663
tttttttttttttttttaagagcttagaaaatttatttttttcttgaaatgacacacatgggcagggaggtaggacttggtgtaggttggtggaaaccgtgtcccccagcatcccagttttcctctcagttctttgatgagaggtctcctaaagactgggaggcggagcggagagctcccagttctaagcttggaatctaacttgaagtgcggagggtatggggatgtggtgggagccatgggactttgttctctggtaaaaccaaaaaatcaaaacaacaaaactccgagtcagctcggggatacttaatttgcatattggatgctgggtttcaggaaggatgttgtgtgttggtccttgcctcgtgccg

SEQ ID NO: 392 - DNA, 417 bp, Rattus norvegicus
  Genbank Accession No. AA859665
tttttttttttttttttcacgaccttttttgcttttattcttttggtagatattcaaggcatgggcagatgctcacagagcatcgccaccacagagacaagttcctgacagtgcccgtgagtctgacgcctgtcagctccacaggcacggggctgcacagcactgttctgaaatgcgtccctcatttcatctttgggaagctgggcagacccaatgcgaacaggccgggcctgtggtaacagacgcagcagcttgcttgctaggaaccaattctccatgctaaaggcaaacaaactttgcacagcacctccctagatccgcagcccaagcagcagacaggcatgagcagacacacgccgaaacgctcagcagagcgctgtcacccacctcaacaacaggcaagcagctttgggctca

SEQ ID NO: 393 - DNA, 483 bp, Rattus norvegicus
  Genbank Accession No. AA859700
  misc_feature (1)..(483): n = a or c or g or t
tttttttttttttttttcaagctccatcaacttttactttcatgagtaggagagtgggggtcagctgttcgattctgtgcccaggacagcaattgctgcctggcgcccactctctatacagtcattgacagctaccccctcataggaggccccagccaaagtcaggggcaacctctgggccgtcaggaattgcagagctgagtctagtttttgccagtggcctagtgtatactgagggatacagtttttgtgtagatggaccaagcaatggcttggttgctctttcagtcctaactgtgtggcagccgcttcctgtgctgctcgttggaatagctctggagacaattcatggccattggctttcagcttctgtaaccagtaacctcccaacatcacagtcagtctgaggcctgnggggttcccatcctgctcaggaaaagcaaccgagtcatacacgattcccaggacggtcgggtcttctga

SEQ ID NO: 394 - DNA, 477 bp, Rattus norvegicus
  Genbank Accession No. AA859722
tttttttttttttttttgacaggtacacaattttatttaacagcatttaaagtccacctcagaagagggacaccagagaattctttttttttttcatttaataaatacaaatgaataaaaatactttgttttgtacagagaccgcctctcctctcttcctcccccgcttgcttgccaggaagggctgaggatggcaacatgccctgtggccgctctgcatgggcatctccccacacagaccgcttctcacagagagggcttcatctcagtggcctacaatactatttcggtacaatcccctcctcctgcacctaccaacaccagactcttgcctttcaaacagaccgactcccctgggagaaggaaagcacaggcccccacaggtgcccgcctggagccccatagctggggactcgtgacaccatgggacatgcacgctggccactgacatgtgggcacgggacagaagcagacagt

SEQ ID NO: 395 - DNA, 518 bp, Rattus norvegicus
  Genbank Accession No. AA859796
  misc_feature (1)..(518): n = a or c or g or t
tttttttttttttttttagtcttgtaccccatggagcccttgggccaacacaaggcccgtgaggctgtccaagttttggggcttctctggcactggcaccgacagccagtaagaaggcctgcgggagctgcaggcctggctcagggtcaaagtccctggttcctggagagtatcacagcgcatcctcttcagtgcagcccccaccaatcatgaaacgaaattcctgcaggtttgagactccatggaagtgaacaaaggcaccagcaaccacaaagatgtggaagagctgatgagagtgaaaccagatgtcacatttgccaggaaagaagcgctcagggatacgggccgcgtagagggcagctcctgtgatatagaggctagccatgagcattagccagcctatctgccctatggtggcagccttcaggaacccttctgagatgacataatgcaaggtanggatgattccactcagacctaagcccacgaacactcctgctctgaccccccgatactga

SEQ ID NO: 396 - DNA, 472 bp, Rattus norvegicus
  Genbank Accession No. AA859804
  misc_feature (1)..(472): n = a or c or g or t
tttttttttttttttttggtttagcaccatttatttgtgatctcagctgttgtagtagttgctgctgtcagcctgttctcaaaggtaacatgctcttccgttcctcttgtccaggacagaagggtcttccaggtggcacgccaacagaacaagagactccgatgacgccagcttcaatgatggtgccatccagagagggagagtgtcatggcacattcaatcgcggcttccagaggttttgaaaaaggagcctttgggggcccagcctgcctggcattttgatgctgtcggtgtgagttttgtattccataatggtgttgggaggtangttaagcacgcgccgaagagtgtcccggattcgggctgtggttgcttggtcgctggcagtcttattccatatagaaataatgtcctcctggaagcggacagagaccacagccccgcagatttcctccccaaccatgaactgttc

SEQ ID NO: 397 - DNA, 477 bp, Rattus norvegicus
  Genbank Accession No. AA859806
gttttttttttttttttgttttggagctgacttttattgtacttgttgctttaccaccaaacagaggcatgacaggcctgctgtgtgatatatacatatacacatatgtacacacactgacacacaccacagcccacactcacagcatgtgacaacacacactgagcttgtgaggacagtaaagatgtagattttgccacttccataggaggataattcaaccaaaataaaaaggaacaggccaatgctgggacacatgggttcacagctcaaacactggaaaaagagtaagatcagtcacggtttacactgttcacagctgtccctcaataaaaggtgtactgaaggccagaggatgatgctcatggcctaccagctctctgtaccacagcacctacaccctccatggagagcttgaatgattaagtcactatcgctggagactgccagctccaacactggcagctctgttgcaca

SEQ ID NO: 398 - DNA, 504 bp, Rattus norvegicus
  Genbank Accession No. AA859829
tttttttttttttttttgagaaatagaaagctattttattaacacgctttacatttacagttcattagctaatcaacatcaacatgcaaaaataagcgctagatacaaacctctacaatatggttttgtgtgaattacaatggttcatgtctggaaaacccgtcagtacttactttagctgaactatcagtttccgtaatgaaaagcatgtacactctaggactacggaaccacctggcaaggcctctgcagaaactcagtccagtggctttcccgtgaatacattctcaaagcaggagataaggcggtgctggaaggtgagacgctgaacctgtgcacagacacagccccagacaccctggccacaagggcagctcggaagcgtttattcagtgtctcatagggcaccttgagggtcgggtactcctgcaccttcagggtcatggacagctgggccgccgactcctgcaccgccatcttgggccggccctcgtgccgaattct

SEQ ID NO: 399 - DNA, 426 bp, Rattus norvegicus
  Genbank Accession No. AA859877
tttttttttttttttttgctggttcaactatttattgtggagtactttacatgcaagaacacaaattagagacagtgtttggaagcagaaccagtggggtagggagacacaatagttgtcactctgagccaccctccagaagcagctctacccacagaaacaggacagggacaagaatctgactcgtgagacaacagaataacaaactcaacaccatcttttcagcagctccaaagatcctcagatcctcacaaaggaagtgcaaactttaggaagaaactacccagctctcccagagagcctgagggcatgagtgtggcaggagggagcagtcaggacagaggattgacagttattcttgggagctaggggaagcctagcttagaccccatgaacgtgaagggctggggatgcgcactgggctaa

SEQ ID NO: 400 - DNA, 554 bp, Rattus norvegicus
  Genbank Accession No. AA859885
tttttttttttttttttgttttacctttatttattaatagtaacaaaaatcagaaataacaaaaaccagttaaatgaaatatggaagcacagtaaatacaaacgcatcttcataaccacacgggcagcagaaatctgttgaaactgttttctgaagtttaactgtttaggtcattggcgtcaccaaggcattcagagtgctcacatggacttcgctgccggtggacgagcctgcttcccaagactgacagtagcatccagagccctggcatatgcaaagacctccctgggtcctagatcttgagagatactgatgttaacaaaaccaaaccaaaccacagagcaagcccagggagcctgcagtcttggcctaaaggtttctagaggacactaggaactgaagtagatgttatcctgcttgttggccccatgcaaacctcaacccaagtcttcccaaaccaggttacttagcttttcatgaatggttcaagggtcacaggaatctgtggtggttcagacaacagctgccctagttacacagaagcagcagaactt

SEQ ID NO: 401 - DNA, 599 bp, Rattus norvegicus
  Genbank Accession No. AA859897
  misc_feature (1)..(599): n = a or c or g or t
tttttttttttttttttagccagagatgggatctttatttcacaagtttcaagatacagtacaaaatgagtctgtacatctctctattaacaggatttgtttacacaattataatacacttcaccagccgttatactgcattccattaaatataaaataaatttacaaaaagtctagtatggtgttccttcacaatgtcagcttatgttctttaaatacgtccctcagcgtttatagtggtcatattttgatcatatcaacattgtttttaaataaaagagaaatagtgtcagatcgttcaccaataaatagtaaaggaagaacatctgaatgcctccttgaacataaccaaaggggcccttcatctgcatacaaaaccggcttttaatgtgtaaacagtctctttaagatacagatcattggtatatggggctatttcactangggtattttcttgaaacccctaatgggtgaagacacttaggtcctttttcaaagaacactactcatttaaaaacctgacaatatagcatccagaaatagtttctctcgtatctgatcaaattttttttttgcataaaattgtttttttttttttt

SEQ ID NO: 402 - DNA, 370 bp, Rattus norvegicus
  Genbank Accession No. AA859899
ttattttttttttttttaacttccaagtttttattttgttttgtttgttgtgtgtttgtttgtttgtttgtttgtttgtttttgagacagggttggcctcaaactcactgacatcagcctgcctctgcctcccaagtgctgggattcaaagcaggcgccaccaccactacctgactcatttctttaactttcaaaagtagatatctcctgagaaatgacacccagcactgtcttctggcccctccacgaccccatgtacaaacacatgcctgcataaacacacatgaatacataagtaacctggtctggctgttttggaatatatgctatgatttggattggtcccccgaggcactattggaagatagta

SEQ ID NO: 403 - DNA, 491 bp, Rattus norvegicus
  Genbank Accession No. AA859919
tttttttttttttttttcattattagccaaacctttaggcctgttatattttaaagcaacccaatatagttacaacagaattgcaggaggcttagaataacagagccatttgtcgggggtcatcagggagaatactgatagtatcttcggctttgccacacaacagacacagcatggtatattcctgaaattcatccatgatgctgaatgtatactcatgtctggctatgacatgatgacaattcttacacaaatggtcataggtaactatttcttctccatcttcctctttcagggatctgtttgtgatcagcataaagtcccgcttactgcacacggcgcatcctgcaaagttcagtaagaacgagccattctccagacaggtgttccccttatttggatggaaaatactgcatccccattcctgatcagtcttccttttcacatcgattaaatagcactctgtcaatcatacttcccaaactgcaagt

SEQ ID NO: 404 - DNA, 568 bp, Rattus norvegicus
  Genbank Accession No. AA859920
tttttttttttttttttattttataaaattagatccaattttattaaggatttcagattacatatttcagacttctagaggagaatagaaccacttggggactgacagatgtcacaagaaagactgacccctgaagctccacacagcattttcccattagacaagagccagctacctctgcactttggcaacagctacctcctacagaaggaagggaagactgcgctagtctgtaaggttactgaagaggagatctgtaagttataaactttaatgttcaagaaaataggctgtgtttagatgaactatgattacagaaaatagcacaaaccatctaagaaaaagcaaccaaatctttttcaaaatgaagaaaatatagttggttaaggatttccagtagttaaaaatttcaggaagattggctatagaatgtattcacattctaagagcttaatattaaaatctcacaaaaagaactatcacctccaaaaaaagtttcttcaatgtaaattttattaacagcaggaacttcctccaagtccaattcaattaaaccctgtcagagtgc

SEQ ID NO: 405 - DNA, 331 bp, Rattus norvegicus
  Genbank Accession No. AA859921
tttttttttttttttttgtttttccaagttgcattaatttaaagcggtagccaacaagcagctcgagcacatggccatcggcgaatgctccccgtggctgggtgcagctgcgagtggggtccagcagcacggtggagagcgggacgaggcatttggctaccttaagagagtcatagttactcccgccgtttacccgcgcttcattgaatttcttcactatgacattcagagcactgggcagaaatcacatcgcgtcaacacccgccgcgggccttcgcgatgctttgttttaattaaacagtcggattcccctggtccgcaccagttctaa

SEQ ID NO: 406 - DNA, 523 bp, Rattus norvegicus
  Genbank Accession No. AA859931
  misc_feature (1)..(523): n = a or c or g or t
tttttttttttttttttcccttttaacaacagtctttattgataacttcccaacatctgtaaacatcaggtataaaaatattccattcagctgttttctaaggtgactggccagctcctggagataacctgatggaccttggagaaacacagctcctcacagtcaaggctgcctcttcctccagaattcaacacaacaggaaaaaagtactccacagagggaaaggagacatagttgaatcagcagctgccagtgggtaggaacaagctcatccctcctgtgcccacccagggtgtgggggatgacaatctggctttggtctctggagaccttagaagcactgttcaaagctggcccaggctgatttcaaggttacctctacccatccccactgccccagctagacatacatgctggcatacgaagtcctgctcttacggggagtggcaggaattangaaccctgcctacaaaagaaaggagcagcaaagctgactgactgttaccctacgagaaccactgct

SEQ ID NO: 407 - DNA, 506 bp, Rattus norvegicus
  Genbank Accession No. AA859975
  misc_feature (1)..(506): n = a or c or g or t
tttttttttttttttttggtaggtgattttctttaataattttgttaaaaactccagtttttttcccagagatatcagcttctttatgcagctagctccccctctgatcctcaagactatccagatttagggttggggttatcaatccaatttattaagtcctcagggaggaggaaggccacatccttccatcatagaccctttggccatcttgacagtttctgctttctcctgtctactcagatctgcctttgattcctcagagagagggatctgctgtcttgtgtgccctgaaattaacacccaaaaagagactagaaatcctcagggtgtttcttaggtctcctcaggaacagccagggacagaatgatcctaagtatcaggccaggcacagcaagctggagcaggggtagaacagactaaagttctttaccacaaaggaggggaccacactgtanagggaaaataaatagaatagcccagggtancagaatccaggcccccc

SEQ ID NO: 408 - DNA, 499 bp, Rattus norvegicus
  Genbank Accession No. AA859980
tttttttttttttttttgcaagggagggaagagtttatttggctttcaattccagttacagttcatcattttggggaagtcaaggtagacgtttgaagcaagtaccatcctgtctggtcaagcagagaaataaatgcactgaaggcgcttgctgctcactttctaacaacccagaggcacacttgttggaacggccaatcttctgactagaatagctagaatacctaccccaccacctcagcttagaagaggtcactgaatccaatttccattacaggattggtcttgatttgatcaatgggaaaccacaagacaacaagcaagcaggggtgtttgagcgaagagcctgaagttcaaaccagaagccacatccccattccttgaatggatcatattgggggccgtgcataacggtgcatgtctttaattcaagtactcaggaggcacagaaaggtggatctctgggaattgaagccaagctcatctacaaaacgatttt

SEQ ID NO: 409 - DNA, 487 bp, Rattus norvegicus
  Genbank Accession No. AA859981
tttttttttttttttttaaagttctgatttattgcattctgtatcaccacgggcaggggagggcctgagagctcgttctaaagctttattacctgagatttgcattccgaacaaccaggatgggtgactaacacacctcacaagatttgggtttggctctgatgaaagaccatgtaccgacctggaaaggggctacccgagattagagaggatcagctaagcaccgaggtccggggacagctatggtagactatcccggaactcaagcccccggacagctctttcccagggagctgctcatgtcagccttagagctctgtacggctcacttctcatcgtcccggccgtagttaatggtttgtagggcctgagctatgagcactgccatctctctggtgccagcagccaccactctgcacgacatgaggtcaaggggtccacctgaggtgtcaatcacaatgccacctgcttctctgatgatgactgt

SEQ ID NO: 410 - DNA, 550 bp, Rattus norvegicus
  Genbank Accession No. AA860024
tttttttttttttttttcaatgttcagtttcctttaatgacccccatctcccttgaaggataggtgcaggcagctaggtgactggcaagacatgttcacttgaagatcttgccttgattgacggctttgccaacgtgctggaaggccccctcccaggaaaagtactctcgaacgagggtctgggtctcctcgctaccaggatccagtttccgccatgtatatgactcatagtccacctgccaatctggactcagcggaaaggcaagatcttggcctcggaagacccaaaccccagaaatggagctgctgttgttggttccaaacaggataacactagcaaaggcattctttctcagtttgtccaatcgctgaaacatcccagtgatgaggttacagctcatgaaggtctgggtgagctcttcagggaagcggtactcagcataccacagggaccagccatccttatcaaaatgctcccaaaaatatggcagcgccacagagagggtgtcctcattggagtactttcgcttaaactcatccaacacaaagg

SEQ ID NO: 411 - DNA, 442 bp, Rattus norvegicus
  Genbank Accession No. AA860030
tttttttttttttttttgacattccacaaagaaatatttattgagcgcctgccacgtgccaggcaccgtttaccccccaatgagaaaacaaaacggaacaaaaacaggacagaggcagcagaaagaaacaaagggcagttggaaaaaagctaagggaactaagcgcttgaagagctcctggatggccgtgctgtttccgatgaaggtgactgccatcttgaggcctcgcggtgggatgtcacagacagccgtcttgacgttgttggggatccattccacgaagtagctgctattcttattctgcacgttgagcatttgctcatctacctccttcatggacatccgtccacggaagacagccgcaaccgtgaggtaccggccgtggcgtgggtcacaggcggccatcatgttcttggcgtcgaagacctgctgggtgagttca

SEQ ID NO: 412 - DNA, 533 bp, Rattus norvegicus
  Genbank Accession No. AA860062
  misc_feature (1)..(533): n = a or c or g or t
tttttttttttttttctgagagccacagaagtcctgctaacacctggacaaggagcctggtgtagcctcctacaccacacagcttcgccaaagccacgaagagaaaggcatctactcacgtgcccaggaagacatccttggcctcagcatagttcttacacacttccttatcctcaacaaagtcagcagctattgagggcagatcggcaggaatgttgtcatgttctgtctcagcgagacactgggatttctgcagcactggcttatcacagcaagcctgcagtttgctggagatagtggcctggttctcacacatgtacttggcaagttctgcctgtgagaatggaaggcaaaggtttcagagaaattctcttggctacattttatccccgcaccactgttgggctgggatagcctatccatcctgctctgagccattcgcaaccaaagtggcttctagaaacacactctcagccacgaagtgcttcagtactatgaccagaacattccaatgggattcgaganagactgtt

SEQ ID NO: 413 - DNA, 308 bp, Rattus norvegicus
  Genbank Accession No. AA866240
tttttttttttaaatttaaagggaacctttattttaacccaggaatgggtacacaatgacacaagggatcaaaaattgttatatgaaaaaaataatacaagtggatttgtgcaaaaaccccaaaaactgcaagtgctttcgggatcttaaaacaaaattcaggatgggtgataaagggaagggactgggtaaaaacctgaaggggatttcaaaagggaacacatttaaacccaaaatgcccgatttattcaggaaggaatgaaccaaacctggaaaatgggtggcaaaaaggcaaaaccattcaaaac

SEQ ID NO: 414 - DNA, 430 bp, Rattus norvegicus
  Genbank Accession No. AA866264
tttttttttttttttttagaggaaaaaatgttatttttatttcaataagtggttcaaaacttaatggcatttctgtaggttagtaaatgtggctctaattgcctgtcatttgttagatgaagtatggatcaaccagaagggccgtgtcgcattagcatcacctccagcagtagcagcaaggtcattgtcctcatttaggagcttcaggtagacgccgcgacaaagactctcatactaatagtcatcagaatatggataattagggtgttcagcagctatgttcacaggaaaatacctgaagtttctgttcaggccatctaggacttccatatcctcggaaggcaactgaaattcaaatacctgaatgttctctttcatctccttctgttcataagtttgggccagggcaacaaccccacgctgtacctgg

SEQ ID NO: 415 - DNA, 493 bp, Rattus norvegicus
  Genbank Accession No. AA866276
tttttttttttttttttcatctttatattgagattttttctcttaaaaaaaagaacattatagatgtgaggggtgggaaaggatgactgacagcaggtgctatagaaacccaaagctccagaaaattaaaaaaaaataaaatatatatttatacatttatatatatatatataccaagtaatgcatgtgagtcccagagaagcagaaagcagcagcaagaagcaactagcacacaaggacctgggttcatgtacagcacacacaagccattccaatcctgataacccaccccaagcccagcccccacccccaagaaaagatgtttaagaaacttccctcttaaatggggctgcacaactggggtactgtggcacatctgtaatctcagcacctggacggtggagacgttaagataagggttcaatggaagccttagcgacacaattaagtttgagaccagcttgggctacattaagaacatctccaaagctat

SEQ ID NO: 416 - DNA, 405 bp, Rattus norvegicus
  Genbank Accession No. AA866302
tttttttttttttttctgggaaggcatctttactcgaaacggatcaggagaagccttgccgtagagggggcgtggccatggtgtgggtggagccctgaggtccagcctttcagccagttggagctgattgacttgtccagcgccttgcgcggtctgggtgtgggtggagcttacattccagacctcacaccgttggtctccaggtcagtgaggttaccccgtagggcttgctcctcttcgaaagctttgaacagagagttgaagttacctgctccaaagccctgtggcgatagaaggcaagtatgagctggaaacttagcaagcagttggtgctacctgttgggtgcaggctgtacctggtggttgtggcgttggatgacttccaagaagagcgtgggccggtcc

SEQ ID NO: 417 - DNA, 480 bp, Rattus norvegicus
  Genbank Accession No. AA866321
tttttttttttttttttcagtacagaaatgtttaatggttgaattgtacactggctctgacatatccagaaaggcaacttttcatgttccaaaaatagattttatagaaagacttacatattcataaataggtaatgtgaaaattttcacaatgtgcctggcatccttgggctggcaattctgcccctgcccaggccctgcaggggtgagtttggctagaggcccactgctggcagtatcctgggataggataatctattcaatgtgaaccaggggcttccagtagatcccctccagctggggtctgtgtccttggaaacagacttccacccaaagagacatgaagcccctcctctagtacctttagtgggcaagacctctacaactgctgcgccccctggccctaccagcccttctgtgggaacttcctcaccaacaacatcaacctccacccccgcctgctgttcagtaactgttcaa

SEQ ID NO: 418 - DNA, 327 bp, Rattus norvegicus
  Genbank Accession No. AA866362
tttttttttttttttttgaagtgcggaatgtttacccggcaaagaacgagggatcatgggcattagagggaagtacagaggtgatccagaccgtgctggtgcttttgtcatttcttccacgaggaccttactacttgggaagagtagacgaccaagactcaggagaggtcgtagcatttgcaaaggcttacacagcacggctggactgaagcccagttccaattgacacccaggcccagaggggcaacaactttggtctacatcacacagctagacagaagaaaagacgaaatgatgtttctctttgggggttggtggggaaactga

SEQ ID NO: 419 - DNA, 519 bp, Rattus norvegicus
  Genbank Accession No. AA866426
ttattttttttttttttggaagtagaaatatttattcagaatataagaacgtttgtaaaatattataaatgtctctgtataaataaatggcgtttttttttttaaacaattctatatcaaataacacaaattagctattttacagcagctaaaaactaaaggcatctggaaacatttaaagctacaagtgaatctaaaactgacaaggtatagtacagtgtgtagtagccactttaaaatgacactttccatacaagcagaacagtactgacagatgcagcagacagatgtgctttaagaacagtgcattcaagcaggattttctaattcaagtggtataaaaaacattttcaattaataaaaaagttaaatttcatgcaaagtaagttaatatgtctaaaagcaaattagaaatagaagtgaacatttgtagttgttgcatcaggaaggtaagtgccccaacaggagcactgcagaagaacgctgcggactctacagaatcccttccacatctcaacc

SEQ ID NO: 420 - DNA, 301 bp, Rattus norvegicus
  Genbank Accession No. AA866435
tatttttttttttttttccacctataatgttttattgttacaggcagtgctgatctctcccacgtctgggatgacatcatgtggcatttgacactgctctgtgcccatgtctctcaggggctacagtggtttggatgtgaccagggaatgctccccgtgtctggggtagtaccacgattagagacatcggaggcaagcacaaatcttcaacttcagggaaatttattcgtccagccatatgctgatacttctgaattttgggcacggaccttcagttcctacttgtcgtgcatcttctcga

SEQ ID NO: 421 - DNA, 534 bp, Rattus norvegicus
  Genbank Accession No. AA866454
  misc_feature (1)..(534): n = a or c or g or t
tttttttttttttttttcccagtgtgtgtcctttattctccccagaagccatgttgactcccttctgcaggctgatggaaggaagggcgctgcccttcatgtggactgtgctgtggacggatctgactgagaggagccccagtaccaagcagaatggagttgagaagccagggcgctcactaacagagcaggggacaagtggcctccttagaaggtgtgcatgttctgggtgttctgaggtaacaggcctgtccacatggcctgcatgtccattgatggcctcccaggctgctagtagaagtgaggctgttgctggcacgacgttactgcaagcagcaacagagttcgcgtatccacaaagctgagcatgtctaccacttagacatgcagactccttgtgtcgcagagcccctgggtcaccagcggaggtatcacctgncgggcgcaggcatgcgatcgtgaccgttccctccaacttagtcgaaacctcccgctgccgtggtgctaaaaaaaaaaaaaaaaaccctcgtgccg

SEQ ID NO: 422 - DNA, 551 bp, Rattus norvegicus
  Genbank Accession No. AA866460
tttttttttttttttttgtttttaaaaagaattgtttatttactgaacttggggcatattagatacacaaccgattttaaatttacatcttttaattcaattctgaagtgttttcacacatacacacacaaaaaaattggcatgcaacagctgccctagggtgacagagtcaccaaccaactgttgcaagatatcatcgaaggttgaaaaattatttgtcctgaacatgaaaacctgtaacaaatttaaattaaatttataaaacttacttgtagttttccccttgcaagatccaaaaataaaaataaaatatccaggtaactaacagacattagtcaccacataatcctggaccgcccacacccaaagcagagtgcctttcattaagcccatcatcagagagacagtctcttcatcttttataaacaaaactgacatgtgccaaaaaagaaagaccccagaggacaaataaaccctattgctgacactgaagaccagggcacgaaggccactgactaaaaagacaacagtggctgccatcactgcaagca

SEQ ID NO: 423 - DNA, 505 bp, Rattus norvegicus
  Genbank Accession No. AA866477
tttttttttttttttttgaaggtttcaaaggtactttatttctttattttttttcttcaatatgccatgttttaatgagtacatgattctttgacttggcattcatttatgagttggttttttgaaacaattccttgattattgtatcagctggcatgactactgatctctccattcctttggggtgactctgccaacaggggacaggttccattctattccaatttgtgtggctgtatatgtccatgcagaaatacagaagatgcttccacctgctaatacagcatttccatatttgtcatggaaagtaggtgtcttcttctgatggctctgccttgccaccacttgctgaatgcttcgaacttggagacgacttagtgcgtttttggccaagggcaacatcgcggagacaaggatggaactgcggtgactacagctgctacctgggtgcaaattcaccccagctacccttgcagagtcctgaaaaacaaataaaaaaaacctc

SEQ ID NO: 424 - DNA, 543 bp, Rattus norvegicus
  Genbank Accession No. AA866482
  misc_feature (1)..(543): n = a or c or g or t
ttttattttttttttttaaagaaaaatacagtttatttcaggcgtacagtaactttcagagcactgctatggtccgtccgtttgtccgaagtcccaggctactaagggagaggggagggtgcagaaactactctcttgatgaattttgaagctcagctctcagaaagctgattccaaggttaaatcatgaattaaacaagaaagtgttatgttattaagatcttaagcctcatccctggacttaaaacagcccaactttcccaagttcaccacttttagttaagtccttcaaactctcaagggtattcaagggggagaattcccaggaggatgaaaattctggtcggttggggaatgctctgtgggaggctanggtggggacattggggaatgtagacttctacatctctcttccagctgtatgcttttctcacaattgccaagccagccagcctcccactgtggaattccggtcctttccataaatgtacctgcctactttccacaagcctggcttctataaccacatccacacctatcacc

SEQ ID NO: 425 - DNA, 542 bp, Rattus norvegicus
  Genbank Accession No. AA874924
tttttttttttttttttacagggcagcttttatttttattattttatttttttacatcccaggtgacttcaaagaagtgttgctaaggggcatataagaggtaactttgatgagatgcaattccataaggagagctgttatagatggggcctcgggactgcttagagtcctcagaaatagacaattttggaggttttattacattcattgggtctgggattatctgtccctagagccaagatcggcagagtgacccacgagaaacttctttgtagttcctctttgtcatcggtggttcttgcagcgaggtgaccttggggttccctgaggctgagtttcctgtgcattttcttgcaggccatgctcaggagcaggtgacagtggcattagcacaagccacagtagcatggttttcattgtacagttccagcaagagctggtattctccctgtggaacatcaagcccagggttattgacagggccggcatagtatatctgctctcctttccttcttccacagaaagagaacttgggctggtcc

SEQ ID NO: 426 - DNA, 494 bp, Rattus norvegicus
  Genbank Accession No. AA874926
tttttttttttttttttaaattagcttctcaatcatcatctggaaagaaaacattctgagcaacatcattaaaaacagctctgataaagcacggtcactactacgtatcataaagcaggtacaagctattttacatccacagaggtatgatacagtactgtcctacatctataatactagaggatacaatttaaaaggcattatttgagacttgattctacttttccagcagagggcccaaaggatggtgtgtgacacagctttgtaaagaaacatactctagacaggatttcctttcactagtggcacagttctaaggattcattctctccatgaatgtcagctaaaaccgttattaaaaaaatgaaatatccctaaaacaaaaccgtataaccaccggattcacatgaagatgacctagtggagacaagctggacctcaccttaccaacaagctatcaaatctgttacgtttaaacagtgagacctccaagg

SEQ ID NO: 427 - DNA, 536 bp, Rattus norvegicus
  Genbank Accession No. AA874928
tttttttttttttttttggaaataaacacaacacttcctttattatataagtttggcaaacagcacaaaaatccagcaacattttaaacatgtaaaaaagtcaaatgtcaaacagtactgagtatagtttgaaacattagaaagaatgagtgcagagttaggattctgaagctagcagagcaaggcttggtttctgaacatgtacatgaaacacacattaaaacacaacaacataatttatctttacaaaacccacagccaggcaataggaaagcacatcagtggggaaggttctggcccacgtgtgttcactgagtctcacatatggaagctacatctaccctgaaataccatgtgcacagggccaggcagggaaccgaggctgctactgaagttaacaattatttgagaataataatgctcaattaaatccttctgtatagcaatttctattataataatgaatttattccgctgcaaatctgagaagctgagacttatttgttggcagtataaaatttctgaccagtatcaaa

SEQ ID NO: 428 - DNA, 443 bp, Rattus norvegicus
  Genbank Accession No. AA874941
tttttttttttttgtattgaaattaacctgattagattagaaaagcagctagtttgaacaaaggtcctcattatggtcattcacagctcacttatggtcgtgcccccgctggccctgacacatgagttcttcttacccggctggtatgtggagtgtgttagttttgtgaggacctcaccagaaccttaaagctcaggtgcgcttacagtcttgtccatggcctttgtgttcttattggctgtaaacgtctgtctgttccgaataaagatttgttcatgcggcctctgctctgaatgggcatctgctcctgtgtggtccgagcaggcttcatcactgtttccctcaaggcatgttcttgtgtggcttgaatttagtttttttccatgtgaagaaatatcacctttggacccaataaaattcataacagggtaaacctcgtgccg

SEQ ID NO: 429 - DNA, 329 bp, Rattus norvegicus
  Genbank Accession No. AA874978
tttttctttttttttttgccaagagaatccaatatctttagtcacactggccaagcaggcaaggacagttgggctgaggatggttttatggaaccaaccatcacagcacatggcttctgtcaccttgccacggctcccttggctgttagcaccaaagataccctcctagggtcagccctgccctaaatctgcaaaagcaccaatggcccgaggccaccttcccctgaaaaactcgggcaggctagaatggaagaggggaatgttggagggtcaccaggccacacaccctgagaaaggcatcggggtcttggtgccccttgcttttctac

SEQ ID NO: 430 - DNA, 569 bp, Rattus norvegicus
  Genbank Accession No. AA874990
cgaccgcttcgccgcagaagtatctccggatggagccttcccccttcggcgacgtctcctcccgtctcaccacagaacaaattctgtacaacataaaacaggaatataaacgtatgcagaagaggagacatttagaagctagttttcagcagacagacccaggttgtagttccgattcacagccacatgcatttctcatcagtggaccagcatcaccagggacttcatctgcaacatcctcaccattaaaaaaagaacagcccttatttactctaaggcaggttgggatgatctgtgaacgtttgttgaaagaacgggaagagaaggttcgagaagaatatgaagaaatactgaacacaaaacttgcagaacaatacgatgcatttgtgaagtttacgcatgatcagataatgcggcgatatggagaacagcctgctagttatgtttcatgaatcacgctttttgcatttgtgggctgccttgttccttgttgagttgttgcaggaggtcccagctgtgacatacagcaatgccagcgcccatctgtgaaccaggttatttcaagcttt

SEQ ID NO: 431 - DNA, 516 bp, Rattus norvegicus
  Genbank Accession No. AA874999
tttttttttttttttttataaagcaattccaaagtttattgccatagaaaaaactgatttctcaaagtcaattcttattctctgtaaaataatacacatgaacagaaatcactatacttttggtccaagatatgttgggtttttccttcttcttcagatgatggatagatgcagccaaaatctatgaacgcgtgtacttgccccaaatgtgcagcataaacacagaagcgatgaacagaagactcatcaccagtactgggacagggccaactttgagccctggggaatcttctgtgtagaatcgccacatccccccagtccctgcagaggtggtgcggcctgcactccgggttccgcagctggcattttttctctgccggacagtggatcccgccgcccgtgcggccactgctttgctaggagaacgcccagaggagcccacgttggtggcactaggcgttggacccggcatgctgatgtctaagaacagtaggcacaagagatatgaagatgaaa

SEQ ID NO: 432 - DNA, 530 bp, Rattus norvegicus
  Genbank Accession No. AA875019
tttttttttttttttttggctttatagtgaaagtttattgtttttaatccaagtacaatcagctactagttacatacagtaaaaaacaaaacggccaccaagcaatgatgatagtctgtgacaggtgcagaggagggaatcttgttgggagtcctgtggatccacacctgacttcagcacttaagctgaccctccctccccagatcagttaaaaaaaatattaacagtgtcttgcttgggtagagcaagattctaaattttcttggggacactggagaacttttaaaaatgaaagtggtaaaacaagattgaaacgtggagacacaagaagcttcctgacaaagaagcttcaggaggtcttggcttcaggtcacctcaaatcgaatcagcttagaggagtgactccattcaaaccaaggctcatatgtatttggtccggttgagggctctctcagccaggtggccgctctcatccgtgatcttctcccagtcagtctgcccgaccacaaaacctatggcccttcaacatc

SEQ ID NO: 433 - DNA, 536 bp, Rattus norvegicus
  Genbank Accession No. AA875023
tttttttttttttttttaacatttttgtattttattatttttagggaagaaacacagtttcacaagaaacaatgatttttctcaaacaatagaaaaaagatctttttgaaaaaatccactgtcctagatgaaaagtctacccagcaagcactgggccagttttgagagtaaaaaccagtgaggtggaagttacctataggaaattcagtgcagaggtctccacaagtcctgatcagttctgtaaggctccaatgggccagctcggcggcagcggcgaaacagtgggaatgagctcacagacaaaggcccagtccctctgactgactgggatgcaggctggctcactccccggggggctgcatctgcttacagaactcatcaaactgctgctgctccagctccgtcatgactctgttgagagcatagatctctgctctttgtctttgcttcagctcctgctgggcagatttctgtttaaccttctccactctgaaagcaggttctttaactttggatttttctttccgcctcgtgcc

SEQ ID NO: 434 - DNA, 547 bp, Rattus norvegicus
  Genbank Accession No. AA875050
tttttttttttttttttccaagaaacaaacattttaatgcagaaaaccatgataatctacaaatgaatcacagtggaggcctataccggaccccctcaggaactgtaaggactgggacgtggacactgaactgacaacaccgtcagcatctggacatgcccaggcagctgtgctggcctcacggcacctaggccttgcccccttgccttccaccattcattccccaatgggaagaccagaagttaagttcagaatagaagggggagaggtggaggatgctgctggctctggtacctgccccatgactcaaggccaggcctactcccaggtctctgtccctctcctctgcagggacctagcaggaacacgaggaggggacctagggaaggggtggctggatggcatctggcttggagaagttggcagcctcagataaggcagctgctggaggaactgtcaggtgcagctgggacctctccccccaagatgacagctgaattggcttcctgctggcttggagctcagcacctctcactggggcatacat

SEQ ID NO: 435 - DNA, 335 bp, Rattus norvegicus
  Genbank Accession No. AA875097
tttttttttttttttttggggaaaaaatgtaaaactttatttttttttcaaagcagtaacgcatctcagctgtgttcagctacagtacaaagaacaatggaatagcaccagggaatttctaaaaagttcacaagatccgtgacaccttcctcttctgatcattcttctcggctaaccaagcaaagaaagcagagcccccactttccattccttcagctactgtcccaccagcggtctgattttcatccgaacggccctcagagaataatccgctcctctgaagggaacccagaccactccgttctctatctcatagggactgttgttcctggggt

SEQ ID NO: 436 - DNA, 511 bp, Rattus norvegicus
  Genbank Accession No. AA875098
tttttttttttttttttcgttagaaagcactatttatttcttcttactcttgtttcgtttctcttctttcagcttctttttggagactctgggtgtgctggcctttttgtataggtgatacccaatcaggcccaggagtgctggcaccatggccatgcctaccagaggcaaaatgcccttcagcagcttttgccagtagttggctcgaatcaaggcgatcagctccacatcatactgcaccactgcatcggctgggatagatggtgggtaccctctctttccataagccaagtgagaaggaatgactgctcttcgcttctcccctacacacatgtccagaaggctctgctccagacctgggatcacctgcttttggccaagttctatgaccagaggatctctggtcagagaagtgtcaataatgcgtccatctgccaagctgcccgtgtagtgtatgtggagcgtgtctccaaaggcagcggattccgtgcacgattcagggggctgcacc

SEQ ID NO: 437 - DNA, 559 bp, Rattus norvegicus
  Genbank Accession No. AA875107
tttttttttttttttttgtaggattattagttttcacatttctattggagggcaacagggaagggacggattccatcaacagaagcattcacaggttcttgagccattccaagcttggacccagaggttcctgtgggtggctgggcacatcaggcatgttcccattatctctcacaggcactgggtagttgtagggtgtggccttgttgatcatgctagcatactgggtgtaggggctaatcatgggcataattatagcgaggccccagacagtgaaggacaccaccagcaccggctcctttgcccaggcattcttaaggaaggcggagattcctagaggtgagaaaaaagtcgcccttggggactgctgcggtgacctctaacactctcgtatcaccctgctctgcaccctattggctgctgcgcccctcttctgggacggatcctaccactccccaaggctctactgagcctcagccacgggtcaagccacggtttcctggaattacatggtccccgcgcgcccagaacgcgtacttactagccctcgtgccgaatt

SEQ ID NO: 438 - DNA, 583 bp, Rattus norvegicus
  Genbank Accession No. AA875121
ttttttttttaaatacattaaagattgtgctcatctccatgcagcaatggagatgagcacaatctttaatgtatttaaaaaataaaacagtgggcagaacagtgcacaaagtcctggttctcctggatcttggagagaagggatggggaggaaaccagctctctgtggagaatgagttcatggcccacaggcaagaaatgttcccacatcttctggatgcggaaggctctaggaaaggggcagagaagaatgctggtggaaaagggtctgaccctttctctttttctgagggcagaactggcagagtggaaatcctgtacacccttgggaaggaagagcacaggctgccctgccctttagcagtggtggtgagtgcccaagccaggaaacacacaagagaattatttcttcaaccacacgtttcaagaaaatgccataaatatgttatttaatattctcgtttcatagcattggacacatagctcgatatattgaaatattgattccttggagacaaaaatgaaaaaaaaaaaaaaaaaaaacctttgcggccgctccaacatcagcctcgtgccgaattctt

SEQ ID NO: 439 - DNA, 569 bp, Rattus norvegicus
  Genbank Accession No. AA875126
tttttttttttttttttatatataaaatcacatttatttgagactgggactttcgaagcccagtctggcctgatctagtgtccagaagcactgattagcagatgtgttttcctctagctggctacaatggctgcggttcattctattcagatgtcagacaataggcacagctgggttccttattcaaaatctgaaggagtctgggaggaggacaaacacatagatagaatcaagcttaggccaggaaccagaaactacggattgctttgttaaaggccaaggaggcttcaaaagcgaacacagctggagtctcatttcagtctccattttcgcaccacttcagtggaagttccatgaaacagcccgatggttctgaagtgccatcaagtcacttcgagctccagcaacttaggtttccaggacatcttctagaagaactcgatcatcccttccacgttatggggccactcacctggcctcgatgcccacctggactcgaagtagccctgcaccgcgcctgtaccctgatgacgacggatgcagaaaaggtgagggccgccctcgtgccg

SEQ ID NO: 440 - DNA, 605 bp, Rattus norvegicus
  Genbank Accession No. AA875143
tttttttttttttttttaagtaataaatgtttaatcaaagaattttacatattattaacagcattcatttggccaaacatctacaggtctgtagaatcctactgtatataaagtgggaatgtatcaagtatagactatgaaagtgcaaataacaagtcaaggttagattaacttttttacattataaaattaacttgtttacaaaataggctttgccaaactttattactgaattggaaagtcaatgactgtgttgtttttaaaatatgtaccaaggaaatacaaactggatagccacagtttttcacattcaggaacccagcacgtcctaacaggcactgcacaaggtaagggaacaggagcccagcacacatggatctccacaggtagccctcctctccatacataccctccccccaccggaatccaccctcctatccactgggtgtacccactctcctcaccatggctgtgccagacgcctctagggatataagcgctttctactggaaaatttacagcctggtctagagattttatggtgttcatatttttaatccaaataaaaaaatcctttaatggactatttcagtttaatatacagt

SEQ ID NO: 441 - DNA, 503 bp, Rattus norvegicus
  Genbank Accession No. AA875146
tttttttttttttttttgataggcattaacgttttatatttttaagtgaccaaatctaataaaatgaaaaacaaaacaaaacaaaacaaacaaaacaggtttactaaacaggttcaaaagacaacacaggagataagcagtaaaaccaaagcgtgagtggcactgtccatgtcaacctccaatctcctccagatcacattttggtttttgctttctgtttaaggtttttaaaaagtgaagcccaggagtccggcaggccaccctgtgctcagcagcatgtccgtctcgcctgcatcaagctctggcccctgtgtccctcagcagcaactgcaggttgtggcttgtgaacctcactcctgtgctatgcttctcagcacgtatttgaccgtgtaggcaaaggccgcaaacccaactataacaaacaagttcgccaaaacgccgcccaggagtccatgatgcctgttggcctgtgggagcccagcaaggtttgggccagcagcagg

SEQ ID NO: 442 - DNA, 475 bp, Rattus norvegicus
  Genbank Accession No. AA875171
tttttttttttttttttatgagtatggaattaattaaaacttcgaatctttattttgtctggatctttgggcacaacaaaggctggccagcaggtccctcttgtcagtgatattgtctggcctagaagatgccaaaagaagccatgtccacaccacaccagtttggtgcactctgctgagaccacacttggcctctctctgaaaagacactcaaggctcagaacatttctgttcttcatggccgcctggctcacaggatgttccctcgtagtcctgggtcgccccgcaactgctctgagatttcacctaccgggagctgctgacccaggagctgagagtgggtggtttctgtgggctgagtgtgtgggattccatgctgttcgagcagacttgtcagtctttgtacctcccgtgacagctctgcgtgtgcctttctgcaaatgtccagagtctcaagccagcatcctcaaaaagt

SEQ ID NO: 443 - DNA, 458 bp, Rattus norvegicus
  Genbank Accession No. AA875194
  misc_feature (1)..(458): n = a or c or g or t
ttttttttttttgtttgtcctgttaaacacaaaaagacaaaaataaattcaatgggcgtctagtctcggaaaagatttatagccctagcagatccggaaagatcgtattgagtctttcctttggctcagttaggtgaccagtaagttcaccgagcttacaaggactctgtcatgttaacatggagaactaccaatccttcttatttaaacatcttgaacagtaaacagagctcgacacaaatcgaaaattaattaaaatctaatgttaatttagaaaaccccagcaaacctccctccgggtgtgggtgcacaccagcatgcccagtgcgtgagaaatgcaggcatgacaatcagtttaaggtgtttataggctacccatcgagttctaggccagcttaggctcctatcttaagacaaaananaaaaaaacctttgcggccccctcgtgccgaattctt

SEQ ID NO: 444 - DNA, 559 bp, Rattus norvegicus
  Genbank Accession No. AA875205
tttttttttttttttttcacacagggttgcttttatttccacatccaacttgagcagaggccctgccacaacctgaacagctgtgaggtgctgggtgcctccagagtttctggcacagtaagtgttgggtgtgcagacttcctgatggccacatgacactggcccacacaggaacagcaagtccatgaatggaaatcccactgagctggaagtggaggctctggaaaccccatgggcagcagcaggagttaaaggagccaccaggaacactgcagtgaggctccaatgcagacagggctgataaaaacccaaacagggcattgtgagagcagaggctcgagtgtccccgctgaggacccggggctgaaggcacagagctgtgtcgggatggaagaaccctgggtgcactcgcagtccagagcacgaaagcacaggtgagaacccagcccgaggctctctgtgaagagtgtggccttggatcttgggcacggcacagtgacacacagtgctgaggtcaatcctgacttcccagaggaatgacctcttcagtgacaaaaaa

SEQ ID NO: 445 - DNA, 462 bp, Rattus norvegicus
  Genbank Accession No. AA875207
tttttttttttttttttcaattttaactctttatttgaaacaattccagagacaagttagttgtgacaacagtttctcactacaacacaagggtaggcatggctcactgaaggaacaggccaggcacctcagtacaatatatacattttaacagtggctaaactgatgacagttataaaaacaccaaaaagaaggctagggaacagcaaagccaacagggaaagaactgggtgctccctctgccagacactaacttttctgggcccacaaaggtaagatggggaagagaagacgtaggcagtaggacaggaccctggcccacagctcctcacctatcttttgaccacaaaccccatcctggatggcctaagagcctgaagttctcaggatccacatgcagcttgtcacagtggagttcactgaggctggcaaaggtgcccttgaggttgtccaagtgtttca

SEQ ID NO: 446 - DNA, 422 bp, Rattus norvegicus
  Genbank Accession No. AA875217
  misc_feature (1)..(422): n = a or c or g or t
tttttttttttttttttcattagaaaataaagtgtttattaagaaactatacactgaacactcctataagtccctgtggaaacacaatgccccattgtcatagcacaaagtgaagaaatgccagaataaaagatgctgtgatggatggagcccgagaggctggaaatgaggtcatgatttacaacaattaaaaacatcatcctcaagcttactccttaaagccacactcaggagtagatctgaacccgagggatcatctgggtgatgagatcactgagaggacaacatggagaccccatgcttccaagcaggaaagtgagactggaacacggctggacttcaggctttctcgtgatggttgggtcaagagaatggctantgtgtttaaaaggtanctcctggtgcttgggtttggattttct

SEQ ID NO: 447 - DNA, 438 bp, Rattus norvegicus
  Genbank Accession No. AA875225
tttttttttttttctttctacattttattatttcaaatcatgtgaacaattccataaaacatgtgaaaaaagcaaggaagtgttcaacgctggaggtcccgggcctggggcgaaggcgtgaggggcctgaccctcagcaggcagcggcggttcctagattagcgctaaggagctacatttaggttaatggagcctgggcccaaggcttcagggcagggccctcagtgacattggcagttgtctggaacagcccttgggatccaattccgtggagggcagggcatggggccgcccaaagagggatgggtgtaaacaggcagacacactcaaggcacggaatcactggaaaggggctgggggcggcgggagggatgctggtcaagacctgacagttttaaataggtttctccaaaaagttttctagatttgcaattttcc

SEQ ID NO: 448 - DNA, 540 bp, Rattus norvegicus
  Genbank Accession No. AA875253
  misc_feature (1)..(540): n = a or c or g or t
tttttttttttttttttattaaaactgatttttatttcttttcatgtgcagtttttgtattgtgtggtgaactcctcaaacagccatttgggatccttctgtatcattttactagcatagacaagagttcatacaaacattactttgaatatccgtaacaacttgagcatgaatgttttggttggttggttggttggttttctgttttgttttgagacatagcctcaagctgcccaggccggcctcagactcaccacaaagctgaattcttggtcttcttgcctctgtctcctgagtcctaggattacaggcgtgtgccaccacactgtggtgtctgtctatgctcccagtgttggcatttccgatacagtctgatttaggacagttcctgacccacaagcctgactctgaaccctataacacctcactgtanggctggcaaagcaatctagcagaaccccaccttccttacagagttcctgcacaaagttcaggtcaatacagaaaacgcttctgatgaagcgttcctcgtgccgaatt

SEQ ID NO: 449 - DNA, 483 bp, Rattus norvegicus
  Genbank Accession No. AA875257
tttttttttttttttttaaaaaaaaaaaacaaaccaaaaacgatcctttaataaaattagcccattgaatctccccacttcttaaggttctaaacttgtaatagctgcaaaagttccagttcagaagccagaggctcagtccagacagggattcaccgacttgtgctggtatctgggtgtttgggttgtagtttgagttaagggagagggatagctaggcccggctcctctagtcttctgcggcaggtatacaattcttctgtccacaggccaataggcgttccctgaccctttccagtttatcttggaaaaattggcttcacgttataacatgccggcctacaaatgacgacagggtcaactggtttgagaggccagtaagggggacacagagtgaaacagtatgatccgcttctcaccaaagtccggcaatcaactcacttctgaaaggtccaagagagggctaagcaccaagctgaaaac

SEQ ID NO: 450 - DNA, 466 bp, Rattus norvegicus
  Genbank Accession No. AA875268
  misc_feature (1)..(466): n = a or c or g or t
tttttttttttttttttggatcagggcgggtttattcacagggattctgggatcctcacgttcggcttggcagctctacctgcggtaccagatcttcagcttctgttcgcgtttgatcttccgctgcagctgcaagatgccgtagagcagcgcctcggccgtgggcgggcagcctggcacatagatgtccactggcacaattcggtcacagccacgaacaaccgagtaggagtagtggtagtagccaccgccattggcacagctccccatggacaccacataccggggttcgggcatctggtcgtacaccttgcggagtgctggagccatcttgttagtgagcgtgccagctacgatcatcacgtcagcctggcgcgggctggcacggaacaccacaccaaagcggtccatgtcatancgcggggcggccatgtgcatcatctccacggcacagcacgccaagccg

SEQ ID NO: 451 - DNA, 514 bp, Rattus norvegicus
  Genbank Accession No. AA875286
tttttttttttttttttgtgggttaaaaggctttattagggaaacatacaggggcaaggaccatccttgggagacctcaggacgctgtcctccaggttgctgggcaggtacagtccccaggagcccctgctcagaagcatctgacctgggaggcagtaggaggggtggcttctactagtgaaactgccccctgcccccccagtacttaagctgtggccctggcacccattccttgccagggatattggtaacaggaggcagtgactcatgcagcaggtctaaggccagggtcaccctgctgcttcccacaaacacaagtgccgctcaccagtctccactggggcctcgtctgggactgtgacctgcccagcctaggagtccactagccacccatccctcgctgctgctgctcctgctccaggcttcgctgcaggacctgctgctggttggcaatgacacgacggataccattgacaaagttgctctggtcatgcgggatgaggccaatgaagat

SEQ ID NO: 452 - DNA, 538 bp, Rattus norvegicus
  Genbank Accession No. AA875425
tatttttttttttttttcattcaacaagtatttattgagtgcctactatgtgccaggcactgtcatgaggcgatgggaatagatacagcagtgaagacagacaaagtacctgctctcgaggagcttccattctaacgtacacgctagcttacattgcaacagtgagtaacatcgtactatcaaaagtaataaaagcaccagaatgaaaacagacctttttacctaaactgttaaaaagaaactacataacattcaaaattgtataatgacttgtaacaggtaaaataactttttacatgctgttaaaacatattttagctatcatttaactcaactttcatagaatatgctacaaggtgggatagaagaacataacccacattcacatgcaaatacctttgatacttcaaatcagtatttcccagatgacccattaaccttttgttttaaagtactttcttaatggtaaattgccactagcattcaaattaaagtactttataattcctccttaatatacattttatacatgtcatgg

SEQ ID NO: 453 - DNA, 512 bp, Rattus norvegicus
  Genbank Accession No. AA875495
tttttttttttttttttgtataaaaaagatttattgaaatttatcaatgacaaacagacataaaactcaaagtttggctcttctcaggggcgggagaaaaatgagttacagctgatctgtacaaatgagacacagggtaggaaacagcacgtcacttctaaagcaatctggaaggggggcgctgaaggcacacgcactctctaggagaaatctgcggccacttcagagtcccaccaggtaagaaaatacgagcttgcattccttttccgtgctcctatgtatttgagaaggaaaacaaacagaacaaaaacccagaggacacacagggcgcttccagagcttagatttgttaaaaggttctaagctggagcgcccgaggagtcctcctgccatttctgtaaaacaaattgctctaatattttacagaacaagatagaacaggttggcttttctgaagaagctgaaacacgaaggttcacttctttcccattttacgtgtctcctaaacctgc

SEQ ID NO: 454 - DNA, 529 bp, Rattus norvegicus
  Genbank Accession No. AA875506
ttttttttttttttttaaaaaaaaaaaaaaaaacttggacttttcataactcaggggattccctgaaaaaattacctgcaggtggaatatttcatggacaaaattttttctccccttccaaattcagtttatcaccactaaagaacaaagataaactggcctcggtcccagctgctgtgtttgggtggagattttgtccccttcccatgttgctctccccacattgtacactcttggggcttatatctcatgttcttctccagagaatataaattgtagttcatcacgggaggatgggaggggaaaggtagggagggcccagtccgttctgtacactgtcctgctggctggccacttcatctcttttctccaggactgcatccatggctcattccggctctggtggaggtgggtctgtcttagatacatcaaggtgttaaaagtctacccaacttgcagacagatccaaaagctttttttctgaacgaatcatgtcttactaacctaatcctaaaagactaattttagt

SEQ ID NO: 455 - DNA, 403 bp, Rattus norvegicus
  Genbank Accession No. AA875523
ttttcttttttttttttcaaagagcaagttttatttggtgaaggcaaacatcatccaaaagaaaccagacaggcaaggtgctgtgattagggagcctctggggccacacaggaatctcacactgggcaaggagcaggctcgagacacgtaaatgtcctcagccattcagcaccatccggacaagctccgccccatgggcccgtcaccccgacaggatatgcctcacaaatgcttcatagttaatgcaaccgttgctgtcctcatgccccgccactagcatctcgacttcttcctctgtcatcttctcccccagtgtgactaggacatgacggatttcagcacccatgacagtgccattcccttctttgtcaaacacacgaaggccttcaacataatcctcgta

SEQ ID NO: 456 - DNA, 547 bp, Rattus norvegicus
  Genbank Accession No. AA875537
ttttttttttttttaacaccaagaaaacactttaatcaaactacagaaacaatggttatagtacagaatattcataagcaaaagatacaccatgttttaagtacttacaaagttacaaaccatttgcttccttaacattttctgttttttttttaagttcacaacacaagtatcagatttaccattttgcgctttttttttttgagggaaggggggtgtatttatcatcagctagatgtgctcactgtatgctccattatttatatgcaaggcccgggtgactggaagtgcagttgtcaggcattttaataaactggacagccatttgtttctgcacgacaaggcatctttacacaggagcaatcaggagaaaacaggaaacagccaagcactctgcactgcaacacgccaccttaacagctaaccagcattactcaactgctacacaactgcgcctagtgcacaaaaatacataagagaagagattagaattgtgtcgggtaaacaatcctttaaaaaaaaaataagtcttttcacctgaaaagtc

SEQ ID NO: 457 - DNA, 404 bp, Rattus norvegicus
  Genbank Accession No. AA875620
tttttttttttttttttgcttttaaaagattttattacaagcaggaaaccatgcacttccattgcaagccattgtaagcagaaagacagatacacttcaggcaaggtaggcttttattacattggctaatgctcatgttcaagtgaggctctggttcagtctgggctgccacctgccatgcctgtgatgtgggacagccagcacccacggctttgcggcctttcacgctcggatagctggcaacaaggcagtagtaaaaaggagtccaacttgtcagttttgagtagcagctaaggccttcccagcacagaggacaaagggcttgttatacaatgagatgatcatgacattctagtcacttgtaggaactccaccttagtctgggtcctaagttagcccacatc

SEQ ID NO: 458 - DNA, 332 bp, Rattus norvegicus
  Genbank Accession No. AA875629
ttcttttttttttttttatttttactttaaaaaattttttattgcacatttattccagtttggcatgctcaagctgtgatgcttgggtagagggcagagaacaatttatgggagtgtgggctttctcctttcactacctcatgggtcgtgagatggaattttaacagggagtgtctttacccactgagccctctcgtggctttaaggtactgtctccactcttcaccttcccagatgcctctgaaagtctcattgccaaccacttttacagaagtgaccaagaaccttagggtaagggcagcgctctagctaggcagagctgatgagtgaag

SEQ ID NO: 459 - DNA, 413 bp, Rattus norvegicus
  Genbank Accession No. AA875630
tttttttttttttttttagcaacaagaacctgttttatttttccagatacagaagtttgcatgttttgcaaatattgcttgagagcaacactcatatgtacagtgccttctgtctagcatcgcgtaaacacaaatacgtatccacagtgcaatgttggctcagccaggatccaccttgcatatataccgaagaacgactgatcgaaccagaactttttttttttttttgttccttttttttcggagctgttttatcaaaggcgactttctataggtggagagttctttaacagacagaacgtaggtagtgcacatctttctaaatgataacattgtttgcaaataacagattccagtgctccaacataggggtgaattcactctgacccaaactgggagtggagcccctcaac

SEQ ID NO: 460 - DNA, 432 bp, Rattus norvegicus
  Genbank Accession No. AA875633
tttttttttttttttttccttttagaaaagcaggtttattggtccggctgctcaccagaacacagcaactcgaggagcttccctagagcccacaggaaactgtatctgcccacagtgatagcccatcagcacaggggacctaatcctgcatctgcccaccctcctcagcttatctgtcttcaatcggaggagggaaggggaccaagaaaaataaaggaaaattaaaaataaaaaataaaaagcaaagcttcgtattgtataaaaggtttgtggtttccatccccccccaaaaaaaataatcaattagctgcaattctaaaaagcagggaagatgtgtcgttggggagaaggaagtagcctgtagctatcatttgggggaggtgttgcctttgctcctgaccagcctttaaagggggaatcaatgtgtcctca

SEQ ID NO: 461 - DNA, 424 bp, Rattus norvegicus
  Genbank Accession No. AA875639
tttttttttttttttttaccttgtgctatagagagaacttttattcaggcatgttattttcacccccaaggaagggggggggattcattaacactctccttttgtttttaagaagtattaagttcattctaaggcacggagaattcacttctctcctttgacctttgtcattgttctgtagttgattggccgatcacacccaacagacttcagaaaagctgatttttcgtctgaggagcaggttccgacaacatggcacttggctaactttgaaagctgcacagcaaactgacctgtgcccccagcggctgctgtaaccaaaactttcttcccttctgacagctctccaagctctttcaggctgatgtatgcagtggtgccattaaccagcaaggtgagatattcaggtttcactgaaggcata

SEQ ID NO: 462 - DNA, 440 bp, Rattus norvegicus
  Genbank Accession No. AA875641
tttttttttaagaagccttgaagggaatgtcaaatctattgtcttggtatatgtaatccatctccataaaaggagaccgtataatgcctgagtaagcagaggacttgctgcttctgcgcccactgttttgattaaaactgagaagtgggcaggtgagagggctcagcaagtagaggtgcttgctgccaaacacagagacctgagttcgagtcccccgggcctacatggtagaaggcgagagctagcttctgcaagttgtcctttgaccaccacacatagataaataacaaatgtaatttaaaaaaaaattttaaagaaagtttaatttaagaaaaaaaaaacaacagaagttttagactgttctcaggttgggaaatatttttttcccactttcctaaggtgtttccccctttgctacgttaattatcacagccttgctt

SEQ ID NO: 463 - DNA, 401 bp, Rattus norvegicus
  Genbank Accession No. AA891037
actccatcccaggtgtgctccattccaggcatcttagacgtttcccgaggtctccggcttctctttctccagatgtttcttttgggggcccatgaaggccctcttctcctgcgctgtctggaagcatccgtggccaaacttagaagtggtgtcaatgaacttgagctcaatattctccagggccctgcggctgtggtgcactagtagatgcgttgtttctgaccatcttcccgtcttccatgtgcagcccccggccaatgcggtagatcttcttgttcagctctgtacggtggtggtaacccttctgcccagcccgggcgatggagcagcctactcgggcagggtgccaggcaccaatacaggccaccttgcgcaggcctttgtgggtcgtcctaggaagc

SEQ ID NO: 464 - DNA, 446 bp, Rattus norvegicus
  Genbank Accession No. AA891041
aaatagattcaataaaaagtcaaacacacacacaaacacatcttaaaatagactttagacacgaagtgcgtgtttcttctccacagtactgtgcagagggggagggcagggggcggaggttcctccctagtatccccacaggctgagtaccaggcggcggggccagctccgccgcgacaacccccttctcccctccctgttaaatacacaaatatattatattcaatatgaattcagtctctttccagaaaaaaaaaacatacaaaatacgctggaagggggccatgtaaacctcgaggtggaaggactgggcgcaggcgggcaggccagagtccagtgtgtgagctgcgccccagacctctgggcgagtgcccatcgcctgcccccctcaccccagtggggggcgggcgcccagccttcaaggctgggggtgtccgtatggagca

SEQ ID NO: 465 - DNA, 412 bp, Rattus norvegicus
  Genbank Accession No. AA891068
gctctgaaaacactttattacacaaattacattcagattctgaaaaatagtgttctaacagtgtaaccatctaaaaataagacatcccggaaacacaccaactgaggagaaatttaaaaatgaatttaaatagagactttttaaaatttctctcattgcaatataatgttagtgattttaaaaaaatagaaggagatttagcagcttttcgtcgtgtggcaggttggttctcttcactgccacaggctgagaatgctgaacaggaaaggcaccaaagaaagacactggcgatgggtgtggactgggagaatactgtgttcaagcagagaatagggctatttacatccaccaactaaaacgtctccaaatgtgaatgagctaaacttccctcgggggttggagcgctaccttg

SEQ ID NO: 466 - DNA, 513 bp, Rattus norvegicus
  Genbank Accession No. AA891108
aacaggacttttattggtagtaaactagagcaaacaatcagaataatacatatgtagtattcagtacacacaataaaagttaaagaaattcaaaacctgtataaaacaaaagagagagagaaatcatacagcttaagagatacaggggtaaaggtcctctccatctttgatcacacttgtctctgtacccaatagaacttactgcacttaataagacatacagacattttagtactgagtgtattaaaagaattaaacacttttctaaaaatctttcaatgacaagttggtaccctttagctaactaaagctaaaaggtgggaggtgggaaaagggaattaactagtattttgtaaccatttttaataatttcttattttccaaacactgcttttataacagaagtgttttacacttgcacagtattaattactttattatacatggaagcctgtggtacgctggttacacaatgagactgcaaactaccagtggtactttcctgacgtcaga

SEQ ID NO: 467 - DNA, 474 bp, Rattus norvegicus
  Genbank Accession No. AA891161
  misc_feature (1)..(474): n = a or c or g or t
gcagaaacatgtgttttaattcatggtttagattctggtgggtacaacagcaaattatttggaattctgctcagaaaactcaaagctgcacctgtagatgttatttcaaataaaggacacgtgaatttatgtacttggtttgtagcaaggaatttccatgatggtgtgtacctggtctgcgcacaccttttggtgactagctatggcttctgcaggaacttcagtctgcacactgctgagaagcctactgtgaactgttctcaggtgtccagctgagggcaatgctgaggaagaccagcacagttgtctttccttatacaccatggcacctangcagggtcaagaaacacggcacagcatttcatacacaaaatacagggagccaacatttgacttgtcaagtttcagatttgatatcatgttgtttggttgatcctccacataattcacaacaggaagagtactgcacattga

SEQ ID NO: 468 - DNA, 592 bp, Rattus norvegicus
  Genbank Accession No. AA891171
acaggtgttaacatattaacctaaacttcactgtcacagaaagacatcccataaaattcagaaaatattcaggttgtggtgaggaagatcaagccttttgaagacttcaacgcactggatggaatggctcaagaatttcagcataagttttcttctctttctcaggaaaatcttctggatgtaattttatatacccgaacatgtcatggtccctcacagcatacagatagttttgacgttttaaataaaaatatccagcaaagaaaaaggaagtaacatacagaagctggcgatgcaaaccttagtagacaaccctgtagctcctcctccgggtaggacggcctcgcagccctcacctgctttcatcacaggtctcattcgcatcatgttgtccatcaggcccgtgcagtagcccaggaagccgatgtagacaagccgcgggtcgttcagcttgggcgggggcagtctccgggcctcatccggcaagaatcttaagggctcatggcccggccggccgttcatcatattgatgcggggttcacgtgaggtctgacctcgactccaactataagaaaaaccacgactacaaacc

SEQ ID NO: 469 - DNA, 647 bp, Rattus norvegicus
  Genbank Accession No. AA891207
cacagtgaaactttatagaaacgttctttaattagtgaaacagttcattgtattatgggtagaaataaaaccaggtcaggaagcacagcaaacgaaccaacgctgtaagctacacgaagaacattctggtcagcctttttaaagccaggcacaagcgattcacaccagtaacaatgaacgctcagagggcctttcgaagaattcacacggcaaacaacaagttaaaaaattatcccccttaagcaaaaaccccaataggggttagttgtgtagtgcttgtcccatttgaccattagtgatctttgtagaacacaaggatgtaaagcttccgagcctagagcctatgtggaaatgcccatcccccaccctgtgctctcccagtcccctgctaccctgtggtgtgaccacagcctttggggcctgtccaggataatgccctcaaaagagtgaacacagagaacagcttttcagccacacgccgaatggatacatttattgttaatcaacctataattctgactgtgccttgtgggttcgctgcagaccttttagaaagaaaatactaaatgaaccactgcaattaagaaccatggcactaataaagggttaatctggttttgttccccttctctatgtgcgattcggtc

SEQ ID NO: 470 - DNA, 635 bp, Rattus norvegicus
  Genbank Accession No. AA891220
aacatttcactaacagaactaaactttatttccatgtttgttacatgtttgtcttggatgctgagtacatattagaattgacataacatacaacctgggagaaagtctgatattctccactgaatgagttaaaaaggaatgtaaaactacaaaatactactttacgtgtgagttctaaggtatgattaatacaacaacaaacatcttgctatttttctctaattttccgaggtggatttcactataaaagcttttttttctcatttcaagaaaggaagggctactcataaaaaatctttaagtatagggtacaaattagtctcaacacaaaattctactgcctacctaaaagttatgaattgaggggactaatgtcaactgcaaatctagtgtctgaaaggttagtctaatctaaggatgacacgcaaatacaactccatttgtcatttatgttaaccacttggtactcagaacggggtggccaaacactgcttagtgacagagatccaacatgaatctgttccaaggggaccagagccaagagggatgactcattctatctccggacccacactgtacacaaacggaaactactagtttacactacatgtttcaagacaaaattggcatgtgta

SEQ ID NO: 471 - DNA, 568 bp, Rattus norvegicus
  Genbank Accession No. AA891222
aaaatcacaaataatttattctttcgttagagttgatacagttttaaatagcaataaagtacacagtggtgaaggacctggcacagaactcataagcgtctcctcgcaaggctttccacacctcgcctggtcacactcgatgcctatttctactgaccaagttgaagaacaccctctactgaccttagaaacacacgcactctcatacagacacattgaaacccttttggattacagtatgttgagaacagtatgctgtgaatttatggcaccccttctgttctgtttgcagttagaaatggcaaagccgacctccattacaaaggcgtattctcggacatattccctggacgcagacaactccgaggacacagcaacttaccttcgggccagagattttcaaagtctgcttaaacagatgtgcttagaaatctctcagtgcacatcttcctgccccatgccatatccccaaatttagctaaaataatcagtctcaaagaatgattaagtatgtcatgtcgtgcttaagaacgagaaaccgtgaaatggcacctctaggctttcagta

SEQ ID NO: 472 - DNA, 607 bp, Rattus norvegicus
  Genbank Accession No. AA891226
ggaacgggtactattatttattataaccagggcactccaccttccctcaggggatagatgaagtatacttgtcatgtaagtcagctacattgtcactggagacacggatccagccatcctcccgcacatggtagaggttgactgctcctccggagtaggcatctctgtaggtggcttggtagatggctcggcgggccaggtcataggcctcctccacttgtaggtcataggagtagcctcgatccatgactccaaacgcatacacggagccagatcccactgagaaggcggttccagagatcctgttcccctcactgtctacatagtagaggcccgggcctctcttatcccagccacagatcatggtgcccatggacagccccatgcctttgtactgatacaccatgttggcaagcagtttggaagccgccgcgaccgagatgcgttccttgttgcgaagctcatagattcgacactgtcgagccaacaaccgctcccagaagctgcaatccgctgcacccccagccatggtgcccagaacgtaagggttgatctctatcactttcttcactgtctgggaagcaatgtaggcacctgccgtggcccg

SEQ ID NO: 473 - DNA, 559 bp, Rattus norvegicus
  Genbank Accession No. AA891242
cagttcaggcacagagtttattgaggtgaccccagtgtgtctctactcctctttctcatccccgtgggtgatgatgtagcagagagacttgtagtcgatgttgcctgtcaggtccatgggtgtcagggcgaacagctgctccacctcagcaggagagaacttgtctgcctgggtcatgagaagctgcttgaactcctccttgttcacaactccctggccgctcgggtcaaacattcggaaagcactcaggatggcctcctcagggtcggtcccattgagtttctccccgaagagcgtgaggaagacggtgaagttgatggggcccttcccctcttgcagcatggcatccagctcctcctctgggacacttaccctcccgagctgggaataagtctccttcaggtctgacttgcagatgattccgtctctgttctggtcaatgcagctgaaggcttccttgaattcctgaatctgggcttgctcgaacattgagaagacattggaagagccacgttgagcctgcttggtggctgcagccttgccccgggtcccagccttc

SEQ ID NO: 474 - DNA, 485 bp, Rattus norvegicus
  Genbank Accession No. AA891314
  misc_feature (1)..(485): n = a or c or g or t
ctggtcgctgagaatatttattcaaaaacggggattgaaaaaaactgtacagagtgtctgctgctgagaactgggcccctgccccccaggccacaccccctgctataggcagagccctctctttgggttgccccccggacaagcccatccagtctattccagtcaaaagggtatcagtggaagcagcaggatctgcaggggatgaagagaagcttggccccagccacccctcactctcctccaattcccactggggcagcaggaagaagcccaaagggatggagaggacacgagtagcccctcccacggcagggcactggggaggccccagctactccctgcatccaagcataggtctgaaggggtggagcccctgctctggggctgccaaactcctagaaccctgggccaggaactgtcccctctctgaggaggatctccaaagatggggcaaggtanggggtgcatccatgcgtctggcatta

SEQ ID NO: 475 - DNA, 484 bp, Rattus norvegicus
  Genbank Accession No. AA891423
  misc_feature (1)..(484): n = a or c or g or t
actgtggctaaacagccacaattagcaactttaatataaagtttttaatacaaagttcaccacaaagaaagcagatgccatgcgtggaggcacgtggactgcagctgcctcatcctcaagtcccgggcttctggtgttttgtcctcggatccagcagttcccatgtggaggctgcatggcctctgtccttaacattgatgccgtgggtcatgaggtcctggcggagtgcgtcacatgcctccagcaagggctgcctctcctggagctgctgtttccgggcctccccggtggccccaggcgtggccagtgcatactggcggaccttaagcctgaagcgcactagttcatctaccacacagtgcanggctactgtgctgctgtctcctgaaacacactgtcgcttggccagagaaatccaacagtctcgaaaaactgctcaacgtaggcaacgatggccccaaacacagtgggacttctcgggcca

SEQ ID NO: 476 - DNA, 621 bp, Rattus norvegicus
  Genbank Accession No. AA891535
tttacatttgagaccttatttaatcatagtgaatgctccaagtttaaaaagcattaggcagtaaccacacacaagatgaaaacagtgtaaactatacaatactttatgtacatttttacaaagtaacacttttttaaataatataactggacacaaaaatatacactttagagaaattcacatcagtaattgtataaagctctcttctagggtcctgaaaatttaggacaaacattagctctgtaaataaagtgttaccgtgacagtcctgaaaggccactatatatatttatctacatatagatatcacattgacattttcaaggctaccagctttactatagaatttttagattatgtattcaagtgttgaggtccttatgattatgcaaacatcaaaggaatagtggaataagaagcagagcaaatttacacgaattgggccagaacacggatgcacaggctctggctgccccaacttagatcctcagtggctgatatattcatacttcagacagcagtgaaggttttaaataaaattatggcaaacaggcttgaaacatgattctgattttctacaattttcacaagttcttttaaatgcaaacaattctttaccat

SEQ ID NO: 477 - DNA, 549 bp, Rattus norvegicus
  Genbank Accession No. AA891537
ggcaagtaaaattttaattgttctagctagaaacaagcatacattacagatataacacggaaatatattagacgaagaaggctattataaatttctcaataactaaaataacataccagcagctactagcactatcccatacatggttccaactcttcactgtcccctcaggctcaacatgtgggtattaggggatggctgaacttggtgtgggacacgagactgtcaggctggcatgagatgagccttgttcctgaatggacatggactgcatgcactcattcagtagatcctcttcctttgtctcatcgttcatgcatggctgataatccttagaagaaactggtagcaagaacagtctgcctggtcttctaaaaatcttcagggacttgcatcttgttttagatgcatatccaatttttaacccttctttgtgtctcaggggtctccaaagggcatgtatgatcatttcaggtgcttctgctgcaatgcccagagagtcttctctctccagatggtgtctccatgtagtgcagggggaatgctgtt

SEQ ID NO: 478 - DNA, 598 bp, Rattus norvegicus
  Genbank Accession No. AA891542
cataatactgtcattacaaaaaaatacaaaaaactactataaaaacattcaggggcttgtcaaagtgagaaaacctaaagaccccaccccaggaccaactgaagcagttttctcccagctccttcactattcgacttttatacaactgtgggagtggggtggggtgagggtcacacaggcagagaggctggaaatttccgacacagcctccaagaaaagtaagaaataagtagcttcacatatcgcaaaagtggggcttggaagtttggggtggctaggccctgagttcagagatatgggaaggaacctgtgatcctgaatctcttggtggggaacagctgccacctgatcccaaagcccttttccttcctggtgatggctgggagatgggtcctgccccacctcttagctgtggtggatggttcaagccctcctttcttctctccacccctgaacactccccagagcagctgagggggacagatcctccaactctgtggggtgtaggcaaggcagctgttgggaaggctcctaagggttggctcaactccctgccccaaatgaaaagtgtctcgtgctcaaatgacagccttgttca

SEQ ID NO: 479 - DNA, 564 bp, Rattus norvegicus
  Genbank Accession No. AA891546
actgtgctaagcctttattgcaggaggcgagtcaggcctgggtagacacagattcagggcagcagtggaggaaactttcagaggcacagtgcatggcattaaagttcagcaagtcccggaccccatgttctcctgattctccacggctcagttcttcatagagtgctttccattcaaagggtcctaaaggccaaaaggaagggattttttttcagctaccggccaccttcaggtctcccagccgaggcatccagtgagcctatcttccagtttcctctggaggatcagaaagcctgcttcgcatcgcagcgccgtgctccctgctcctgttcctcttctccatgtactcattcttcaagcacttcctcatttcccgatcaagatcgttgcaatgaccaaaaaatttcagaatgttgtgatttttgtgacattccttaagcaagttaatcaagacgttgcattcttcagtgtgcaagtgtggagacaagtcaggatgcatcgtttggaggacgagtaagtgcagaccgccactcagccctcaaaggaagcactgaaagaagccac

SEQ ID NO: 480 - DNA, 614 bp, Rattus norvegicus
  Genbank Accession No. AA891553
aattttatttcttctgctagagaacaggagctggacacacgctgcccaggcacagctaggtgctaacacacgcaggcaccaggccaactcacttaagtttcttcctcttcttcttcttcctcctcttcctcctcatcctcttcgtcctcctcagagctgaaggtgccatcaggcaagctgtagactcggatgacctgcttgttggggtccttgaggatgaggtatttgccctcctccagcttcatgcagatatcaatgacacagcgcaggatgccccaggcattctccacactcaggttgatttggctggcaaactcattgggcttaaactgctgggtgcccaggatgacgtggcgcgaggagtcctttacatggtaccgggacacatacccgagcttcaagtactcagagccagccagcaaagcacagcacgtccatcgcgccaacttgtagctgttgttcttcaactcagtggcgatgacagccccacgctgagagtccagcttctgacgccagtcaacgccattacaatgcctggagtcccattcattgagtgtcttgatgttgatgaaggacacttccccgttggccccagtcatgacgccatcatgttc

SEQ ID NO: 481 - DNA, 486 bp, Rattus norvegicus
  Genbank Accession No. AA891580
  misc_feature (1)..(486): n = a or c or g or t
aaagccatatgctacacatataacaccttctctctctgtaaggttgacattattcagagagacagtcagaccacaaaccacaaaacaacagtcagacaacaagcactttacagcgcccaccacagtctgtacactaagaacagtcctaagacggcatccgccttctccttcttcaatcaggatgaagctgtcactgacattccagtaacatgctgacgtggttgtcattgtttcaagtcacaccaaactgacatcagagagtacaaggttctttaatcaaacaaaaaattagtcttatttaaattaagagaaattcacttaaactaaaaataatttatttgagctgagagttttaaatacctaacacattttttcagggaaatgttggtaccatctctgagccagctttccttcctccagactgtatctgtataagaatatataatttacttatctctcagtcattttcagannacacgtatctct

SEQ ID NO: 482 - DNA, 410 bp, Rattus norvegicus
  Genbank Accession No. AA891589
  misc_feature (1)..(410): n = a or c or g or t
ccggcacagtgtgtggtgtgtgaatctatgaagattcagagcccacccaggacaattgtgcccacatctcccttctgctgacttctttgggtttaagacacccaactccatactgcaatggcctccttctctcctagactacaaggcacataaggctacacggtgatctttgtttggggagctacagcagcccgatttctcagtggtgggcctggcctccctggctaggggctgtagccccaggttgcgagcagatctccctcgaggacaggtggcagctacacggaggacccggctcagtgaagccatggggacttagggctcctgtaccttagtcttcgtcctagattttccagaagctcctgngagattcctagcaaggaaaagtcagcatgatatggacccaatcg

SEQ ID NO: 483 - DNA, 398 bp, Rattus norvegicus
  Genbank Accession No. AA891591
ttaatttgtgatgtgcatttatacagatgaaaatattcacagaggcttgttcgattcctgctcctacataaagaaaaagtatgctgaataaaaaatgttcttttatccacccattccctgtcagggatggaaaagtgcttgtgtattccatgatagggattcaatcttcatgaatgttgaagagtttggctacttcattgaggtcttcatgttgctcaccgtctttaatgatcttccttgcaatcggcattcggttaaagacgttccatagcacaatccccaccacaactttgtccctgaggtagaagatgacacctttgccgtagtcctccccttcaacagggacctgtgggactgcagggtcactgggagggattgtgatttcagaagcttcagac

SEQ ID NO: 484 - DNA, 410 bp, Rattus norvegicus
  Genbank Accession No. AA891669
agtaacgggcaacagtgcaagggctacagggtagaataagagttcgagagctggggtttggcgtaaattttacaaagtgtataaagaatctgtgtttctctacaataacaaaaaaccaaaggctacaagagcagttgtatatacaaaacacggagatattgcttcacttgcagacaggttcctgaccagacaaggagacgagacaagagaagtggggacgggcagaggagagcgctgcgtgcagaggaggaaggaggggggcaagggtgtcttctcccagcataaatctacaggcaggcggagctcacttggagggtgggagcagcctgtcctagagggacaagggatgggccgggaagacactggtgaggggctggccaaggaccgacgacgtgcacgcacgctgggtg

SEQ ID NO: 485 - DNA, 533 bp, Rattus norvegicus
  Genbank Accession No. AA891681
aaaagatgcattcaactttatttagggtcagactctcagtctaatcttgatacattaacagtactgctacagagcagagaaccaagcatgttaaacatggacacaggaacaccactgcctgaggctcatcagcgtctgtgacaggcgtccccctggctccccagccgctgcttgtagtgccgccttctggttgtcacaaaccagccaaagcttttttctaatcaaagtattaaaggtcactcaaaagacaaattagaagaaagcaaattaatgcaagctgttcatctttatttccaaattactaatttaatctcttcatattataaaataataaactacaaatttattcaactgatccaatgtattaaaggttgactttttgaatgacccaaatttcaatgtgataaagtctgatacatcataaactacttcaaattaatgattaacccagtttcacagtcatgtgggtatttgtacaaccaagcagatgtctgactgcggacagcggttttcagaacaactgggacttccgc

SEQ ID NO: 486 - DNA, 421 bp, Rattus norvegicus
  Genbank Accession No. AA891689
caggaaaaaagcattttattcacatataaccgaagcccctgggtctgctgggggggggggggggctgcagggagtctcagttggcttccgatggtctctcctgagatgtgagcttccagctgtgccctctcaccctctgcgatgaatactcagtagattccataggtgggctcatgactgtccctgtatcggtccagatagcgtaggggctgctggtgggggaagcgcttctgcttggggtggtaagggggtggccgtacaaattcaaacacaggttcccgcatgtctagaagctggtggaaggtgtgggtgaccgagtcatcccagcggcactggaagaaagccagaccagctggagtcatggcttcctggtgtttcttgtacaaatcaacggtgtggaaggtcctctgggccagctggt

SEQ ID NO: 487 - DNA, 502 bp, Rattus norvegicus
  Genbank Accession No. AA891690
cttgtagagtcttttatttgtttgtttgaaacagggtctcaaccactgtaacccctggatggcctggaactcactatttagaccaagttgaccgctaacatagaaataggcctccgagtactgggattaaagcggtgaagcacaatgttcagctcggaagtttgctaggggaatggggagcatgaatggaatggatgtcgaggcacctaaaatacattttttttctagacagtaacaagaatttggacgcaatagtgagatagtgaaaatcgggcttcttgtacattgaagcagggggcttgaagagttgtggccgagggacacgttttccctagcagagaccgtgttctttcctcaaactgcctctagatggtggtgctgttctggatgcagtccagtggataaggcttggcacagtgcacaaaacccctgcactgtagcagctgttgtaggcacggtcaggatcagaagcatacttttgatacaccggaatacagtctcc

SEQ ID NO: 488 - DNA, 493 bp, Rattus norvegicus
  Genbank Accession No. AA891694
gcaaatgtgaaaccacttttacttggtttttcaagtagtcgaataggatgagaccatttacacctgagatgaggcacttttatgattccccccaaaaaggataagtataaactacaacttttcttgttaatcgtattctccatttcaggtgtgattaacttcaagatggtttacaggtactataaacttttattttgttgtcttccatttgttccgagtcaacaaactctgtgaaatacataaaatacagccgcaacacagaccagttactgtactcacatacaaatgatctgaacatcacgtaaggacacaagtttcagaaaaggagtacttcaacactacttcaacaacgacgatagttttttcataattatgtataaatacattagtatccaaagggcgaatctctgtactatttctagataagaatgtcctcaaatgtgtaactgaattacaaattatagtcttacatatgcttttaaagtaatcaagt

SEQ ID NO: 489 - DNA, 435 bp, Rattus norvegicus
  Genbank Accession No. AA891717
ggctctaaacaattttatcttaaaaaaaaaaaaagtaaagaaataaaaagaaccacccctggaacagggcgggctctctgtgaacccgccctgcctatagctctccctgactccagggccttctgcagaggcttcggctgctcactgccccctctactcctgggagagcagcccgctagcatccttccccacctcttgagtaagcctgctccccagagtaatcaggtatgtatcttaacttctgcttcagagaaaggaagaaccagtgaagtactcggcccacagaccctctgccaggcactctaagcaagcacgcggcgagcccagatttcgtgtgtccagtgtccaccaaggagacagcacatgcagtgtgccaaaggagcaccagggcccggggactgcgcggtgggggcaggcaaagctggcggtgcgtgt

SEQ ID NO: 490 - DNA, 418 bp, Rattus norvegicus
  Genbank Accession No. AA891727
ggggaaactgggcagtttattgacaggcatcaggagactgcgcagtcaggtccgtgggcgggacagcacccgagtccaggctctgtgcttctcctcgggccttgtgggcgcaaacttctcctgcagtttcctccacacactcttattcatctcttgaaactcctccaaagtgtctgtggacaggatcagcttgtactcttccacggacaggccactgaagctggtgtctctggggcagggtacttgtgcttgtagtagtttgaatgcagtcgtgctaagctctcgtacatctgatcacaggcctcgggttctgcaacctgggtgttctctccctcccgaaaggcctgtgctacccgctgccgcaggtaagcgcccaagtcccggccccgtttggtctcgtccactggcccctcgtgcc

SEQ ID NO: 491 - DNA, 616 bp, Rattus norvegicus
  Genbank Accession No. AA891734
actctgaataaggttgatatttaaagagcagaggaaatgcctatacaaaaggtttatggaacattcatttacatactggatatatattctttacaatatagaatagtgaaaactgcgctaatgggtaagacaggtacaacaacattacaacgtccttgacactgaggataaatgcagtgtggcttttaacgtgggaacagcccaacactggaaactatgagaccattaatgagaaggttaatgggaccctggttatatatggaaagtggagggacatcactgaatttactcaccgaacaatgcactaacttctgcccaactgatggccttgaagcaaaagcctgagcaacactcctcctcagtgtttctgagtatagtctatgacactggtctcgtcttgttctcttcaatacaaacgtcacacacagaagacagaagtttgccctaccagctgttgtagacagttgtagagctgtcttcctgtgtttcctcagagtgaatcccttgacacccttgactacttttaccttgagtgaagatcatacctggtcagccacttgaaaacgcattcccatggcttcttggatgccaacctctgtggcattcaattcactgg

SEQ ID NO: 492 - DNA, 516 bp, Rattus norvegicus
  Genbank Accession No. AA891735
aatacaagtaaaagggggcagggcaactccttccccctccaggtcaggaccaggagaatctgctgggctgtccccgggaccaaagaggaaaagagtgacatagaaactgaagcaaaggaagcttagtcacactcaggtgagggtgacagctcctcctggattttgtttccatttattaaaaaaaaaaagaaaagaaagaaagaaaaagccaccccctcactcccagcccattcctcacagccagggtcagaaagcagcatcagtgaggcgggttcctcacctctggttatctctggcccaggtcagcttgagccacctgccctcaccaggagagggtttcagttggcagttaggcttggggaagtctctacctggaccccccagaggcctgggagcacccccctcctcccaggaaagggaatgcagtgtctactgggctcagaggggtggcctcacccacctgacatgagtcctgattctcccatctcgaggacggcaggaagtttattgcaccag

SEQ ID NO: 493 - DNA, 558 bp, Rattus norvegicus
  Genbank Accession No. AA891737
aaatggttcagaatcactgtgaggcttttagatgttcccattattcaaacaacccaaattaaaaacatacaactcacattttaagtaatataagcaaaataaaaattatctttaacaatgccttatattttgttttagtattctactatagacacataagaataattatttccattttctgcttccctcaaaactataaaatgctgttacatatttttgaaaaatcaaactccttcatatcctttcatcaattttatgttgaaaagagagttattttgaagcactggaattagtgttggaaaaataggtttagagtccaaagctggtgtgtttgcgaataagaacacaagctgacaagtgatttaaattccttagaaaccttcacagttctccatatgtacatgtggcagaaggatgaattgccagccaatatacatcagtgatcagttgcttacatttcaaagatcaaaacacttggtgggaagcctagaaggaaacacttaaagacatataattaagaactcttatctctgaaaagcaaagtccacattttagtta

SEQ ID NO: 494 - DNA, 599 bp, Rattus norvegicus
  Genbank Accession No. AA891739
gagcgtcccggaagttttattgggttctggttgggtcagggtccccccttcatcatctagcgagccgcgctcagcgcccgttactgggcgcgctcagctgccccatcatgtcggccagcatgcgattgcacagcgcggcgtacggattgagcagcaccaactggcgccgtgcgaacgagctgcccagtctcgccgcctgctcgaagtctctgcgggcatcgtcgtcccgaccctgaaatcgtgccagcagcccgcgctgcacgaagctctggcgggcggcgcgaccccggccgccgctcaacgtcaccgcgcgctccaagtcctctagggcgcctgctacatccccctggagccgcctcgcttgggcacggttgttgtacgcagaggctctctcaggtagcaggctaatggctttgccaaacctctccagggctgtgtggaggtccccagcttctgctgccctcactccctgcaactccagggccttggattgctccaactgtgcttgagggaaaactccatcttcatctccctcctctgtttcttccaggtccaatccaacaacatctccaaagggggtattagggttgaggatggcc

SEQ ID NO: 495 - DNA, 586 bp, Rattus norvegicus
  Genbank Accession No. AA891742
gacatttcaaaataaagaatgtatttaaaattataaattcagtaaacataaattttatgaatttctgtccaattatttagagaagtatacagttcacacaaaacccacactttcctttaattaacataattagactaatttgcccccaaagggcaaaagaaaaacctgtattaatcagttcgtggtgtaaaggccaactcgagaaactatttttttctaggcctccctccatcttagtactgatgactgctcgccatagactcaaaattccagaaagacggggtcccagaaaacagccctggctcaggggtccccagaaacgcacagctgtgagcttctcctggctatggaggccgttttcagcttctgtaacttgcgtgtgcagacacccagattgtttccagttgctttacccacttaatcttggcagaacaggccagagtctgcctgcttgcatagataccgtgagcctccccatggttttccctttgggaaacctttccccccaccctcttttatttatggccatctcaaatctggctctcagcctgtcttcctgccagcagctcatcagtaaatcttttaa

SEQ ID NO: 496 - DNA, 488 bp, Rattus norvegicus
  Genbank Accession No. AA891749
atctacacggcggctcacaagcatccattactctagtctcaggggatctggcaccctctcctggcctctgtggatgcatagacatacataagcaaaacacttatgtacatatagtaaaagtaaataaatcttcaaaagacagattgtttcatcactcctttggaacaactccagtgtcctcctctggccttagagcaagtcctggtctccacatcttaaacgagtcagggcagaaatctaacagggagaggttctgctgcagggggtagctgttttcatccaactcaaaaaggctctggatcttcagcacgcaaggttctgcactgactgccaacaaggagtgcagcaggtccgcagcgaccatgccgtaggtgacctctgaggaaggcactatcactctgctgaggcaatctggagaaatgttgagaagaatctgctccatcatcttcgacccaacatggacataagtattatgtcttccatcaact

SEQ ID NO: 497 - DNA, 423 bp, Rattus norvegicus
  Genbank Accession No. AA891769
ctgtctctctgaacacgggggagacacatgggaccagaggggagacaagtgtgaccatggggagggctggactggacaacgggatggcacatgtgaggggaaagacaggcgtgatgacgtgtaaccatgaagacgagtgtgaatacagagaaggcaggtggaaaggggagtggatgggtgtgactgcggggaaggcaggtttgaccttggtcgggagagacggtggcttcccccttactttaagaagggaaagctgtgaggtatcaacaacccaggcacttgaagaaggaggaactcggaagagaagtcccttagctgctgtggactaagcagactcttccatctccaacaggtcatccacatactccacaacctctccctcatcgtcgtccatgaggtgttcctgagcgaagtcatacagtt

SEQ ID NO: 498 - DNA, 555 bp, Rattus norvegicus
  Genbank Accession No. AA891774
ccagggacctccgtagtcggtctccctatcccactcccaaacctcagagcaggaaatgggcttggctgagaagattcatgcttgatgaccaggggaggcgtgcagccccccaagaagaaggggaaaagaaaaacggggaggttgaaaagcagagaggtgcaccttcccttctgaggaagcaattctggtctgggaccagttgcaaggggttagtaagagaaacctaaggggtgcttacatttttattctggcaaatgaatctcttaaaaggctccctcctaggggtgcttacatttttattctggcaaatgaatctcttaaaaggctccctccttcgttcgggggaacagcacatgtacctgtgtcagcgtgagatgcaatgctacacaagaacgtggcattgggccaatcatgtggacccctgtgctgctcccaagggagaggttctgtttgggtgtgggataaatctaaacaagcatacactcgtgttatatgtggccttaagggtaggggagcaaaaggaatggacttctctgtagagcagctcaagaggga

SEQ ID NO: 499 - DNA, 518 bp, Rattus norvegicus
  Genbank Accession No. AA891785
gaagagctttttagtagctaaatatggcaccacgtgactcagggcaatataaattacagtatgcaaaacacactgactggctgaggtaaagcgcaccgttcctgcctcgtgtccactgtgagggaaattgctcacatgctttaaaaaacatctccatcatatatatatatatgtaaaaaaataatcccctagaaaggccaccagagaggggggctacaacgcccaccctctaccatgtacggagcacccactggagctgggtagtgtagtgtccacccctactgcttgcccagagctctgtgtccaggcaaagatgctggcaatagggttggtactggtgggccggcccttctggtgttctcggtagtggcgggtgactgtcccgtgagcagcctcagcttcaatggtcttcccgtcagggcagaccagcacagatgtcatcaggccaagggagccaaatccttgagccaggatgtcagactgtacatctccgtcatagttcttgcaggcccacacaa

SEQ ID NO: 500 - DNA, 609 bp, Rattus norvegicus
  Genbank Accession No. AA891790
ggagctcttgcaaggatttatttgctacagaattgctttcataccccagcgagctggactaaggacttctgggtctaaaaggatttaggtcacttcatgttttcaagtgctgtgacattcaaaaagcaattttggtagggcagagatggggtagagtagcaccatttgccatgtggtaagaggcgagaaaaataatcagtaatattaaacgtctaagaatagagaaggaaagaatactttaaagttcccatctggacagtccctgagctgaaatcacatttatgtgtgaagagaaatgtttgggctgtgaccgtgaagtgacagatgctgaccttgggcttggctggtgaaagcttccagacactctgaatgacaggatatacgccactcatctggctgattctggcacgtgtcctaaatgtctcctaaatcccaactctcctggttctctgaaaggcctgtggtcatctgatccccaatacttctttttatttttgagacagggtctctctacatagccctggctgtcctggagctccatgtagatcaggctagcctcgaactcacagagatcctcctgctcctgcttcccaagtgctgcccaatact

SEQ ID NO: 501 - DNA, 620 bp, Rattus norvegicus
  Genbank Accession No. AA891800
aaaaagttttaacaatgatgtcggacaggaagttatcagacggtcatccacttgcttcacaagagcactaaaggaaaaggagtccccggggtcctcggaggtttaaagtctcagtgcagaagccccagagtccccatcagttgcggaggaagtgccacacttcttcttctacactgctttctttactcattgaaggtgttgggatcgattcaactagtgaccttgcttcctctgtagtgcagtggaaagggctatcacagatgtgcacgttcacacaactgatagctcccttgtcacacttcttcatcaccatctctttccaatgttcatgtgcagagttaataacttcgagggcaaaagccttgtttttgaattctccattaaaagcaaacttgttttctggttttccatctggtaccttatagagtctaaaccaattgacagtggcttctaggtaacctggtttgaacttcttaacatcatcaatatcatgaaatttttcagcctcaggatcattcacattgatagcaattattttccaatctgtttcactctgatcgataagtgccaaagtccccaggatcttcacatggaccacgtctccacgggaaagaaccttg

SEQ ID NO: 502 - DNA, 551 bp, Rattus norvegicus
  Genbank Accession No. AA891810
aatacaaagctttggcattagcaattttatgaaaaaataaaatgtactaaaaataaacgcttgtgtggcatgattggtaaatgatgcacaaaaataggttcttttttccttcaaggcaatcagtcagaaagcagtgttttccttcttcaaaaccattctaccttgttactgcaatgttgatttcacccgttcgaggagtgagctccccatcttgaggaagaggcgatatcccagaagttctcagtggctcaaggccaagggaactgtcattggcaaggtcaccaagggctgatcttcggttaactgcctgggttctggtgagcctttccatatcaaacgctacattatcagtacatggcagatttggcacaattcctagggctttcaaaatattaagtttacacataggacaggtacagtgttcactgagccagggatccacacaggatttgtggaaaacatgcttgcaggggagaacccgaacaacatcattctgcttatagctctctatgcagactgcacagtgatcgaagtctgggtctgtttcctta

SEQ ID NO: 503 - DNA, 669 bp, Rattus norvegicus
  Genbank Accession No. AA891818
ggtacacgaaccttttattcttcataaagtcctcaaaacatgaagaacaagctctttatagacagcagtttcaactaggaagacaaaaggcagggcagagctgtgcctgctcactgcctgtctggctgcactctgcagtgtgtggtaaggagcagacacatgagcaaaaccctggcctcagttcaggactcctctgggagacacccctaccctggccatgtaaggaagccaaacagcaggaatggatgaaagacaaaagacagggctgggaccaattaaagcccagaggaattcctagcagagggactcaattcctcaagagacacctccaacacccatgactgcctccaccccaatattctgggaactggtgatgactttcctcttctctgagttgacctatagttggtaactgtgctgtggtggaccccattgtggagttcatctgctccatgctggcagaagactgacgtcatccacagagactattctgaggtgttctgggttaagagatactggaaagaagttactacctctccactgggccaagagcatcttctgtcagcatttcacctgcttcactcataccacataccacatgcacagccaccaaggacccccagatgtcatggggaaaacggttgtattcacaagcaaactagaaactgg

SEQ ID NO: 504 - DNA, 617 bp, Rattus norvegicus
  Genbank Accession No. AA891824
gctgggccacagagggcatggcacctaatccagagccactcggactgctacgggatgaaaagtttgtgcaacttcttgaagcagtgggaaacccgaaacatgcagtggaggctaagaagctcagggcgggcggctttccgcgcgggactcctcgccctatctgtgcagatgaatggttacatacatataatacagggggactgacttcccctcgccagaagagaacattgtacattcccttgctctttcttggttccaactgataatttcttaagagtgtaaattatagaatactcagctaaaatgtgtcttcataaatagttaacgaacctgccaaaacacaaaggggaaagtatttttcgttcaaaaaaaaaatgacatttgaatgtcacacaacacaagaaacaatgcttagagacatgttattgtttccagaagaaaatggcgagtaaactacttagctgaagacaaagaccacccttccccaggaccgtggtgcacaggaagcgaagtgtcaaacaacagtacctcaaagcaaaacaaaggtctgggtggagcccgctcacttgtaatcctgttaaagaatgagagccactgtttaggtccaatgtactggg

SEQ ID NO: 505 - DNA, 546 bp, Rattus norvegicus
  Genbank Accession No. AA891828
cacttcaaaacctttatcagaggtgtttctgtcctggggaaggggtggccttggccttcagaactgatgttaccccttttccaggctggaggccaaggcgagactggggagaaggccttgggcttctaacagccttactccagatgggaagatcggggccactccaatggagataaaggtttagggctccagcttcccctcatggtagaggaaggagggttgtccttggggatgcttcaggggctggggaaacaggcaggcgcctctccatctggctacagggagctgggacagaggccaagaggggcccatctgtcgcttcctggtcttgccaacaactttgggcaggctggagcagagcaggcagcagcgccgggttctgctgaatcacttgccgcatgttctggaactgaggctggtcccgcaggaactctagggggttctcccctgctgcttctgtggccggttgttcgggcgcctggctttcctggacagaaccatgttcaggctcagggcttcctggaattcccgtgagcaagtactcca

SEQ ID NO: 506 - DNA, 537 bp, Rattus norvegicus
  Genbank Accession No. AA891838
aaagagtctctgctgtctacagggagcaccctgcagacaaaattttattctctatagaaacaaagtcactgcccagcacctcccttgtctttatccatagcagaaaaaccagccgctccctctagggggcgacagcagtcctgggggcgaccagtggagatgaagtacttgctggaaggccttggttctggttcccagagacagctgtcgtcctcctcctcctcagactccccctcagactcaggcacgctctcgggaagggcaacggccatctgctggaatctccctgactgggcatcccacatgtatttgatgggcactttgaattcggccatctcatacccaaacagcttcaggacaaggacctgctctggggtcagcacgtcaccctccttgcacacttcatagtcagacagcaggggcaccagacctttcttgagggcagtgggcagtcccagctgcctcagctgtggctccatggaatgagggaactgtttcagcggccctggatccaggctcacagttaaagttgctttg

SEQ ID NO: 507 - DNA, 591 bp, Rattus norvegicus
  Genbank Accession No. AA891842
aacaaacacctaatatttattaataaattagtatacttgaaggcatttttctgatatcagttcctcaccactaagcccacccacacaaaggcagtgggcgtctagctctgcattagagtctgacaactgagcatcagaggacaggttgataaatgagagagcgtagttgcaaatttatcggacaggagttcttacagctgcagccatttttaacgaaagtggttggatgacaaaggaaacccagcaaggccttgagggcagactggacctatagactatgtgtattgagagagagagagagagagagagagagagagagagagagagagagagaggaataaaaaaaataagagaaatatcttttaaagcaaagctgggcataaagtggctttccaaggtgcagcaaaggtgttcctaaaagatgaagatcgagttctttggcggcccaggtgtcaagccactgaaacagcaagtcctggggacttaaggatttcattctccagcccagagcttagcagcattaacgggagcacaagttacaagcagtgtacggtgtccagacgagaaccatacagcgagcgatagagagtg

SEQ ID NO: 508 - DNA, 249 bp, Rattus norvegicus
  Genbank Accession No. AA891851
gacaaaagacctgctaaaagcaacttatgtaaggaagggtttatcttggctcacaatttgaaggcatatattccatgtttgacagacctgatgatctgatcattcccttctttttattcagtctggggccctaccccatggaatggtgtcacctacgttaaagatcagtcttctctccccacttaaaacttttttgaaaacaccttcatgtacacgttgtatttacatgattccaaatccagttaagtc

SEQ ID NO: 509 - DNA, 501 bp, Rattus norvegicus
  Genbank Accession No. AA891857
actcacagcacatgtttattgaagggatacatacagatgctgatgtagagctctctcagcagtcacacaatatcctgggtctccaccttcctgggaggctgagacaggaggatcgtattgaagaccaatgtgcccacagcaaaaccaccttctctcctgcggtcagggacagctagctagctgcctgatggcgagtctctgggctgttctgcaggaacacctggcacggcagaggcagcctcgtagtccgccatgcggcgctggaccagggcgggcatgaggtgcacgtaagcggccatgaggcggtggttagaatggatgagcttcccagcacagctgtgcaggcaggcctcctcctcagcgtccagagctcggtggtgcaggctgggcacacagcgctggaagcacagttctgtcatccgattgtagaccaacagaaagtctcgcaagtttctcagttgctgctgctggtgctccatcacgcccagggcgcatggcgtc

SEQ ID NO: 510 - DNA, 614 bp, Rattus norvegicus
  Genbank Accession No. AA891872
gagaacatgatgaactcatttattactcaaatggttgcattccattcaagagcacttaatacagaccattcaagagcacttaattgattgaaattaaagagaccaattggcatgggacttttaaaaatacaacttattccttttaagttattacttaaactatctagatcttctacatattaaaatagaagtgagaaaatagatctttggaatctagagtctagagtgaaggctaaaaacctgatatggaattggcatgatcaatccagactacggctaaaatgcaagagaacaggtcaggagttgatcaaagtttcaaaatttgtcacatttggtggaaaaataaaacactaaatgcatgtgcctgtgatgatcaaacggcataatattcttcagaccaaaacatatcctgaaatcttgaacattcaacttctgagctcatttctagctcccgaaagggggttgcaaaatccaatgggattgcatctacagtgaggccgctctctcactgctgacaaaatactctgctttttggcaatggcaatgataaacaagtagatgatgagaactcccgatgctttttgagaatcaagggttgctgatcttgaaaatct

SEQ ID NO: 511 - DNA, 548 bp, Rattus norvegicus
  Genbank Accession No. AA891877
gcacccctaaccaaacgttatattctgggctttacagataacacaaacaactgtgatgtggcaattatgcttttaatggagatataaaacttatcaatgcaaaagaaagttttatataacattagcaatagtgattaacttaaaattatgttttaataatgtgaaatacagtgtgttagacctcaaaaaagaaaccacaaagttccccgcaacctaaaatgttggaaaggctccttaaaattgtttttacctaccaacgatttaatactcagtggcatctggggggacgtaagaaaatatggagctcttttcagctatgatttggagctttagtaaagctctatggtaatgtcactgtgggaagaaccataaaattctcccaaaagtacttccaatagcataggcaactcagaggcttaatattaatagttcaaagcttagaaagcagctgctatcctgaagaattgtaaaagatcaatcctgctactctttctaaaatacagacataacccaaggatgtcagttctgtgaagtttcagggaaacact

SEQ ID NO: 512 - DNA, 540 bp, Rattus norvegicus
  Genbank Accession No. AA891881
gcggttactgatggattaaaaaacacgtttttagcatttcctagctatagtagcgcataggaaattgcactctaaacgaagaactaattaatgaagtaacacaccttacatcttacatcgaaagcttacagtttacaaggtgcctttacatacactgtttcagttgattcttacaacaagcagaaggaaaagaaaaacggtcaatgggaaaagataatcatctattttctttcagaccaaggggcgatcagtacgagtacattccaagaacaagacagcaatacccataagccacggcgtctttttggtaggctgacagtttgatatcaagtgtacatttagcatcagtgagggagtaaggaatgaaacagacaagggccttatgatagtcaaaagggttttcattttcagcacattgtcagaggtaagaggaaggatgcacagaaatgtgtcacttacagaaactttgttcaaagtgtgatgtcccttgagaatattagctaaggagggaatcctgacctaactcggggaaacaagaga

SEQ ID NO: 513 - DNA, 470 bp, Rattus norvegicus
  Genbank Accession No. AA891901
ggtctggatggtccttgcccactttatttcaggttagctcaagtggcttgcgccgctactgcaccctgcaccccaccatacatggcaccacatgtatgcaaagccgtccaccaccacccctattgcccaatgacaggcagagtgcaagacacagttgtttattgactccaggcccagcctggcctacagctcagaatgaagggctcagggaaggcaaaggttataaaactgctttaatggaaagtccccctccccccaatacaccatctgggctggggtaaatgtggccaaggctggccccaggacaatactgagcctgtagtcgttaccaaaatatacatctgtcaccataaaaaatgctgcaccgcctcagccccacaggtataaaatcataaatatttacactcttccatgactttcacagaactgaggtgcagggaacccctcccatagaaacaggctaagatgga

SEQ ID NO: 514 - DNA, 581 bp, Rattus norvegicus
  Genbank Accession No. AA891902
aaggaattattacagaaaatcaaaatatcaatatttgaaaaatacattccattacacagactccaaagaaacaatgctgctaagcgccatggtcccagctgctgctgccattcccacactgagcaccaccagagcagtctgagagccaaagtgatctatccaaacatgtgcctgcagttttggcccagctgctgctgctgtccttggtaccataaggatgtcatggaacatccagttctacacagctgccaaattggcaagtcagtaagtccagcagtcccagattccctcactgtagaaaaccaatgctgtcagttgtaatagttaatatgttatttattccacagaagaggcaatgatcctccagagaaagtctttaaggcatctacaacatctggggattttatatttagttaactggtcacacactcagtttttcactagattagttctgtagagtgagcatagctcagaggcctttgctgagcggcttcctctgctgggctggcaggggagctctggagcttcaggtggctctagggggctgatcctgaacgaagccagtatctgtgaaggagatt

SEQ ID NO: 515 - DNA, 576 bp, Rattus norvegicus
  Genbank Accession No. AA891914
aaagaacatcccattcaacactggctttattactgggcgggggcaacagatccttggcagtggttgggctgaaagctatgagggttggaaggcctggggctcagctttcaccaggcagagcgggcacactagcaagtgcagcaactaggcgtgtatatatgtcaactccacgtagaaacacagcctcgtgcagtcgttcgttatggtcatgtagtaacacgggtgtgcggttcatgggcgagaagcccagagctgggatccccaccgctcggatataacggctgtcagtggcagcaggaaagatctccggctccagagtgaggttcatttccttgcaggccccgctgaaagctgcccaccaggggtccgtatcatcagtgggtgtcattcgaggctctgtaaacttctgagcaaactcaaaggtgaccccctctcccgcttcctggcaccagctctgcagctgcttctcgaaggccttcatgtctacatctggcgccactcggaagtcaaaacaggcactcatggtaccaggtaccacattataggccacaccaccttcgggcttagtcagattca

SEQ ID NO: 516 - DNA, 592 bp, Rattus norvegicus
  Genbank Accession No. AA891922
aataatagatggtttattgggaaccctcataacatttttcaaaaggacttgacagcttttattctactaagacagagtggagaggaaatggcttaagagatgtgatcaatcttttatttaactaagtacggcccttcattttgaaggaaatgatacaatttcaaactggaaccgccttctcaagaagtggtgaaagaaaactgatttaacatacaacctccaatcaaattaaagattctacagcttgctgggaaataaaatgcatgtggagtacgtttcctgatttataaccaagaacaaaacatacaatgaagtgatgaataaaatagtcaaatttatcgggatcctgatttttaaacagttcacaaataaaatctaattttttcaaacaaattcattggatgactatgatcaattctacttcaattgttttaaaaaatagccagacaagtacatgatatcaagagtcttcaacacagtggatcccattttaagaaagaaagaaagaaaaaggtaactaccggtccttaaatttccttagctttccataggatatgtcatataaaattaaagttttgcttccaaaaaaata

SEQ ID NO: 517 - DNA, 583 bp, Rattus norvegicus
  Genbank Accession No. AA891937
ccggccgccaaacattttttttatttttttttttttttttttgccagtgaacacacacacaggagtttttattttatgcatgtcgtgttttgtctgcaacatatgatgtatcagctgaatgcctggtctcctgggagcccaggaaagggcatcagatcttcacagaccaaagttagagacggttgtgagctgccatgtgggtgctgggactttaacctgggtcctttgccaagaggaagccgtgcttttagccaagtcgtctctgcggtccctcttgggtatctccagcaattcttggccagctctgtccgtctgatccatggtgtgatcccctcattccctccccatgaggagagctgaggacacggaggttcaggcacagtatccctaggctacagccctgccatagtcagtgtcacggggccgggtgacaggtgagggcagtagttctctttattttagaaatgggggtggctgtacatattaaaagtgccacagagtgattcgaacttgaaaacttacagaaagaaatgttccctgtcccccgccccatagtcataccctctgaggtaaggctgcacca

SEQ ID NO: 518 - DNA, 588 bp, Rattus norvegicus
  Genbank Accession No. AA891938
actaaagtccacaaatttctgtaagacaagtactttaatgaaatgttttcaaagaaatgttgaacaatatatgctctagtctgcagaatgtgcagttcaaatgtccatacctaattattaatgtgcattaaaatcagcatagagctgttttgagttttaaccataatgaaaacccaggactcctaatttcatcaaatgtgtttacaagcaataataaattcagacccactgtattatgcaatacacatctctagaaagcaacataaaacagtgagatcagatcagtaaaaatatacacacagttaaaagaaatacacaaagtactatagttttattaaaaactactacttgagaaagaaacctttccacaaatagcatgaaagtgtaaaatggtgaaaggaatgtgggaagctttacaaaagcctaattccaactgtatcttcccgagggcggtggcaaagggtacttccttccttctctgggatatccctgtcgccctcctcgatggtcatcacgtctgggtggatatcctccgggcccagccagcatctggtactgatttggctgaaaggctgcattttgggtttg

SEQ ID NO: 519 - DNA, 523 bp, Rattus norvegicus
  Genbank Accession No. AA891940
catggtgcaacctttgacctttattcatgtcctgccctcccaccaagtaaagtcaaatacaaggctactacccaaagcagaaaccccagtccctatcctagactcctcctgtgagccaaaaatatataaagtgctggtgtgtaatatggggaaggccaaacggactaagaaccccacccctggacctcatcaggaggaggagccctgcaaaagaagggcagggcaccaacctagttcccagaggcagggagaaggggcctagcagcccccacttggggctggggaaactcatgcagtccagggcagaaaggaaccaaaaaagaaactggcagcatgaaatcctacaaggatgaaatggggggaggggggtctgtacccctgtgaagggaagagtgggagggttaaggaggctttggggaattcagagaatgggacagcccctccggcgcttattcttccggacctgtaggccagcccgagtggccatctcaaatacctcccgcaccccttccttactcttggc

SEQ ID NO: 520 - DNA, 550 bp, Rattus norvegicus
  Genbank Accession No. AA891943
gaaagaatgcactttttagtagatatgagtgtgagactcttgtctcgttattgctggtgtgcttctcggtctctggcagcagtgtaattatctgcgcatgcctgacctgcagtcaggcggtagaggggccaagcatctccgctccgggcagcagtactggttgtgcgtctttgactccacattagcgtgctccttcagtgttgccttcctcctgccttctgtttattccacgcatctcagcagaggaaacagcagcgctgctcctaaattcactctaagccactgacaggaagaatttgggctgtgctataaagtttccaatatgtctcgacattgttctccagctggtggtgatacttggggatacgatggcatctttactaatggggacaatgtatgcatgaattataaaccagagacgggagagatggccaagtggttaagagtgcttcttgcagcagatccaagttcaggtcccagggcccacatcaaaatcacctgtaattctagttgcaggggatcagataccctcttctggttccgtgtgtgc

SEQ ID NO: 521 - DNA, 605 bp, Rattus norvegicus
  Genbank Accession No. AA891944
cctataataactgtgatgatttattccatcatagagattaagatcacatgtatgttacatacaatacagaataatgtgtatgatgactatataatacccctgtacatatatttctgtatctgtacatacaaccagcaaagagaaaatctacatctgtgacctaagacacagaattcacaccctgcttctccagccaggctaacagtgagatcacagtcagtttcctgagtgctggggccaggttagagtccctgtaaccaacacatacaaccttagaagagctttaagaaaacacgcttgctttctcacagtcaacctactggagcgggatctgtgctataaacgtgacctcaagaattatttctgaatacccatgtacatcataaggatgggaaacaaagcctctgatttcattgcagacctttcctgtgagtccatggaaccacgttaacaaaagaacgagcaggcagaaggggagtcttagcagaacttggttcacccccaatcccactgccgtgagacttctcagttcaacctatccttacccacaccatataaagtaaacccaccttttacatttaagtgatgctttttcataaagtacc

SEQ ID NO: 522 - DNA, 569 bp, Rattus norvegicus
  Genbank Accession No. AA891949
aagcagaaaaacgtttatttctatcaaattccatacaaatcaatcttcaagcaagataacaaaacaatcaattaatacaatgaatagttaggacagcacatacagaacagactctggattaagcacatacgccaaaatcatcttgaacaccaactgtcactgaaggaaagctgatgtgtcagctcccgggggacttaagccaacattgcattaaagactgccttgaacttggggggatcacagtgaaacgccatcacagctcaacatagtcccccagacatccgttcagctcagaaaacaaaattggcaaattcagtagtacaagttctcataaaactagagaagccttgagccccaccatttcttgcagttcacacaaagcccgggtttcccatttttcttcccttttcccgaatcccagagagaaggtgcagtactcttttcaaaggttttaaacaagagtcttttattgaaagatgttgtgcttcctacaattgtctgtcactagagggagtccatgtggagccgtgggcaatggcttactcacttaacctgtctctcacacccaa

SEQ ID NO: 523 - DNA, 542 bp, Rattus norvegicus
  Genbank Accession No. AA891950
ccaaacggttccaaatactcaactgagaactttatttatacgttattaaaaaggaccggcttcttctgttggacaacagagcccaaaactcctttcccccaagtccactactcacagcttgactgaacatttacccaaggcggatcactgtcactgctattcattcaaaacagacagaaatcctgagtgtgggttctgagaagacagttgtgcctgtcttgatggtgacaatttacatccatggactctgctttgctactgagtttctgaaggccaaggctcaggaggactgccttagcaacaaatggttattcctctagtctgaagacatgaaggtggccgaggctccggagagtgcctttgtgcttatcatccatgatgccaacatgtcccgtgcttccgttaccacgctcagcaggacctcagtggcttggcatagattggctccagcacatgatgagtaagaagcaggaagaggcctccaagaaagacagcactgagaaaagccagcaggacatagcggccgatgaaaaaggcatcca

SEQ ID NO: 524 - DNA, 216 bp, Rattus norvegicus
  Genbank Accession No. AA891965
agagatccagtttgacgttttattaggtccagccctctgctacctgagcagtttcctcatcatccccagggatgggcttctatactcccgcccaaagtggttccaatggtttaggtagttaaagagctggtagagcagcaggcgtttgtcgaaccctggagcctttgggatcttctgatggtaggcagtgaagaatgatctggggaaccccccaag

SEQ ID NO: 525 - DNA, 343 bp, Rattus norvegicus
  Genbank Accession No. AA891969
ccatcagcattaatgaatgagaatattttattttaaatggaacatgaagaattaaaatacagcctgaaggtttcaattttgtactgtgaacatcaagacagcaattacccctaagaaaaaaattcacagaaacatgttgaactaactgaacagaaaccagagtgggtatttaagtcattacatttctcatcattgtgaaaacagatgtcctctaacaactccagtctacagacagcacacttcatcataacactacatttaaaacactacaaacgtttacaaagaacatttggatttcacaattgcctatagaatatctttcaatattaaaacaccatgatgc

SEQ ID NO: 526 - DNA, 305 bp, Rattus norvegicus
  Genbank Accession No. AA891978
cagatcctctgaaatggagctatagaccgttgtgagctgctttgtaggtactagaaattgaacccaggtcctctggaagaacagccagccattgctcttaaccaccaagccatctctccaggcccaaattctggtttttgatcatggctgtattactgactccttccaagctaatctcttgtggcagacctgcagcacagcacatatcagccaggtaaggggtctgacttgggttttacagacaagcacaggttagatgagtcatcttacacattacatgtctgtcctgtgagaggttcaagtgt

SEQ ID NO: 527 - DNA, 394 bp, Rattus norvegicus
  Genbank Accession No. AA892005
cccagttaaatatcagttttattcagatgcagagcactcagaggcttcccctgcttgttccgtgggacatttaactcctgtcccctcacctctccctagaaccagcttctcagctagacattagaactcgtcctttatgtcaaaatggggctggtcttcaggcttgaagtccaggttggggctgccatcctcgttgaggatcctgcgggccgtgtagccaacaatggggtatttggctttgtacaccttgctgaagatgtcatcgagggcttccagctccttggcagtgagaccagaaatgtcatgagtgaggtctgcaggatccagcgacatcttggccacacctctgctcgagtccttcccggccaaggcgttgtagggggctccacgtcca

SEQ ID NO: 528 - DNA, 443 bp, Rattus norvegicus
  Genbank Accession No. AA892006
caccagttaaatttaagaacctctctcgtctctattaacagataggaagcttcagggaccaggtactttgaggagctttctgagccagtgaaagaaaacaaaatatttcctggaactggtaagcttgctgttttcagagtgtcaacaagcaaacacacacgccacacacgtacctcgtgaaaacaatgccgctctggcccccggccacactgcctgcaggcactgctgcgtgtccttgtcagtgaatgttaatgcagaccactgggagctgaaggcgagggagctccctgagggagtgtaggcagcagccctgccaccagcttctagagatctagatgtgagctgcaatctgcgactccatcttggcctgagcagggctggaaggagcacaacagcacgtaccagtgtatggggaaaagaactgacatggctggctccggctg

SEQ ID NO: 529 - DNA, 476 bp, Rattus norvegicus
  Genbank Accession No. AA892010
gctgggaaatgaatataaattaagggtttattacaaaataaaaagtgttaagtttctccttgtcagtgattcaagaaaacaaagccagaagccttttgtggagccgaagccaggacctctgtgtgcaggctggtggtcaaaagccaggctcatgagcgggcagacagacactgattaacgacctctagcaggtgggtattctccagggcagctgccactcgctccttatctgcaagttgtttgttcactaagtgggaaaagaagggtggaaaaacagggttaaaacaactcggccaggctgctagccccagtatagattatatttctaccgatgaggttctcttctgacgtctcaggactccaagcctggatcaggatatatttactgcctgtgccataactagcttcttcactaggaatacctgtcacggccagggactgctcattccgtctctgtccctgtgtacttgagaact

SEQ ID NO: 530 - DNA, 487 bp, Rattus norvegicus
  Genbank Accession No. AA892027
  misc_feature (1)..(487): n = a or c or g or t
ggaaatccaaactattttttaaaacaaaatattatttaaatattatgaatctctgaagtcatgagacttatctctccaaaagggaaggacccatggtttctattttttatgcagcattttcaaatacacatgtcaatatatatttcataaactactaaaaaataaaaccctttatcctctgaggttattgatgtgtcctaggtctccaacacatctcattaaacagtaagttctattcatcttcatgaatgaggtgggaactagactaaaaaataggattttaatccctgaggtgtcagttaaaatgcagaggttgccaagattttttttttcatttaaaaattagctttaaataattagcatggatcatgctatctcaatcaaaaccacttcctctacacggagtcctttagaaaattacattttctgggttatggtcaacctgatgtcncagctctccagctatgagactttttttttccttttg

SEQ ID NO: 531 - DNA, 454 bp, Rattus norvegicus
  Genbank Accession No. AA892036
aacaacttcaactttattaaatatgcaggcctgccaccactgccacttgtctccttcaacatcatccttgtgatctcagctccttcctagggctactaagttgtccctcttcccatctgggtagaacggtcatgcaggcagtgggcaggggcacatctaaaaccaaacattagagtcctctgaaaaggatttgcacttaaataagcaccttgcaaaggatattcaagacgggtcaaagtgaggccaccccttccaaggtacagactgcagtgagctaagctgctctgtgtggggcctcagaaggtaaacaggcagcgtggtctgggatttactgcaagtgcggcatgccctccccagacttgttctggtgggcagcgttcttcacatcttggacatcctcgtggtggacatatgcctgacagaggtaacaccaggtagacaggtcaacacagct

SEQ ID NO: 532 - DNA, 592 bp, Rattus norvegicus
  Genbank Accession No. AA892042
caggcaagagcacaactttattttcacctctaaaagtaaaccacaattgataacaacaaaggagactgtgcagttcaactttttattttaataaaaccagaatatgcagagcacatgcggtgctagcatctaaactaatacaataagcaagtactaaagctacagtgacttgagggtcaatctttacgttcagcaagtttaaacccattcttaactttgaaacataactgaaaacattgcttgctgataagacttgctccaatgctatcgctgaatgtccaagtcactgaatatgccaatacaacaaagataaccacatgtttgaggattgcaatgtgccagacattcactgaaaaaaaatacaactaaacaaaactcacacaacaaacatctgagaatctggacactttgtatcagtgtttttgaagtgtttcattaatatcttaagacaagtgtatcaaaaccttggcatgatttagtttcaagtcgccaattttgtttttactaacatcagaaagttatggctacaccgccaatgccgggtctgcttaatttgacttaagagtttattatggcttaacattaaaagctc

SEQ ID NO: 533 - DNA, 489 bp, Rattus norvegicus
  Genbank Accession No. AA892083
gaaaagtatataacagaatttcttctttatttacagtcaagttctgttgggacacataattaaataaataaaagatgtgccctggccagccactctcaactcccaacaccactagctctctggcagcgaatgacaggtgagttgcaagcagggaaggactgctgtccctcttccctagttctagaactcatgtctgttcctactgtccagagagccagcgcggaagcaaaaaataaagtgcaaagtaaatgtgacaaacgtggtgctttggacacccagacaccgtgctcagaccgtgtgcatgggtaagcaggacagagggtgctttcccagccttcagcatgaccagctcccagataggcttctcttaccaacactacactgcatacacaggcagtggctggactccccaacaccagctccagatgagcgctaagctactgctgtgactggcagtgatgctgggtaaagatgtgtttctcatttcag

SEQ ID NO: 534 - DNA, 433 bp, Rattus norvegicus
  Genbank Accession No. AA892112
cagggctaaggacctttattgagcacacggcccctgatggtgctgacggagaaaccttaggctttccttcccagcagcctccgccacagttcttggctgagtagtgcctgctccctccgggcgccctgcagcacactcctgttctcctgggctcttcggatcaggtaggatatcacctcttccaggcagccataggggatagacttatataccatgtatccagcttgccctaatgccagggagacgtggtcacacatgcccagaagttgtccgaagcagacaggcccatccagaggaatgcccagctcccacatgctgcagaaagggtcacattgtcaatccagagagtggctacagcgcctcgttgcctggcgaatggattcttcattgtgggaagccacatgaggtggcaccggggaccgtggttggacac

SEQ ID NO: 535 - DNA, 363 bp, Rattus norvegicus
  Genbank Accession No. AA892123
aagaaccatcttttattgggggaggggtcatcaatccttcttggccgccgccttccgcatggctgccagcacgttgctcagctcctccctctttctcttggcgcggatgtgcgtgcccaccctcttcttgataaacttgagtgctcgcttgtccttggacaccttgagcagctccatggcacgccgctcgtagggcgcgaagccgcacacctcccggatcatatctcgcacgaacttggtgtgcttggtgaggcgcccgcggcggcggctgtgtctcggcttgctgacgtttttcgtcactttgtggcctttgttgaggcccacggccatggggtagcgcagggccatggctgcagctttccg

SEQ ID NO: 536 - DNA, 443 bp, Rattus norvegicus
  Genbank Accession No. AA892128
  misc_feature (1)..(443): n = a or c or g or t
agacataattaatgttacagtaaaaataggcatttactcatatttgtcttgttttagccactttaatttctttcatctcccctccccctaaggttttctcaaagcacattatcattttacaaatacagtgccaaggtcctgagtccactttgcaagaatcttcttcacattcacggaaagcagttacttagtgcagagttctcatttccacttaactgtacacggctttatcggtgctgagacactggcccacctgctggccagtgtctcccacttcacacacctaaaccaagctcaagacaggaaggctgagccgtgaagagcatcnccacancctctccactggcccgatagctctttcccgcccctcccagttgtcctgagaaaaatcagatttgtcacagaaaactgacattcctacattcataggcagaagaatttta

SEQ ID NO: 537 - DNA, 490 bp, Rattus norvegicus
  Genbank Accession No. AA892132
ggcgggcgggtgttgttttatttcagtctgggcatgatgcgtatgaacaggatcatgctgatgaacacgaagcacacgacgatgagcatggcccacagcagccagttcaccgacttctgtgcgtgctgctccagccgctctgactccagcttcagcttctccaggttctggtctgccatcttgagcgaatgtgacagggtctggttgtccttcttgatgacactctgggcagccagtgtgttggtcttcaggctgcgggccaagcctagcatctcctcagccagcttttcctggagaccctggtgcctctggaggacgaggtctagctcggacgctgactgcttctcatctgcaggtctaggccccttcacaactcgcttcctcatgtctgcctccagctctccagaggactccgtgcccaacagctcactccgcatctcactggtgtaacgtgctctagactgcagatgtacagtcttggtggcaggca

SEQ ID NO: 538 - DNA, 442 bp, Rattus norvegicus
  Genbank Accession No. AA892137
aatgcacgaacttaaaaccttaaaaagacatccttttttttctttactttataagtcatcacaatagatcagggaccacagtagctttataaatcatgaagatgcatgtgcagtcacaatcccagcttttgtaacacgttttaagaggatagtacacctggtaacacgtctacatttacacacacatttactttgactaccctctggggttgatgaaagctcaatcatagacctcaaattttgcttttgataactagatgtgtataaaccataaagaagaatttacaaagtttttttcaatagccttttagttcaaatcaaagatatcttgtggatgtattttttttcctcattctttaactagattcttgtattggcagtcataatttactctttcaaatcatcttcaaaagcttaacacgagaaagttcttctccaatgt

SEQ ID NO: 539 - DNA, 439 bp, Rattus norvegicus
  Genbank Accession No. AA892146
acagctattaggtgctgtccacttttctgcacagaccctgaaccatgcatcaacttattttctctgcaacttacaataactctctcagtgacttagcttaacccttcaagtttctgtaactttctcttcatatcttttctttatcttagccagattggtggggcattttccagcccctaggagacccacccttggagcctgggggcagacctggagcactccctaccttcaggggtatgaagagagcaggcagaagtgagggccttctatgcgtgttggaaccctttttttttctggcctctagtaggattccgtctttcctcggtggtaaagaagacctgtaacagttactaacaagcatatcaaatgggatggtgagaaaacaagagaatcttgagaatagagtctaccgaagagggcatacagcatttagtcacac

SEQ ID NO: 540 - DNA, 486 bp, Rattus norvegicus
  Genbank Accession No. AA892149
gaagacatttccagtaagtgtttgaagccttggcttagtacccatccgtcctagtcaccagagttctcgagcacaatcccattgcctgcaatggtatttatcaaaactaaaaatgctagaacactgcctgtgccaacactgcacccagtcgtccatatcaaatactccatcagctggaagaccaaaggcaaatgctgcacacagagtccaaacaacattcttcacagaagaaaacagtgagacaaatttctacaacatgtcacctgccaattcctcaatattattactgcaattatctctaggatagtaaaattaggctccacaacctgtggttgctcgactttttaaaaaaaaacctaagttctaaaaggtataaacaggtatacacagagacttgtttataaacttttgatatttgatatctgtatgtcatgatgacgacatggagacaggacacatggcacgaagtccatagtgggtatgcgc

SEQ ID NO: 541 - DNA, 632 bp, Rattus norvegicus
  Genbank Accession No. AA892234
cggccgccaaaatttttttttttttttttttttttttttttaggtacgaggctgacgccagataagtttttattatatttaaaaaacagtggagctggaagtaagggcgggtcgttgaaggcgactgagaggtgaaaggcctcccgttcctcagtggcaggatctggacccactgcctaggccgggtttaatccagccgagatgctggaaagcagagcacacagttgtgcccatcagggcaaagagggcaagagagctcacagctcctcgataccgcttgctagggtctcccgtgtagtagccatatgcgtaaagaactcgcccaataatccacgccacgcccaggccagaagctatgcgcgggtggtaaacacctcccacggttaggaagaataggaagggagggtacacctccaacgtgttctggtgggcgcgctgaatgcagttgaacatatgcccattctcaggatctgtgctgtacatgacagggtactctaccttgtacttcttgcgggctttgcccacgttgatggctaagtggagcaccatcacaaagctggcggcaccagtgagaagcacgaatccatattccttagagaggacagccatcttggctctggctcaccttgacg

SEQ ID NO: 542 - DNA, 662 bp, Rattus norvegicus
  Genbank Accession No. AA892238
ggccgccaaacattttttttttttttttttttttttttttttttcaaggaaggtaaggtttattattttggctcacggttccagaggatgcaatctataatggctgaggaggcagcagtggaagtatgggacagaggtaattcatacatcctgactggataagaccagcaggagtatataatcctcacccatcgatatccttaaggtttcacagccttcaaaatagagccttaagttgaaagaccaacagctcaaaacaagcctccaggtacatttcagattcaagcctcaacacacaccttaatatatttcaacgaagctacacattcacaatttaaatacagtttttcatcagggagacagatataattcataagagtgtttagactacaaatcagatacaatttagtcaaaataccataaagagtactttaagtaatcaggaaagagattttaacattattgcttactcttatgaattttaaccaaattgataattctataatcttagtttattttctatagacttaaattatactgcttgccaggtaatgcaagtattgatgcaactttctgaaattaattgaactgcaaacaaattataaacttagccagcacacacattttgactctactgcttcagaagtagtactataaaaagt

SEQ ID NO: 543 - DNA, 627 bp, Rattus norvegicus
  Genbank Accession No. AA892246
aagcattcagacactttgaggtgggaaagatgatacgcaggttgtactacaagattcaatggaagatgtcagacaggacatctggtacagacgcagcagcacaacccaacacaggttagatgagagcgcttcatccggaagaaacttaaaagaataatttaaagctctgtgagacaagatatgttccaattgaaaacactaagaaacagtaccattgatggaaaaaggaaaacttctatgtgtaccaaaaggggcgcagggtgaacgagagggaaatttgcgtctgttgaggtacaaatgggagtgttccacgaggggggggataattattattaatgacagaccctgtaaatacaaaataaaatccaaatcactggtcacgaacttcaaatttacacgtaataaaggcaaggcaataagactcgagttctggcctgtcaaatatttactccacagacattatctacagaagcacttggccaacgtgtacacagtgatccttatgcacgccaaaagggtttcggtaaaaatgacgctatatacaatctgtacaccgatccaccagagcgactctccgtctcccgggggaagagctatcaatacaaagagatacctgaggttgcgtct

SEQ ID NO: 544 - DNA, 587 bp, Rattus norvegicus
  Genbank Accession No. AA892248
agggtttgctgaaaatggcggtatataggctgaattatcgagaaggggtaaggtagaacggggtttatcgattatagaacaggctcctctaaatggatataaagtaccgccaagtcctttgagttttaagctgtagctagtagttctctggcaaataattttgtaggtttaattattaaggtttagggctaagcatagtggggtatctaatcccagtttgggtcttagctatcgtgcattatataaatgattagaattactttcgttattgggcttaagtcctaacaatgaattttcacatataacttggattttaattctattatgacatttatagttggcacgttttacgccgaaaataattagtttgggttaatcgtatgaccgcggtggctggcacgaaatttaccaaccctgacaggtatagcttagtcaaactttcgttcagtgcctaatatttatcactgctgagtcccgtgggggtgtggctaagcaaggcgtcttgagctatattatgtgcttgatgccctctccttaagttttacgcaaatgtttaagggattttacaccggtttatggatgtttgc

SEQ ID NO: 545 - DNA, 644 bp, Rattus norvegicus
  Genbank Accession No. AA892250
aaagagagaaatggtttatttggtaacaaggaataaaaagaaattctttaattcttctctcttgtggtggttggactgcagtgtccagtgggcgggcaccacacaggaacccctccctccctcagaccagatctgctgctcaagcgcaaaggccatagttgcatagtcttctagacagaggggctggcctctgtgctttctggggtctcggtggctgttgcagtttccttcttgtcttcaggcttcatggcaggaaagagaagtacttccttgatattgttggagtctgtgagaaacatggtgactcggtcgatacccatgccccagccagctgttgggggcagcccgtactccagggcagtacagaagttctcatctatgaacatggcctcatcgtcaccagcagccttggccttggcctgttcttcaaacagttgtctctgccgcacggggtcgttcagctcagtgtacgcattgcatatttccttcttcatgacaaacagctcgaagcgctcagttagaccctctttgcaacggtgccatttggccagaggactcatgatctgtgggtgatcacagatgaatgtaaggctgatgcatgtcacttcgaggaactctcccacaagcttatcaaggagcctggc

SEQ ID NO: 546 - DNA, 604 bp, Rattus norvegicus
  Genbank Accession No. AA892257
gccactgttaaggcttagcacagatggccaacaagaaaaaacaatcaaaaataaaaccctgaaggaaaagcagaacaaacccctcagagaagcttctccctccccacccttcaaaagccctgtaataactgtacattataattcagatcacatttaaaaacaagttgattattaaaaaacaagtatttcattggaaacccaactttttggttcagtaaaatgtgatataaatatatatgtatactgtatgtgtgcacatagaataaaaaaatagcctccttgtccactctattacctggcaccggactggagacaaatggagggaaacagtaacattccctcagcctctccatgagcctctctacctgggcttctcatcccccatcaatacacagaatagatcttttccacattaatttaatctttgacaggagccagtttaacagaaaaaaaaaaaaaggctgctgatgtaggaggctcacctgaggacggacatgggtgaaagcagtaacctgcttctatggctgtaattatcaaaggaccctgttgggattgagtccacctaacacagacttatgtttgtgctctaaagcaaaacccaatt

SEQ ID NO: 547 - DNA, 625 bp, Rattus norvegicus
  Genbank Accession No. AA892259
gaaaaagcaacttgttttaataaaagatgagaacaatactttttaagtgaatacaaaaataaatatttggattacagagttgggcacacttgtactctgtgaggcaggtggggggcgtggcgtgtgacaaggggccagtgaacaggtcgtcctggctttggaagagatgttcctgctttggctgagtggggagaagcagaccccaggattctgttttcatgagtcacatactatggtgaccctgactgtggaacaggacccacacccagcaccattcaccatgaatgtcaccaacgtccttaacttttcaggttgtaaggtgtggcctatcactcgtagctgcaccggactgtcttccacaccctcctgcttctccccacttctcagaacaacagtcaacaggttaaggcgttccctgcccttccccagggaatgctgagcacattagaggctcctctaactgcactgagcctgtaacccaggttggttacagagtagaacaaatagaaaaggtctctcctgtcctcacacaaaaggagataatgatgttccctgtccccacatctgcttggcctctgtacctgctgtgtactgatgcaaactaaacccttgacagggactccta

SEQ ID NO: 548 - DNA, 554 bp, Rattus norvegicus
  Genbank Accession No. AA892260
aaggcaaacagtgccgcctagaatctttattcaaaagggaatcagcattggacaaggcccacaattcaacagcaaaatgcacttttcctggaagtgccgatcttcagctcctccctatggtcacctgcctgagaacttgctgtcagttccctatcttcatagacgcttccctgcctgccccatctgaccagacccaactctggagaggggagggctggagacatagcctcctggcatagcaggctctgctaccctctctggtgcccctggcagcattcaagcctcctgaggagggtggggatggggcttcagaacagaggggagggaaacctgggctggcagaagacaccctccaggcaccccagcactattagcccagagtcccaggggcctggctctattggtcttgccccccacatgccctccccaaagggtcagtagatcttctgccgactgggtacgatggcctctttgatgaaggagaagacaaccaggatgcctaagcgcttgcctcgcttgcctttggtgaagtaattggagaccacgtcatcgcc

SEQ ID NO: 549 - DNA, 572 bp, Rattus norvegicus
  Genbank Accession No. AA892284
ggaaattttagtcaaaaatcaagcaactaggaaaaatcaaggcaatttattgtaaatgacagttgatttgaataaggcacattcaacatcatcaatatggaaacaaatgcaaaaaagcagttatggtgacttgaaaagtctgacaagccgttaaatttgtgaatacatcaaggcaggattcttggggctaagaaatccttgatagagaatgtaagcgtgttgctggacatcgttttgctgcatttctctcgtgttcacatctgtctgccatacccagcatctgtgctcacagtgctccggccttaaacgagaatgtgaaccaaaggccttgagacaaagctgtcccctccatcagccagcactgttagggtgggccgacaggaagggcactgatcctcactaccctcccccaagcctccgaacttccagataaaatttgttcaaattagttcagggataagaactctctagaacttctctgatgatctctgagaactacctaaaagaaccctaagaaccctaaattttacctgaaagggaaagcgagactcaagtctaaagacagtttctat

SEQ ID NO: 550 - DNA, 640 bp, Rattus norvegicus
  Genbank Accession No. AA892297
ccaagtacaattttttaataaagataattacaaaagatggaaaaatcagctcagaaaggccaattgtttctttaatagatccgtttttttttttgacataataacacatcaatttaaatacaatcacataaagcatggtggaaaaaaatttgcttcataattagaaaaactcacaataaaacttgccaaggaaaaccaaaaacaagccattttgaaaataaatacagtccatgccaaaacagtataaaatgaagccaaacttcctcaaacagcgaaggtttcttatcccagaatcgtctcacttttcgaggttcctaaggttggggagtcaaattcaagggttgttgagttgttctgatttggctcctttggtgtctgttttctcaccactattgtccttggatttgtcttcttccttaacatctgtcctcttgtcctccgcctccttcttgtcttcctcaatcctggcttttttggctcccttcttatgatcagcgacattcctacgacctccttcaccttcatcctcagaatctgagaactcttcatcacaagctatccgcttgtctgatgctcgaatagaaattctcttgtcagggtcttctccatcctcatcaccactgtcttcaagaacagcatc

SEQ ID NO: 551 - DNA, 605 bp, Rattus norvegicus
  Genbank Accession No. AA892300
acccacatcagtccagtttattcttcatacaaatattttacagttttatttttaaatcatttacacatatgcatacaaagaaaaataaatttcaggatggaactttgggaccatggcagtttaaaaaaaaattctgatcattagctactgaagacaaggtaagaggcttagcagtcatttgtgggagtctgcgcgtcgccccacacagaaaacagtggagacgtctccaaccactccctcagtatcacttcatcttcaccttgtagaggtaatgaatacagggggaggggattttcaatgatagcccctataaatgtttcaagaaggcttatggtaacactgaaccctggggaatttggcaagaatgcaacttctgaaccagtttgctacaagagtttgttcagttcctacttccaaggctcccaataagaagagaggattgcaggactgaccacaccacgactgtcccacctgactctgggctcagtccacaactgaacatccctccctcacaggccatggagcctgcgtgacaagccctggccctgaggacactacagtaaccacattagcatcactgcttcagtgtccacccacagaggatc

SEQ ID NO: 552 - DNA, 454 bp, Rattus norvegicus
  Genbank Accession No. AA892310
gaaaggacagcctggctttaatcaagtctcagaaagcctggtttcagcagatgcgccaaccaggtgtcaaacagtccagccttctgccttctgcagcagggctaggttacttggtccagctgactttggggatgtcatagtgctcggtgagtgtgtccaggtgtcggttgaagtcctccactctctgtttgtgggtttttgatgccttcttcaggattctttccatttgccgcttctcctgcatcttttcgaaggccgcctgcgccggcgtgcgcttgtccaggcagcgcctcttctcctcctcgttcttcttgctcgtccccatggcctccagcatcttggccttgtctttgtccttcttcttcttcttccgcttcgtcacgccgagctccgccacgcctttcagcttcagggggcccttctggacctgctcgtatgcctccatatccctcac

SEQ ID NO: 553 - DNA, 591 bp, Rattus norvegicus
  Genbank Accession No. AA892313
agtaatcaaagcctttattattctattaataaacaaccgaatggtcttttcccaacaaaacaacatcatttgtgagggcagaggttctgtttctggtgtacacattccagccttaactctcacggttggcctgctaccagcgcaccagtaggcagtctccattctccacagaataaaactgtaatggctgcaggtcattttctagttcgatttctctgcccggcatcttggaactttcgtaggacaacagaagttctgacacaggaaccttgagaagacgtgacagcagtccctttaccttttgaattgtcatggagtctggcaactgcttttctaatatttgttgttcaggttgatttgagcattttatcttcagtgttagtagctgattttttagcatgaatggctgctgtgttttgagctcctcatcttcaggtgcaccatatttacctggacgtactgcagcagagaagctggtatcttggatgggccgagagaaactctgcacttggcctgtttctgtctggatctgggtgtccaccagcctttctccattcttttccaaaggcttttcgataatcaagctcagca

SEQ ID NO: 554 - DNA, 541 bp, Rattus norvegicus
  Genbank Accession No. AA892318
gaacaagatcatttaatagtgaccctctgctgtccacttcggtgcctaggccacccactgcacccaagaggatgctgggccgtaggaaaggccgctggacatcagtctccaaactaccaacagcagttcacagagctgggatggcagtgccctccctcagggaagcaggcctgctcgcatctggaaggccaggccgtcccctcgggtggcttgctgaggaaagaaacaggttggaagcatgagaaactaagtgtagacacaatgagggcagagcataggcagagtggtaccaccaaccttgttgatctctctgtgtcgttctttggttacgatctcctctaaaacctcaccgtctcccttgatgagccttgtacggccggtctctgggtccaccacctttcgaataacgctctgtcgagcgtcccactcctcctttgtcatgggcttcatggcctggatacgagacttctgctcgtctgtcaggactgggccatcattgtcctccccagctgatctgtgccactgatccagagaggggccg

SEQ ID NO: 555 - DNA, 508 bp, Rattus norvegicus
  Genbank Accession No. AA892353
gaagggaggtgttggcatttatttctggagcagggcctcagcactggacacaattatgcatgaagtcaacacacagacttgtatagtaagtaggatagtctcggaggtggctgacatgcgcagatgtcacgaagtccactccgcgcactgagacctggtgagccaggcgttcctccaccatccgttccacatccctggctgagaccaccttatcagctctagagtagaggtagagctcgggccagcaggagcctgaatcctgcagcctgtcgtagaagtgggtgtggaagagggccgtgaatggagcaaacaggaagtggaacaggaccaccaccagcgcaaatgctgccaggagcaacaggcgaagcacggcaggtctgcgctccaggatggttgccagggccctcagggcccctatcaggtcgctatccccagggccactgtcaaagatggtgcccaccacatgcaaatggcggaagcgctgatgggtctgaatgagctccagcac

SEQ ID NO: 556 - DNA, 662 bp, Rattus norvegicus
  Genbank Accession No. AA892367
gatgagaccccaccagctgcacaaagtactcctggcatcaggcaccttcctccttggcaatgcgatctttcttgagcggtcccatgaatgctttcttttcctccatggtctggaagcgaccatgtccgaatttggaggtggtgtcaatgaacttcaggtcaatcttctcaagagcccgacgcttggtctggaccagcaaggacttccggagagtaagcactcgcttcttggttcccaccacacagcctttgagcatgatgaagtcattggtcacctcaccataatggacaaagccacccagtgggttgatgctcttgtcagacaggtcgtagtcagtagatgcattgttcttgatcagcttaccatccttgatgaggtagccttgaccaatcttgtaaatcttcttgttgatctctgttcggtgatggtagcctttctgcccagctcgagccacagagaaggctacacgggcaggatgccaagctccaatacaagcaactttgcgcagacctctgtgggtctttcggggcagcttctttgtatgccaacgactggtcacccctttgtagcctttgccctttgtcacgccgatgacgtcaatcatctcatcttggccaaacacctggttcacagggacctgctgctccagcctctctcgggcc

SEQ ID NO: 557 - DNA, 624 bp, Rattus norvegicus
  Genbank Accession No. AA892376
  misc_feature (1)..(624): n = a or c or g or t
gttttccttttggtttaatcaaagactggtgaataaacataaataccgcacaatgaccagatcattcttcatactgtgcacacacagaccaatgaacagtaatcgcaaagaaacttgcagtcagcagtgaaatgcactcagcttttctttcccttgtttaaaaaaaaaaggaaccgaaagccacaaatttagaatctcgtcagcacatattctgctgtgacaaatgattcaaacataaatagtggatgtaaagaaactatatgctaacatatgtataacctttgttaatgaaaaaccaaacaaacagaagcagccgtaatgattaagatacattcagttactgataactagttgtacccagaagggccttatcaaaagggaatcgtgctgcagagaaaagctatatatacatacacaatgagaaataaactgcaagatcaacgcatgcatgtttaatactggaaaaaaatcacagccctccagaatttctccacatttgttataaaagccctctgcactcaactaaaattaaaatgatcttaaaagtataatacttcttttcagccacagaaactgcaatggaaataaatgttcagagtcattttcaaaacanaaacaaaaatc

SEQ ID NO: 558 - DNA, 589 bp, Rattus norvegicus
  Genbank Accession No. AA892378
gcgaagccacggcccaactttatttacactcattgcaaagcatgactgagggtaaaggacaggtaccaggggatggggggctgggggtcatggagactgtgcgggtgcacggtagggttgcaggagaaaaggaaggcggtggtgaggatggacagcccctctttcagtgtcccccaggctcccaggcgtccgggggcacagagcaggtgaggctgccttcaggatttggacttggacacagccagtccaatgagtccagccaggcccgccacacccagggccatgccaccaacaatggccatgcctaccagtccatctttcttcatggccttgtcaatcaggcgttccagctccttggcctggctgttctggggctcagtctgtaacagtccccgcacatacttcagagccttttcatattccttgagccggtagttgcccacggccaggtacaagacataatcccgctgctcctctttgctacctttgggcagcagctcctccagcatcacgatgcctctacggatgtcgtcattgtatttgcttcgaaccaggcaccaggcgtattcaaactgcgtgctcttggaca

SEQ ID NO: 559 - DNA, 610 bp, Rattus norvegicus
  Genbank Accession No. AA892380
  misc_feature (1)..(610): n = a or c or g or t
gagttctaggatcaacatggtctatgacagttttgacacacaggagttgtctgcacagcagccaccactgagctctacccgaaggacctgggaggccacagtctatcatcccacagtaactgtggtgcgtggagacttcctctcagctgcaagtccttttgtatggaatacagaggagtgcttatcgaattgttcccacaggcgggagagggaaaacggaagctccagttttaaacaaaggcgagtataagagacagagccatggcaccgcataaacaccagtgttacaccgtcgtctgccatcctctggaagcctgctgggtaaagccatccattctggctgtggactcaagggcagccacgccctgggcagcactccacgccctgggcagctggaggtctgagtagttctgtctgcaggtgacatggtcgcaagcactgggcaggagcctacaaaagcacagcctgggccgcctccctgatggtggctgcagccctctgcagctcttcgtctgtctgctccacggtgaccacaaccctgatgcttggaggaggaaggcacttctcttccttgtccaagtancgtgcctgagtcaatgcgatgcccttc

SEQ ID NO: 560 - DNA, 501 bp, Rattus norvegicus
  Genbank Accession No. AA892390
acagcaagttcacaagctgtcagaggctcactaacagcctccttgtagtcacttgttgccctcctggcaggaccttacaagacaagctgctgctgttccccagccaccagctcccagagcagagggaacaactatttcaggtcgcagaagaacgaggaccaagtgagaacgtacaagatggctcgccaacgtaacgccaggccacactggcgtggcagggttgaaatgcttacaggttacgtacagagcactgttggaagcattgtttcccagtgacggccaaatggacaggcgacacttttaatctttgacactgtaaatactgtaggcatagagtcagagaccgccgtacacaatggaaccgtctatcactgtaaacgaacatactacagcagaactctggggcaggaagtgagatctgcagcacagccttgctagcacgcacaaagcaagaccctgggcatgactgccatcagctctgggctggactgtaagtacagt

SEQ ID NO: 561 - DNA, 609 bp, Rattus norvegicus
  Genbank Accession No. AA892394
caaacagtttaatagcaaataaacaaaggaaggtaccacacttggcagatacaaaatgactttttgtccgtgtgtctgtgcaattaaaacagatttaggttccccattgggacaaaagggaaaacacacaaaaagggagagtccttttaaacacacactcccttgctccaaacttttaacaacttttccttttttaatccactacacaaactgtgattaggtaagaaaagcgacaagggctcttcttgccctttttttttttttaaaaaccattaaagcaaaatccataattttctacagagtacaacacaagttcacacacaaaagacatcttttataaatcaaacaggaaaaaaggaaagctcaaacaaggtcaagaagaaagcatctctacggctgaatcacgactttgagttgattgaatcccgttgctgctgcagaacagactgtgcgtttggtcatagtggcaattttttctcttcacattgtgaaatcactttacattgttttctagtagaaaaggcaaaaaactgtacaaaacccctagtgttaaatacaacgtttgtaccaataaaaaactcacacaggtttgtctccaaaatgtaaagt

SEQ ID NO: 562 - DNA, 591 bp, Rattus norvegicus
  Genbank Accession No. AA892395
  misc_feature (1)..(591): n = a or c or g or t
gcggctgtgcctcttctctaaccaacccccggtaagtatgtttgttaaaatgcccttctccatccttcccttccgagctgctttgctcagtagtggctgtatgcatggaagactgaccttccatgtaaagcccgttcttctcttggatggatgttctggaacacggggaactggaggtgttcggagactactgggtgacgtgctcatactcgcacttcaacagctgattctgcttttctcctgtgtttatgattcgcatatgtggtgttttcaaaagttcaatcaaatgtgatctaatttccagggctgactgaagcctttcaggtctccaaccaaaatatttaggacaactggagcctggctggtaggtgacggtatctagtaggtgtaggaggctttgaagagtgactgcgtacaatcagcgcctgacgagcccgtgtgaacatactgtccttgggctgcctggcagttggccacagcccgcttcatgaaagcttcctgngttgccttcttgtttgcagccttgccgccccaagcagccaatgcactggcctggagggctctgccgtatgaaaagcttagcctcgtgcc

SEQ ID NO: 563 - DNA, 371 bp, Rattus norvegicus
  Genbank Accession No. AA892399
gaaagaaaattcaacggcttggtttattttaaaataataactttcatataggagaatactagccaaattcaatactgatataaatataaacttcttaggtcaaaatatggtcaggtgaattttctgaatctcataaaagacagttttcaaaccatacaaaatatttagaaacaatatacagcaaaaacataccacaatttaaactaaataagctatgaaaaatagcccaatctttgttatgatttagaacatctattttcaataacttaaaatattatctatacttcccatctctaaattctcctgggaagaaccactagtctagatttaaataatccaaatatttactcatggtaagagagactctggca

SEQ ID NO: 564 - DNA, 482 bp, Rattus norvegicus
  Genbank Accession No. AA892417
  misc_feature (1)..(482): n = a or c or g or t
ccattaaaaaaccaaaaacatcactttattatgaatccaagaacactgtataaaaaacctccagtcgtagaaatgaacagacagcacgtttatatacagacactgtacatgtgggccctgccctttaagctaaactccacagactatacacatgggcactgcccttacagctatactccaaaaccaggctgctatagtcctcctgctggcacagcttcagggaatgctgccccagggaaggggaggatgcagtcagtgccgggctacaaaactctctggcagcccagcaggtggaaatcttgcagagatgctgggtcagcccaagctgtctctcttgtacctggcttccccgcaggaagctgtctcaagcttttcctttggtcagttcatctgcaaattatggcttccttggggaaggacatttttnacaagttcagtgtccaactgcatggnctcaggctctttcagcgcatctcccagtg

SEQ ID NO: 565 - DNA, 513 bp, Rattus norvegicus
  Genbank Accession No. AA892446
  misc_feature (1)..(513): n = a or c or g or t
gaaggtgaaagaatgcactttttagtagatatgagtgtgagactcttgtctcgttattgctggtgtgcttctcggtctctggcagcagtgtaattatctgcgcatgcctgacctacagtcaggcggtagaggggccaagcatctccgctccgggcagcagtactggttgtgcgtctttgactccacattagcgtgctccttcagtgttgccttcctcctgccttctgtttattccacgcatctcagcagaggaaacagcagcgctgctcctaaattcactctaagccactgacaggaagaatttgggctgtgctataaagtttccaatacaatgtatgcatgaattataaaccagagacgggagagatggccaagtggttaagagtgcttcttgcagcagatccaagttcaggtcncagggcccacatcagaatcacctgtaattctagttgcaggggatcagnatacctcttctggttccgtgtgtgcaggaatgtgggcaaagtcctcgtg

SEQ ID NO: 566 - DNA, 446 bp, Rattus norvegicus
  Genbank Accession No. AA892465
acataaaagctgtcaaaattctgactcacatcaaaaatgcaaaataatggaatatacttttaaacgtaggcgcaggtctagcagcaaggggactgagagcgcagtgaacgttatggagggctgcacacagacagagccgccacctcaatcctgcagactgaacaggaactgcacattctctgaggagagcgcgagccgggtcacttgaagtaggagtagaagccattgcttcccgggctgctgcccaagctgagctcctggaacagggacagtgggtcgctgcccttcttggcctgctcgggcggaggcctgggcttgggcggggcccgtagcgcactggcataggacatggcgggcttgctccctgccgggctctgctggctgctgctgttggcagactccgcgatctgcttgttgggcatgaggggtgggaactggccgaggtg

SEQ ID NO: 567 - DNA, 470 bp, Rattus norvegicus
  Genbank Accession No. AA892470
aaaacacaagggagagacctggccagtcaacacatgactgaccacagggaaaggagtttatcaaacttcgagagtctaaaaacatacaaatgtgtcttctgtctacagcaattgtctatgctttcccacacaccgactggtaccctctgcccagtcacacacagtgaggacagcaggtcagtgactcacgtcctaagcagttttctgctgccccttctttccgatcagagacttgtggatgtgcggaatcacaccgcccccggctatggtagccttgatcagtgaatccaactcttcgtcacctcggattgcaagctgtaagtgacgtggggtgatgcgctttactttgagatctttagaagcattacctgccaactccaacacctcagctgtgaggtactccagaattgcagcactgtacacagcagcagtggcgcccacccgtccatggcttgtggtgcgagtcttca

SEQ ID NO: 568 - DNA, 568 bp, Rattus norvegicus
  Genbank Accession No. AA892483
gacagaagttacttggattttattttatcttaatactgaaagtaaaattagcataaactacagtccaccataagctatctctctctatatatatatcaagctatagatgcatcatatttggggttgtccaaaatagtttttcctaaaagtgtgattaatcataaaaatttttaaatgaattaaaggtattaaaatataatatttgattaatactaaaaatgagaaaaatactcaattactaattttttaaccaagaataagcacttgctagtcaacctaaagagaagatcacatttatgtggaaaagaaaccagtctgtctgcggagaaacaccaccacgtggctggaacctacaggagctggccctcgccaccatacccaggagtctgggtaacaacaggcaggacacccagttcacaagagcaacacagaacaaaaagagcacccggaagtgaggtgaacagggccagctatgcctggactgagagctgaggcatctgacaagaccaggagtcacagactcactgacgtggtcagcgaccaggaggtaaacaggaagcagggtggt

SEQ ID NO: 569 - DNA, 540 bp, Rattus norvegicus
  Genbank Accession No. AA892485
gtcaaatgacaaccttttatttttctttcaagagaacaaaagagcattagcaaagaatgagtcatttttcaaatatttcacatttgatcagatttggctcatgctaatgatgtgcccctgtgataagcatgttctttctgtggttttcagtactagaatatctccgtgctgaagcggcaggccactgaatgggcctgtctgtacagaaacatggccattggaggtttgcgaactatttggagtgtcacttgtgcaccacatgataacgaacatttagaaacagattcaacaccaatgaaacacttcaaatttcagggagtggcccccccatattacacacaaggtgaaggctatttaaagtcacaaataatcccaaacatttatgaaaacatatcaacaggaagtctgctcccaatttatttttaccatcctgcatgtcagccctacgtccctctaacacaaaggtcaaacatgataaaacgaaagagcgttcaggacaggaatgagacacctatctaaggtttctgtccactgggggtc

SEQ ID NO: 570 - DNA, 617 bp, Rattus norvegicus
  Genbank Accession No. AA892498
gaggactgatacagagtttattgaattaaatttttctatttacaattgagatcacatctacatactattttgctagtctccatgggtacattatctctaacgagtgtaagacttatgatgaatgggttcaatcacacagaaacgcacacacactaactgctttaaaacagtgcatacattatagtcttcctataaagccagctttgattaaaaaccactagtttcaaagatcagtctctgattctgaagatgaacaaggacacatactgtttgattctaaaatctatgttagccattttgtacaattgctatgttattgtactacagtatatattctttaaaaggacactggtgagcggcaccagacagctggcgtcctccctcttacccccaaacctttggccaagagttctcattatgaggacaaaaagggcccagtgataccacaacacagtcccattactcctcagaggtgaagaagcaggctacaccctcctttagctctaccatactacaaaacttgtaaatggttctgagattaagggcatggagaaccatctagaacaagggtaagaaagccatagatgggtaggtaagaaagtgggtacatgaaatgc

SEQ ID NO: 571 - DNA, 547 bp, Rattus norvegicus
  Genbank Accession No. AA892520
gacacagacacaaaggcagctgtggtaatggggtgggggacacaaaagcaaaaatcacacttcctacatggaggcctcaattagacaagagagaggctgggtccctcccctcacactccttctgacagtggctggagtaacagctctctctaatccaagctcagaagcagcaggtgacccccacctagcctcaaaggtccccactttggctccagaagcccctgtccttttaaccagcccagtaattcccctacccgagctccttctcccccaccagtgtaaacagagtttggggctgaacaacagagctctgggaaggcaggagcctcctagatagcaaagggaatgtgcttggagtttcacttcggtcccagaatgagacccagcagtgtctcccagaactcgggctgatccagtatactgcctcttcattctccaccactgacagagataggccaggccccagaccacagtaaaaacaattgatccccagaggttagagctactccctacccccgacccctggcacatacacagatttttggca

SEQ ID NO: 572 - DNA, 572 bp, Rattus norvegicus
  Genbank Accession No. AA892532
aatggaaaaagccattaatattcaaacaaaggaatcacattttaaaaaccctatacatacgaaacagcttccaagaacattcaagcagcagtcaggagggaaaaatgtttcaatagcccaattttcttcaaaatatgccagagaatacaatccaattcactgctacaattcatagaattcttcagtgttttcttgagacgctgaggttcactgttggcagtttccagtggccggcgagtactgctcggaaaggccagcgcagacagctgaccggaagaacttcctgctggaaaactgctcattcccaaggaaagacatttgaaggccgggctgtggccctcacaactcgtccttctctaggtcatcgagctccacatcactgaggtcaatgtcgtcctccacaggaagctcgccatccttgccatcccagggctccctgggagtgatgttagggaaggaaccaccccctacgggtgctgtggagccacgcccgaaagacagttccctgagaaactcattgatgccttgttcactgaaagagcctttgagaagagcaaacttcatcttgcggg

SEQ ID NO: 573 - DNA, 605 bp, Rattus norvegicus
  Genbank Accession No. AA892545
aagaagaagaggttcttaagtttattgcttgactgggccaggtcgttgggttttgtggtcaccgggctttgtctcccttctgggacaatggtttcttccagaggaccaataggacaagcaagttcaccatgagttgcacatggcccaagatggagacaccatagctccggtacagcaggccacccagggtgggtcctacagtacgggtcaatggatgcacagatgcacagaggcccaacatggtccctgtgtctgaagcagatacagccttggtcagcatgctgtctgtgactatgttgagagcacagagactgaatacgagtccaggcaacaaaaggcagaagtggaacacattggacatcagtgccatgcccaggcccacaacagcaaagactagtacactggatctcagcagggcttcctctggaaaacgggtgcttagtctcccaataaccaggccttggatcatcatctggaggatcccaaagaaggacatgaggtagccagcctgtgcagcctccagctggaagaagtccatggagatgatggagaacatcaccatgaagagtcctgaagggaagccagagattaccttgaccaggaat

SEQ ID NO: 574 - DNA, 584 bp, Rattus norvegicus
  Genbank Accession No. AA892547
ggaaaaaataattaaaattttcccaataaaggggagaattaacactaaaagaccatacataccctggttacaagttgatgatctcatttttcataatatggaagtgttcaatgttccagaatatgaactagcatttgcaattttgaaaccccaagtcctgtctctgtaaacccataaatgatgaaataaatacctagaaacaagaatcgtctagaagctgcggtccatgatagagcaatccgttgcggacagacagtgctgcaattgtcacagtgtcacctgctagtccccactgagcttcctcatgatatggctgtctgctgttgcattagtgaagatacttcccacaaccacatgagtaccccagagaccatgacggatcactttacagcagccaaggtcatcaacagagaatcctaaatgccggtaccgttcatctgtttcaaaaagtgtgttgtttgtatatggtccaaaaaatgccaaaccagacgacgggtcaatgaagtcagcccagtatccttcagcccgaagagcatagcaaatttccttagcaccattaatgaacttctccaagagcgcctctc

SEQ ID NO: 575 - DNA, 112 bp, Rattus norvegicus
  Genbank Accession No. AA892551
ggaaacaaaaagtttttatttaaggcaaaaacatatcagccccattattagaaaaattatccttattggaaaaaatggccaagggccaaatctaggtattaattctttaaaa

SEQ ID NO: 576 - DNA, 549 bp, Rattus norvegicus
  Genbank Accession No. AA892554
caacgtttgcagctgtgtggctttgcagcacagcaattcataaaccacactgtacagaatcaccagcaagactggaatgatgttatagaaggcaccatcatgcttattacattaccagagaacaaaatacaggaaagacagtttctactgtacacagtttaaagaaaggaaaggggaggagtgtgttgagcagccatccatccctgtactcaagagggcaggtagaaaactgacaaaacggagctactaaacctggtctagtatttaagaccacagcttttgaagttctcgtttttgttatttcgttcatagctaaaggacttccttctggaatatttgcagtcttgttaaggtttgtgtgcacacgctggtcacagcaagcagatagaatgccctcatcatttcacaaactattctctactggaaaagaagatcaactttttatttccctgttgcctcctggtgcagatttcaatgttaatgacttcagagtacccgacagtgcattctgatgaatacgtaacaagtttccgtttgtgttgggggttg

SEQ ID NO: 577 - DNA, 647 bp, Rattus norvegicus
  Genbank Accession No. AA892557
ggaattaagaggatttattttaaaagattataaaagttgatattaagagtgataaaaaaagacccacaggctttaaatcaacaaatacaaaagtgatctgatataagcaatgtaaaaatacatttttcctgtcccacataaagcataatttaaagtataattataaaagtcttgtgctgtaagtatatttcccttctaagtcttaaaaaccattctaaacaatttgtataaattacaggaactcaaatctgccacagctactagaaaagacattgtccctactgtgctgacagtctctggttccagtgcttctgcagggtgtttgttgccacagtctttaatatcatctctctccatcgaatccagaagtcaaccagccacaggttcccccaaaagagaaagttctaagagtggccacagacacaagtgaccaaattatcttcctaaaaggaaagcctgaagtggcccggcagagtcccccgctgtgggacactaacacagcaggccagagtgactgtcaatcacgaacaagccacacacgggcagagaggcgcctaccacagagtacaatgtccctaagcacctgcgagttagaagctaggtctcaggatggcactattgcaggcagacacctttaaaggtgggga

SEQ ID NO: 578 - DNA, 465 bp, Rattus norvegicus
  Genbank Accession No. AA892561
aagatttacttgtttattttttatatgtatattcatacactgttgctgtcttcagacaacccaatagagggcatcagatcccattacagatggttgggagccatcttgtggttgctgggaattgaactcaggacctctggaagagtagtcagtctcttaaccgctgagccatgtcttcagccttttacgggaaaggtaaatggctcctttgttaaatctgggcagtcgaccacagagacctggacatgagcaaagttgtcctttagccccttctgcaaaacttctgcgagctcctccagacttggcacgtggaaagaaaactcagtgcaagccattctctctcctctcagcaactcagacacagcagctgttggctgacctccaccagagttcacagggcaccagcgtgaacagtccctgctcttgtcacccactgaataaggtgtttgtaatcttccgttagaa

SEQ ID NO: 579 - DNA, 484 bp, Rattus norvegicus
  Genbank Accession No. AA892570
gcctcaacctgcaaacaattggaacacatcatacgtgggcatgcacgctcagcaaatagcaagcaaacacttcagtatcatcttaaaagaagcaggagggtaaagcagcttatatcgacttcgatgagactcttcttgtggaacaccaaggactaattacatacaggtcattagcatatggaaatataaaatacacgaattttttttccttttagagaaaaaaaatatgactaactgggatttggaaacttatcaagaatgtttttatgacataaaagccaacaatatatttctctttataagttaagcagactgatttcatgggtgaattttaaggactaccaaagtcatactagatggtgtacccgcccagacacatgttaccttcatcaggaagcaactgagttaagtatggccacaacattcaacattttacatttatgttgcaccctgtcacaatcagactcaaaactacactctgttc

SEQ ID NO: 580 - DNA, 512 bp, Rattus norvegicus
  Genbank Accession No. AA892582
  misc_feature (1)..(512): n = a or c or g or t
attagccaaagcacatactttattagctcctgaactctagttctccttctcctgtacagttttggttccacgtagccgtccagtccggcgagcagcaatgagacccactttgcgcccagctggggcatctcttcggatagtggaaggcttgccaatgtgctggtggttaccaccgccaaagggatgctccacaggattcatggcaacaccccgcacacgtggccagcagttcctctttgccttgtacttatggtaggcacggccagcctttaagataggcttgtcaattctgcccccgccagccacgacaccaacaacagctcggttagcagaggaaatgaccttcttggaccctgaaggcagcttcactcgggtcttcttggtctctgggttgtgggagatgactgtagcatagttcccggaggctcgtgccagcttgcccctgtcnccaggcttctcctccagacaacacacgatagtaccctcaggcatggtgcccacgggcaaaacat

SEQ ID NO: 581 - DNA, 658 bp, Rattus norvegicus
  Genbank Accession No. AA892598
acaaacactttttattttgtttttaatttagaacatgatacatattcacaagatttacactttatatcataccaaagcaatctagaaacactgtacagagcacacttgaacatttagaaggctatatataatctgtggtaaagtcataggcatcgtcttcttcactcattttatccaagataaaggatctgtcagatggtttacttgctgttgattgcccaggtgacatctccctggtctcttctacaggagtcacatctgagatctctgcatttttttcaccagtaacatgttcttgatcatcaccatcctgttggtcttctgtctgttttggtgactcttcggggatgtccttttcttctagtattccatttgtcaggcccgaagaccggaaaaggattttattagttaaatgagggcccttgaggacttgtatgctgtgtgcattattcttttctagttcttctagattaaagcccctcttcatgattgctgtaatattctcattaaaatgaggagaatgattccaggatgcagggggatggcagtagtaacctaatgaggcacctgtccactcagaccatagcagcttagcagcactttcgacatttgggcttccacctttttggtgcagacctcttctctgagcaagtttagt

SEQ ID NO: 582 - DNA, 476 bp, Rattus norvegicus
  Genbank Accession No. AA892602
aaagacattttatgtgaaaacaaaaggtgcgaggtcctgtcggccctgtcagctccgcaagtcagtttgtgtgcaaatggggctggccacagtggcagggagggccggcagagtgggtgagtctatggagttgtgcaacaaggaggtggctcaatctccctcacaagggagactggctgtacggggtagggcaaggttcagtacaaggtcaagttcccactacacaaatgctttcatgggtggcctccagccccataaggattcccagcagagagaccactccagcactgcctgactgaaagctacccagggatggaggcatctttgatactgggaagattctcaatgccaaggacacacatctgtgctcctggaaacatggtcttacagcccagaaggatcttagaccagtgcctctggactgcagtctgttcctctatccacagtttgcctcttccctggggtctgaattgagc

SEQ ID NO: 583 - DNA, 393 bp, Rattus norvegicus
  Genbank Accession No. AA892607
ccaaaaataatttatttttacgtgtgtgtgtgtgtgcccatgcatgcaccatggcatgtatggaggagctggctctctccttacaccatgtgggtcccccggatcacacttaagttgcaagatgcccactgagccatctctctggctcctcaaatgcccttttttttcttttttaaacaaaacagcaaaaacaaacaaacaaacaaaccaacagttatcctgaaacagagccagatgctgcccgtccagcagccgtggcaggtcctgtttgctgccatcacaaaggaggaaaggaacagctggaaatgtgcatggtgaaaaatatgtaaaagtctgtgccagccgaagagcataagagagtaaggatgatgaggcttggctggaataatctag

SEQ ID NO: 584 - DNA, 487 bp, Rattus norvegicus
  Genbank Accession No. AA892666
aaggtttgtttttaaccgttgtggatgtgtacgtgtggaggtgtccccggaggctagaagagggtgcttgctcccctcgagcctggcatgggtggactctggtcctctgctcttcactgctcagccatctctgcagctccggagaagaaggctctgacaggacagggcccaaaaccctgcttgtccttcagtggccctaggaatgcttaggcagactgaggtaggggcacagaaggggaacctgaattctcatagctcaagacctggttaaaacttctgcgggggtagtctgaggtaaaagagaaggcaggaaaacagttctgtcaaggaaaggaaggcttgaagaaaacagacacaatggagccaggacggagaggtggagcctatgaagtcaggagagtccagaggaccacttctctaccaggagcagaccttagtgatgacagagaacagagctggtcgttagacacagcctacagccagctct

SEQ ID NO: 585 - DNA, 382 bp, Rattus norvegicus
  Genbank Accession No. AA892754
aaaggtctcaagataatttattccaaattttaatataaacaagtaattagcctgtattatacatgcagaacaatttcagccccttccttcccttcccctccccccacacaatgaaaaggcatagtctgtacatgatgctactcggctcttgtagggaaaatgtcactgtgctttgtgtgggctttgtgtgtctcttttctgcagtgctgtggcacatttgatccgacaccgttgacacatgggatatagccaccaaggcacaaaaagggggaaggagcagcaactttgatacaaagaataaggaccaaacaagccattcctgtgcttgaggatggacacacacacacttgaggacccttctttccttctcaaataatcacaa

SEQ ID NO: 586 - DNA, 606 bp, Rattus norvegicus
  Genbank Accession No. AA892773
aatgaccagcaaacaatttattggttaaattatcaatcgtggagttccttgataacattatataacaaatggattaattcaccagaaactggcttgaagatactgattttaattactttaacaaaatttggtttgtgtagcaagctcctactgtcactgctagacagtgaatgcagcggctatccaaagccagtcattccttgaccacgggggtctctcagagcacaggtgaataccagttacggttgtgtttgctgacctagcacctagttccagccttaggactcagaagcagctggacagaagatatggggggaggggagatgctggaaacgaacagctaactcgacttcgggccggtgttagatctgaggcaactcgcaggctctgagaccaaagaggaacacagctttggatgtggctgtgaagaaggcaggccccgggaccgaattggtgggtccagaatacagtgccaggtgggcatcaggaactacggggcttcttcttggcttccaggtcctttttaatctcctcaagttttttagccaggtttggcatgtcgtaattctggggccaaatacattccaaccacgttgcccaaagtaa

SEQ ID NO: 587 - DNA, 635 bp, Rattus norvegicus
  Genbank Accession No. AA892774
ttcaaattgattaataaaatagaaattttattatatcttgcatatccttataatatgaaaaacaaagccaaaagtttaaaaaccagttttacagatgtacatgctaataacaatggtttaatacatttgcaattatataaaatacattatacaaaagatgcctaccttttacataaagtgaattaaataaagcattcatatatttctatgatctaggtgcaatatgcacatacttagataaaaaataccaatttcctgagcaacaatgctgtaattcaaaatcagaagcagttccatggtaattcagtgtttcaataacttaactctgtaatactctaagactagatctccacttctgtttctaactatagccttcgcattgcagtgaggtaatgtcagaaaatgttttttactaaagactaacaattactaaagagtggttcatttaatgaacttttcacaccaccaaaaagcagagtccaaaaataaaaataaaataaaagtcaacaatcaactccatcagaaaagaacacttgagattacatacttcttcctaatctataacatggccagcagatcataacctggttttgcagacaggaatatgtttaaataattaaccattgggtcaaagc

SEQ ID NO: 588 - DNA, 711 bp, Rattus norvegicus
  Genbank Accession No. AA892775
caaactttttttttatttttttttttttttttgcgttgaaaatcatttaatgagaattatactttttctctatcagattagatctgttctagtgattattgtctggtgttacaagctcatctgtctcagagttggttagtgtgcatgaagctacttaagaaagatatggacaagcacagctcactggtccccctgagcacctcacaagactgggaacatcctctcaagggttaaaacagacgggcatacgggctgagaatttattttgaaggcaggataaacaggccagctctaagaagatactgttttgaaagctcacacgtttcataagtttctgagttcaggcagtctcagttctcatccactgagtcctgggccctcaaaagccctccaggtccaccacagaggctgttctaactgggtgctgagcctatacaaagccctggcactcacacaactgccattccccaagatcaactcgtctcctgtaaatatgtgctgtttgtatccggcacagggctgatgaagatggatcccgatggagcctactgtgcattacttcctgatgtgcagagatgtgtgtggtgagactgtgcgggatgctgggagcagtgtgcagtgcgttgggagactgagaagtgaaagccctgttggtttgaggggaaagcaaggaaatgtgacctttcccatagctactcccacagtgagaaa

SEQ ID NO: 589 - DNA, 500 bp, Rattus norvegicus
  Genbank Accession No. AA892778
gcaaactaaacaaaaagtaaattttattagctatctctggggacgctttgcaattcttccctgggaaggaagttttctgcctcatttgctggtttgtacgcagattcttgctgtggccaagctgtttttgtatggatctaggccctgcttccttccctcagccagacgctagtaggacgctttggacggtcggtcggatggagactaggagagcatgacagaacgacctcggcctcatgcctcccgtgaagctactctcttttgccaggaaccttgatttctccaaccacagtatgtgtaggtggagggagccttgaccagcctttcttgagcagacgcagagaagctcttcctgctaacagagcttgtccactagacagtgcagtgcctgctggggtgttgctgagcgtcccagacctgtagcatgaggccattatggctctctgtgcgctgtgccccatcacatctccagtcgccaggcacgttgcggtcttacttgc

SEQ ID NO: 590 - DNA, 663 bp, Rattus norvegicus
  Genbank Accession No. AA892789
gcaggtttcaaaaactcactttattccaatgtgaaatgaagatgtgatggtttaaaaacaagaaaacgttcttagtagctgtggggatgccttgctggccgcccattccctttgaaacaaggtccctggacagatactatccatcagcagctccagaaaagccccaagtagaggatctgcctaaaacagctctcttaggctcaaagggtggccatctccttcagggacagcagacaaagaaaaacgacacaggcagggaggggagagagagagggcagccaaggcagtaggagccccaacacccaagagcttctttgtgtaagtgcttatatggcaaaaaccaagaaggagtcaggctccaccgaggtgacaatcactcctaggcatggcactttccctgggatccacaattcagccctgggtcccaccccttacccaactatgcattaggcagctcaggttaaaatggggagaaagatacattcagactgttggcccccaaggttatgctcacctggggtacagggaggcaagtcaaagcctgtggtaggaccacctctcctgcttggccaaagccaggcacatggatgtgtggggtccaccaacgctggccccttcccttcaccctaaagctacaggtaggccaagcccaaacacagtaaa

SEQ ID NO: 591 - DNA, 562 bp, Rattus norvegicus
  Genbank Accession No. AA892796
cttgcggtagccaaactttttttttatttttttttttttttttttttttttggagaccatcccatgtcctttattgggccagcaatgctggaagctttgcaaagagtgaggtccccgctgggatgtctgtggcatcttggtcttgactcccataatgctggggggcaaggtggcatccattacttggtgtgttctttgacatactcccagccctccctggagtattctcgagccttggagggggccacggacaaggctgccatgaccgagatgatgcctgagttccaggaatcacggaagttcggaaagttaatctttggaggggctgggagctgtgacatctccagacccgtctgctggcacacatattggctgaactggtacattgctggtggcacaacttcctcggccttccgcaggacagcctcgctcttgtcactaggccccagcagctcctggtcataaacaaggtagactgctcctccagccacacttcccttgatgaggaacctcattagcgaccacactcgagccaccatggtcggtctctcacttcactcgc

SEQ ID NO: 592 - DNA, 409 bp, Rattus norvegicus
  Genbank Accession No. AA892799
ccgtgtcagaaactgtttaatgttagaattacaggcttttggcaagtatatggcaagcccatctgtccgttcccatgtccactgagaacacagcagagggggcatgccccaagctctggcctcagtccagacttcagcttgggtttgtccagcgagatgtctccagtccatgaaagcccatctggctacagcttgagttcactgggcattggctcccctcttaggccagctgagcaataggcacaaactctgcctgaaactctgctgcttcctgaggcctgggctggcgccccgtgtagagaaatctctggacaccaaatggtttcagtcgtcgagcaatggcctgggcgagcgcagccctgccctgggccggcaaagggccagtgacgaacaccttcatcctcgtgcc

SEQ ID NO: 593 - DNA, 496 bp, Rattus norvegicus
  Genbank Accession No. AA892814
aagcagcgaatggagagtttatttcctcttgggcccgacagctgtgcagggggaaaacagtgcaggcataggcactagggtgtgtggcactggatggcctggagtttatttggctgcctgggaggtaactgtgtgagtgtgtaacaaggtgtgtagggacaggcgtgatcctcccagaactgagacagggcccttgggacatggaagcaataggagtgctaggcttggcacacagacaggaatacatagtcagctgcaaccactcctggatgttcacttggatctgtccagtgccatttttgtcaagagatctgaaagcacggaacatggcatccagcctgaccaagcagctgatgaagttatcgaaatccatgttcccggtctcgtccgagtagcggcggatgatcatgctgtagatatgctgattcaggtggaatcctgctgcagacaggatcaggttcaaggctccacagtgagcagtgaggcggcaggtctg

SEQ ID NO: 594 - DNA, 626 bp, Rattus norvegicus
  Genbank Accession No. AA892828
actcataggtaggaatcccctttattccttatcaaaacagtttaacagcaaatgtagataatatatgttttatttagacatataagttatcttccatgggggcattctatcttgccccttctaatgaaagagggcaaatttttatattaatcttattcaaagactagaccaacttaacagtaacagacaaagagagcagagcatctagggtagggagtagaaaaattctactcataagcacatttaaacttcttaccagtacagagacacctgctgccacatcagcattactcctgactagtaagtctcccagtacacgtcaggggaagtcccaacacgtattttaaataaatttcactgacttgacattcaacgtctagattagatattcaaagtcttctttattgcaaatatgatgtctttgacctgaggtatggagttgtcttctagaatctttgcgtaaggcatagggacatcagcaccagtgactcgaacagcaggcgcatcaaggaagttgaatgcagggccttccataattctcgcacaaatctcagctcctactccaaattgtggccagcctccttccacagttacgagatgatttgtcttcatgacactggcttcta

SEQ ID NO: 595 - DNA, 634 bp, Rattus norvegicus
  Genbank Accession No. AA892829
tttttaagccaaaaattaattttattgaatcaaggcattcattcagcacttaacacagattgcaagaatacctcagcatgtaggggtacagggagagagggaacggtttacatttatgatgtaaaataaaaaaacctaatcgctacagatagtttgtaaaatttgtaaaactcctcgaacaaggtctagccaactttactgtttagtgattttccccctttcttaaaggacgagaagctagatgatgtgtgtattactggttataactaataaatcagcttggaaaatcctaagacagaagcataaatacaatataaaaaggcgagatttttaaaatcgtattataagaatattaacaataagtggaaaagatacattagaaccagagcggtgttacactagttcaaaacagaactcaaaggcaaaacaaagctgatgcacatggagggaaacggcctgatttcaggaagtgtgtccagacagacacccacagagaagtgctgtcagtgactgcgtggtcccctgtgttgctcagccctgcatccctggcagagtgcctggctcaggaagttaggctttctctaaggacttgtagtactccaccagcacagtccacgccttgggggccatgaag

SEQ ID NO: 596 - DNA, 635 bp, Rattus norvegicus
  Genbank Accession No. AA892832
ccgggtaatcaaaaaggttttaatgattaatgtttagacattatttgacagtgtgggtatatccagatgagctaagcacactttgacagcacactactgaatgttatagttttgtactaagatatgtaaagaacctgcgagcggtaccctcggatggagacacacatggacgctctagattagagaagatcaatgtaaacagacgctgcaactccgtccaaacagaggctaatgaggaccaactggctccttagaatatgaatgtgcaaaattaaagcatggtaaactggtatttacataaatatcaaacccacaattagtttgtacattgtcaattgtcttctaggatgtgtcacgagtggttcaatcaattttcttcaatgcagaaggtgttcaaaggctaaactttcaacactttaaagatgacacatgtaacaatagtccccacttgtatgaccaacgtctccagcgcactatctgttacttttaaacaagcgctttaaatcaatctttagatgctaagcagaaaaaaattacagatgccaccgagatttacactgaataaagcgattgctccccaaacacccagttcctgcgtgctccagctctttaattttgcctcaaaatgattacgg

SEQ ID NO: 597 - DNA, 570 bp, Rattus norvegicus
  Genbank Accession No. AA892835
gggggaagggatacgatagatataactgttatccaatctgctgtccactgtgtacacacatacccacacacatacatatacatacacaccaaaagtcccccccaaaaaacaaaaaccaccctcaacctgtaccaatacttcatattttgaccaaaagaatcgatcctgggaagaagtgcaaaatgcaaaatccaatgaccaagaaatgctgataaaacagcatcattaatatacaaaatatttatattacggaactaataacaggtgatgttctccatgtctgtaaaactttggaacaacagagctgattgttaaatctagtccatgccagcttccaaaacccagaagattttagttagcttcattttttgatgcttcatcaaaattttctacaagatctggaacgtcatcatcctcttcatcaatgtcttctggtttgggtgctttactatccaatacttgtcgtgggaactgttcagctaactttctaaggctcgttaagctgtcagcaccaagctgacttagtattccaggaagcatttctgtgattggtttggcttctgcatgacc

SEQ ID NO: 598 - DNA, 544 bp, Rattus norvegicus
  Genbank Accession No. AA892842
cacaatgtcatatatttgcaatgctttcaaagcccaacagtgattttaaaaagaaattaaacaacatgccctcattgactttttaaaaatctatacaattcaagctaatgaaatagtttattatacatagtaaacgtggcgtttaaaaaaaaattccaggcccagatgtctgcaggagtatgtgagaaatggattccacgcgagcataagcagaaaaactactgaatgagaccacaagtccaccaactcctttatagtaaatgccgacgttcaccgaggctcgaattcctgtggtgtcaggagatatatttaacgtattacacacatgcttacgatgcataggaaaatggaaaacaaaagatgcagttgcataccatgtggactcccaaattttctaatttacaacttgttaagaatgacaatatacagagaaagtattttaaaatagtgtatgattcactgatgattttttttttactcaaataaataccaaattttgccattttaatgtcacagtatcattcagttttcaatccaaggggag

SEQ ID NO: 599 - DNA, 600 bp, Rattus norvegicus
  Genbank Accession No. AA892843
ggacagcagcagcacccaaggcttctttattggtgttttagaaagaaagggtggacttcagggtgaagcagtactcttaaggctcaataccaatagattttcttgaatcttcgagtctcctggatccccatggcctccatcacatcttcttctaatgtctttagccggggcacgtaagttctttctaaagcatcttccactgatgtgtccttggggccatcagtccatgtttcagggacaatgccatctgctctaggaaattcaggtttggggataattctcccagatcttgtagagacacgaacacgctctcctgcctcagtaaatctccactggatctcagtaggtttcctgtccacaggatccactagcttgacttggtgatgaagcaagggggcttcgctagggatcatggtccctcggtgatccttggttctgccaatgtagcggtaatgcgtgttcaatccctccaggacaacccagttccgctgccgaacaacttggactactttgccctgcttcccagcatccttgccttctaagatttccaccatgtctccaaaagaataggtgccagtcttcatcagagatggggtctac

SEQ ID NO: 600 - DNA, 644 bp, Rattus norvegicus
  Genbank Accession No. AA892851
caaagagaaaaattttattgatataaaatgcacttataaaatgtccacagaagacatgtcatttttcactgctatataaatttattgggaatgttattcacatctattgtcacctaaaacatactgtaaacaatgggttattccctaagacaaatgcatacgtgattctcagcaatcattggtttgattattagtaggttacaaggtcacatctctgtggaatgtcagtgaccgctgtagtgtgacaggcttcagcgcatcattgcacacactgcttcagaacagtccccaccgggtctggacccaggacgcaaagcaccccctctgcttgaaacggcagctctggaaggtctgcgtcacagctccaggtctctcgctgcagcactctatgggcacgtgtgatgacgtgtacacacgcacgactaaaaagtttacctctcgtaaacaagagcaacattaccgtcaactctcctgcatatttaagtagtaaagtctacgtatttgtaaacaaacaaaacacacaaatctatttttaaaaacttccatcagctcgtaattcctctgtgatctaagtgagtccacactgaatttctgaaaggcgcatgtattaccttaggtaataaagctctgcaaggggtgcttca

SEQ ID NO: 601 - DNA, 436 bp, Rattus norvegicus
  Genbank Accession No. AA892860
ccatataataatttaatatatgccagccaaacaaagtagtttatctttattcaattaaataaaaacagacctgtcaggtatattatataacattcactatatacacatgatttaggcgatgcaaggtaattctaggtatgctaactgttcaactattagtgaaacacagaaggtgtcaggagcccagcgtgttcctgctcacattgggtgcctgcgtttctgtggacagttagagggacagccacaagccaggacagatattaccagtaaacgtctgagggacagaggggctggggatgagtctagcagagattaacagtctcctaagtgtggatagcatacttgacagttacgctttaacaagttcctcttcgatcatgttcatgacgtcaaagtttttgtttgaaggcaacaccaccacattttacctcgtgcc

SEQ ID NO: 602 - DNA, 515 bp, Rattus norvegicus
  Genbank Accession No. AA892861
caacattaaaatagatttattaattactggtgaaaaacatgatatattataaccaagtcatatactttattgaaaagaaaaaaatattcggtaagaagtttggcacggtcttctgctgggacctgtgtgaaatcccaggacttgtaggtcggggctgccttcgtgaggggtgtcaatgcagcccaagaagtgggtaaagtaggaagtgggggtcaaagaaaggcaatcaagaggtctgctcacaggggccttttcccacgttcatgcactgtcaggctgtatcctgggacagcggggagcctcggagagttaatgagaaacagaattgtcactttggcgaccaatgtcagaaaacaggttcctggtcaagcgttaggtactagcgaattctgaccctgagacttgaggtgtcactgtctttaaactgccaggcatggagggaagtgtccaaagatgggacttatagagagaagtggtcccggcttcctgtagtctccatctcaccagccccaggc

SEQ ID NO: 603 - DNA, 570 bp, Rattus norvegicus
  Genbank Accession No. AA892864
aaacttaatgaagagtagtaataccccatgcctgtccacagctgtccagggttccctgagcaggagggagtgctgactgcctctctttgcacactctgtctttatttcctaaacagaaggagagctaaatggcgctctggacagctcctggacccttccttccctacatgcagtgcttgggccctgctgaggggcacagtgaccttatgacctatagtaagtggccagcctctgactgctatgcatggtcagggccaccagagggggcagagggccctcccaagatctagaataaattccaccaactccgggatacctggatcccaccttcctggagcccccccccccttccagcagccaggcagttctccttggcagcagagcccctccccagggttctatgtgcagtgacatgatcctgaggtaacagcaaggccctctgtaaagatgaaagtgctccaagggagcagtgagccccagttattgctggcgctaagtgaggcctggcgtaagcctttgggcgggcacctgagaggacaggggctcagacttcactgcttcagggtagcc

SEQ ID NO: 604 - DNA, 528 bp, Rattus norvegicus
  Genbank Accession No. AA892868
ccacacaatcacaatgtttattgctgtgctgttgtgaaaacaccatgcaaatgccaaagtgcattgagtattgcccagcccctcaaatgtgtaagaatcccaagagtctagacccactccaccaaggtctgctcctgtcccacatcagcacccatgtgcactcgcagctcacacacacccagcacgctcgcgcgctctcgcgctctctctctctctctctctctctctctctcacacacacacacacacacacacacacacacacacacacacacagagtcaaattcatagctctcacacacacaggagtgcgtgatgttctttggagcagcagagaagtcctcccccgctgggaggaatgcgggagaggtagaggtcatggagtttcctcctctttcatgtcacctcctggcaacctgtgcccagcttcgaaaggcagcatgggcaggaaaaggaagcaaaaggggctctggcctgctcctccttgcccacaagcgaagccaacaactgcaggcctgttgtgaggta

SEQ ID NO: 605 - DNA, 533 bp, Rattus norvegicus
  Genbank Accession No. AA892888
  misc_feature (1)..(533): n = a or c or g or t
gacaataagaactctggctctttattgagtgctgctctcattctgacgtttgtctgctctctgttcctctgtagttcaggatagagtgtatggtggggagggaggctgaggtggccaagcaagggatacatgccaagggggcaccagggagaacgttacaatgctgtgagacacggggcatggctggaaggacacacaagggcgagagagagagagagagagagagagagagagagagagagaatgaatgaatgaataaatgaatgaataggggtcctaaaagggttgggttgggtaagtccagggccttgcagtctagttttctgcctcaagagagcaggaagaaagcctcactgtggagaaaggctgaagctgattaatgatcaccccggccgtggcagcggtgctgagagtctctgctttacctgacccctccttanaagtactggggtgggttctggctgcacatggggagatcagatggccttcttgggggagagttatttcacagttttccccatgatgtggggccc

SEQ ID NO: 606 - DNA, 541 bp, Rattus norvegicus
  Genbank Accession No. AA892916
caaaattaagaccagtgtataaacatacttgccaagaaataagcaacttggagcttattacattagcacaaacattacatcaacagttcgctaatcacatctgtgggtctaaaggaatcaggccgtaaaagggcatctctaaaacacccctgggcaggtccaaactcgctgggtcacccaattacagtggagaaggcagtcacagaaagaaacccaatgaaatcctcctggccactaaatgggagtcttgaaaaccctctggcatgaagagacttgtagagagtgggagaacacccctttactatggaggaaaaccaggagtccaggtattctcacacatctgacatggcccctgagaacaagtttcagcttgcataatccctgcatcaacacatgcattaccactaaaaggagtcccgttgggtcctacccggatgcccaggggtctcccacaggtaggttcatcatctcgggttttgcaagggcccgaaccaaaccgggcgatggtctctatttctccattctccagttttacaactcg

SEQ ID NO: 607 - DNA, 603 bp, Rattus norvegicus
  Genbank Accession No. AA892918
gcagatttagaaatttgagatttttaataaccacaaaagaaatcctttcacacctaatgattattaacagaatgtagtggtgtattatctaaacagaaatcgtgctgatgtgccataataaactattagtaaaaaaatacactttagggcacagcattgtatcacaaattttacagaagggatactttgcaagaatttaatcaaactagagtaactgtatcttttaaatgcagcacttaaaaatgtaacaactctgtgcattctttttcttaaaaaaatgaccttatatgtgtagaaatgctgctttattgctgcagaggtcaaagttcaaggctcaagaggtacaggagagaatacaaaggtagccttagaaactcggttctgtttatgtataaaaaggtaaagtttataaaagttaatttacaaaccaagaacaaaagtggtatgcacgcattatgtacatgcgtcctgaacacatcaaacatctcagatgcatagcccaaagaacagaagaccaccaaccactctcccttgtcaaaaaaaaatattttaagtcacaccattaatttcttccaggtgatttacacatttccgaaaccatca

SEQ ID NO: 608 - DNA, 574 bp, Rattus norvegicus
  Genbank Accession No. AA892919
ccggccgccaaacattttttttttctttttttttttttttttttttttttgaaatgcaatagctcgcttttaataacaacatacaaaatctagggaaaaccccaagtagtgcccactcccagagaccaaggaatggaaccagatgggagccatgctcccgtgcctgctctccagccccgaggggctgaactctacatccacagctgagttctctggatctggggcactaaccccaacagcaacaggaggcccagcttccagtttattccagttgggtagaggaggcctcagctagagcacactgccagggtgaggcttgggctgatgacccacatggccacttgcacccaccaaggacaatgcagactcatgagcagcctggtctcctctctgcctaggaagccaggctgaagacaagcccagcatgctgatcaaagcacggggcaaaggggacagcaccagcctcgctctaagctctggctcagggtggttctgcctacaaccttcccagaaggattccaccccggtccccatcagacatccctcagcagaagtaccctcccactttccttca

SEQ ID NO: 609 - DNA, 544 bp, Rattus norvegicus
  Genbank Accession No. AA892921
actattaaacttcaaaggaatttattatcaaaattaaaaatgaagccttggttctagataaaggcataatcccattcaacagttgtcaaggagcgtgtgtcggcagagtctgcacacagcactgaagggcaggaggaagcaataggtgggctccagttggaatgttgaatatattcagacagcggcctcttgagttagacagtcatgacacactggatgaaatcatcgtacgagaaattcacaactccttgttgaccagaatcccgtctgcggaagctatctgtgagagccctcagtttgacacagcaggctatgtagtcatcaaaggtgatcttcccgctggtgctgtaccgctttgctactgaattcacggtttgggggctcaacctgaaccccatagtggttagggccttctgcagctcctggggatccactgtcccactcctatcactgtcgaagctgatgaagtgttgtctccagccactcagcacagtccagagctctctgaactcactgaatcccatcgtgccagacatatctctat

SEQ ID NO: 610 - DNA, 441 bp, Rattus norvegicus
  Genbank Accession No. AA892950
cgaagaaagaaccaaaagtgtctactgtataaatacaaaaggccaaaaccgtattaacataaggtaatgaactaacagagactgtccattagagtgcggaggcctatgccttcccagctgacgccaggtacttgaccaggaagtctctcagcctggatatgtgcatcatctccttcatcgtggtgtctcggcttcgaagctggatcagcccactttccaaggtggtttcagtgattagaaccgtgaagaggatactcatctcatcgtactttgaatagagttgctctaatgaggactgtgcagtttccaaataaccaggccacacagcaatcccattttctagtaactcattgagtagcccttggcaaacctgtcggagttccacggttgggcctttccccacatctagagccaccttaataggggctaaacaagggtgaa

SEQ ID NO: 611 - DNA, 472 bp, Rattus norvegicus
  Genbank Accession No. AA892986
caaagttgtgaacaacgtcaagaacacatttggctacttaattactattttaaggatggcgtgcagattcatagagtcagcattgtggttttcggggggagtataaagattctgcctctactttcctttacagtaaaactgtgacaaattaatgaaacaattatacccgctctaattgtatacggtggttcctggcctcttttgttctacaccccaccggctattgtatacatagtgagttttaagcttataaaaaatgtagtagaaattgctgttgtctaaataggtaaaactattcctttagtagcttgaaatattactacgtggttgaatacaaacctttctttagtactactttagtaacacttaaacatacacaaagtttaaggaacaagcttgtaaccagtaagtctatgtaaaattctgcattgcagactaaatacagcggatggcgtatagacatcagagaaaa

SEQ ID NO: 612 - DNA, 496 bp, Rattus norvegicus
  Genbank Accession No. AA892993
gaatgaaaactcacttgcttttattgacacatatttaaaagtccggattgagtgatgaaaggcgtggggtaaggggctgttggactaccccacccctaccccggcgctgcttggttagcgcctgcccagtgggtccagtggctgtatggtgagtggcctagggtcctgctcttcatcaggggtggcggtggggtatctgagtccggaggccatggttcctctgttcctgacccactgtactgtgaccctccctgtgaggcaggcaggtcttccgggctctgcaacctgggttggggttcgaggttaaagggatgcagttgagatttcatttgaggggggtctggagaccccaaggtgcagcttcttcctgagcgggtgtggaggggcgtctcccggtccaagaggcctgtcacaggtgctcgctgtgggacagagggggtgatgaagacctcgagctgagccatactctctcttcacccgttcctcccctcctgca

SEQ ID NO: 613 - DNA, 465 bp, Rattus norvegicus
  Genbank Accession No. AA892999
  misc_feature (1)..(465): n = a or c or g or t
gagtggcagtgatttattgcatactcacatatacatacaggctgacggccaccctgccttcctagccaccatgtgagtacaaacacagttcttctggaggttttatctctatgcccttccccctacagtgggacttcttggaagtctgaaaagtggaaggtcacagagacccatgtagttgggagagagaagacaacaactatgtatgtcttgactgaggcaaaagagtcttgaggccagtggtaatcgagtcctgaacccaaggtcctccagaaaggttttcaccaactatctgatatgacatcaactttacccttgggtgtgggcagtttttccttctccttgactctcttctagatggctggcacagacagtcaggtggggctgtggttctgcactcctgacccacaagaagctagggagtaagataaccatccagccatagctcctgggtcatggtangaa

SEQ ID NO: 614 - DNA, 482 bp, Rattus norvegicus
  Genbank Accession No. AA893000
aaggaaacaaatatttccctttatttgagtgtgttacatctactcatgggatagtcataaaaactgaaatctttaatttacaggactataaatgatgccacttaactgagaaccagccagcaaacagtagcatctgaagaccaccactcctggagggttccccacaccaagtcagcctagtagtgactacagtagattaggagctaggagtcagaagaacaatgcttgaggttataccaacgggggtttccttactcctttgccagctgcacattggtaggctttgctccaatggggatcccatatttgtgcaaagtgttcatcaaaatctccctcatgtcgttgttgtaggaatcaaagtcaaatacattccgaaccacactggagaggccttcagtagggaatttctctaagtgtttgacaatgttgacaacttctctggtagaataaggatagttgataatcccttggtcagccaattt

SEQ ID NO: 615 - DNA, 367 bp, Rattus norvegicus
  Genbank Accession No. AA893032
acagtgacaagaaggcttacaaaggagaaggaagaagaacacattggacacctgagattgacaagggtcatttttggtccaagtgctgttaacatttttgagggagttttaaggcatttgggtctcagggtttgttagcttgccctattgccttcttagccagcagttctgagcaactctcaagctttgttaccatctgaggtgcatcttctttctgtgtacttctatttctaactcattgttatgctgttactctctggtctcccatgtagagtactcaggaggattttcttgatctttccgctccattgagaacatctttaattgtatgaaacatcgcaggttgtctttatctacagagtaaagg

SEQ ID NO: 616 - DNA, 481 bp, Rattus norvegicus
  Genbank Accession No. AA893035
caaagatcaccagttagtctttttaactgtttaaagattacatttacttatttgtgtgtgcacatgcgccccatacctggggaggttagaggacaagtcgatggaatagattctctccttttacaatgtggttcccaggaatcaaattcaggttaccaggcttgactgcaggcacatttacttgctgagctctagtctcttttctaacaattcttacagttgtaccacacatactgtgtatctgtgtttgcatgtatagtagtttttacatattaacaatttaatgtctggtgagtgacatgagaacaaacttctccaacccataaaagcaaagctacagaaagccagaggaagtatgcctgtgtgcagggttgtggggggtcaggtcacaaaacaaacctactgactaatagccatggatcaatgagcctgcaaaatgaataggagagagtacaatttagccaaatgtgttacaggaatc

SEQ ID NO: 617 - DNA, 410 bp, Rattus norvegicus
  Genbank Accession No. AA893065
  misc_feature (1)..(410): n = a or c or g or t
caatagaatttaattctggagtgtgagcaggaaccagttaactacattcattgtccaacccccactggtctaagactccaaattcttggcatgtgaatcagctgttgggtagctccgcctcatccctgcgaggcggtaagaccgaccgtggtgcaaaggcttcacaccgagggaggggaggctttccgctgcaggaggtattggtgaatgctgtcagcatcccgctttagccaagcagcgttcagcaggatattctcacaacactgctggatggtacgttcggctgaaggagctgggtgactctcaaagaaagccttaacttctccagccattttatcaactgcanacccctcaactgacagctttatgagtctggatattaaaaaccctccctggtatcgattataaag

SEQ ID NO: 618 - DNA, 424 bp, Rattus norvegicus
  Genbank Accession No. AA893080
aacttctgacaactgtttccacatgctgcgtcatcctttggcccacagacccacgtgctaaaagtgtcctccaagaagacatttcctatataaacatgggtgtgatgtgtgccacacatcctcaagatgacagaaccctttgcagataaaattaaaattgaatctgagtgagaaatgaccggatttcccactttggcaaagatcaggcagcagcctcccggcagccatccctgtgtagaagacagggtgagctgtgacctctgggaacaaggcatgagacctcgtctggggaccatcaggccagggaggcaggtgggcagtggcaggctgagggcagaggagaagggcagggcagcatgggggaggggtgttgtctgtacgtgcacacgggaggccatgggtggagacgaaatcaacttcctat

SEQ ID NO: 619 - DNA, 479 bp, Rattus norvegicus
  Genbank Accession No. AA893082
  misc_feature (1)..(479): n = a or c or g or t
aagacaggatgtcagtccctgaaaataacatttactggttattgcctttaaaactgtggattttttttaagttacagaaaatccagttctgcaccacaatacaactgtaaaaaatctgcatcaccttaaaactgtgcagtaatgccattttataactgcataaattttattagcgttctaaacagttttgcgattttttttttgtattatatgcttgcaggttatatcttagtgcaattcagtcccaaatactttaattttggaaaaaaaacatacagtttgaatgtaaaatacccctacagatataagcaggggcgtttcccccttttaatactttggttttcaatacagtccacggtatagcaagaactacacatacccaacttatatttaagttgcaagcacatgcttcagaagctacttttaaaacagtcnccttgcaaactctaccccccttaacatcacaacagtaaacgatt

SEQ ID NO: 620 - DNA, 479 bp, Rattus norvegicus
  Genbank Accession No. AA893088
acgatattgtacagtttctgaagctaataacagagttctcttgcatgtacatttaaagcatgacaaaataaaacgtatttcacaaaagaaattcatattacagtactgtggggatcagaggcaaagagtgtgcacttgtgggtgatgaacaatacattcgattcaaaagaataatctgtgtgaataacagcttcttggctataataaatacaggacaggttaagagcaacacctggagtttacggatacaagacaggtgttttgtaatggacgcacttaggaacggtagagcgctcttgacttggcagcggcatcttgctagctctacaatcattagacctttttgagcactgcagatgaggctaccctacattcaccagcccatacctcagcgtgccaaccgcagttactgcccattttcccctgggtaactagtaccaatgttcaagcaaggtttcaaatcagccgtacctttaatt

SEQ ID NO: 621 - DNA, 597 bp, Rattus norvegicus
  Genbank Accession No. AA893199
catagtcaacaatgtgttttactatacatctcagatttatacatttcatatatgcttttaaagcttcaattaacagatcaatacaaaataaaatatatatatatttatatatgtgcagcagtggttctcaggcacaggatttaggaggaggatggagggagtctttccttggcatgtcaaccatgatagtggaacgtgtccttctgacttagctgccttgattgaactttacatggcaaacagttgaacatgtatgccattgctcattggaaggataagatttgaagtaagttcatagcctgcatgttttgaagtctttaagacttaaatgcttgctttcctcctacgagctccaagatcatcctatgaaaaaaatatgtccacaaactgtctggaacacctgcctaagaaccactgcctatggttattcaatgtcctcaggcctcacaggatgaggtaatgggatgatggatttcttctcagtgtccctggaaagtgctttcctcatatcgtaggcatcctcatcaggctccccattgctggctgagtagtactctatgactgtcctgtagacactataacccaactgcttgtaca

SEQ ID NO: 622 - DNA, 478 bp, Rattus norvegicus
  Genbank Accession No. AA893202
cagaagaaaggaaataaaggcagccacttggcccaccccacccgcttggctcctgccacacccataacgtggagaggaggaaggggaacagggtcagtgtccctgaaagcaggtccttccccaaccttcccttccctccaagtagcaaggttagaaaaacattaactgtgtggctcctcccctggctctggctagacactgagcccaggaggaagtggggcccgggagaagaaagcccctccctccgaggcagagaggctgccctgactggttctggggagggatggaggtaggtttgggggcagaggggagaaaagagccctggaaaccttttccctttaacctgacatatttatatatttacagcaattcgggacacggggaggaccaatgacagctggggttgccattgcttcttcaaaggaaggagaatgaaagccactgggcatccccatccggttacattcccctcccttct

SEQ ID NO: 623 - DNA, 663 bp, Rattus norvegicus
  Genbank Accession No. AA893217
aacataaagatagtgaaatcttaaggataaggaggcaatttatatagcctcttctattcattgttcaggatggagctttccaaagggcataggtatgagatttaacactggaaaaatacatatgaaacttgtttaaccggctgcacttaggaccaggcacagcacaataaatagagaactgcataatcttttaaaaagactgctatattttaacacatccttacgaaagaagcactatcagtgaacaatctgaaactctacagtgtgggcagagggaaagttaccgtgaaaatctgagcgttgtttctgtaacttcttcacactcatacatcaacagtctcagagggaggaagaacgcacatctcaaatccaggacaacaaaacacacttggtcaagtagtttcttgggatcattcattctgatcacaagcctaggttgctggtaggtgtaggcagacaggttttgaaatctttctcatctccactagtcagggcttctggatacgaagccatattggaagcaaactgattaagcagcaccgttaatccacctctcaacaagtcattgcataatccatatctgatttaatagtttttaaattgttatgtggaagaatatccttcttgaatagcagtctatcgtgtagacatgcactagcaagg

SEQ ID NO: 624 - DNA, 682 bp, Rattus norvegicus
  Genbank Accession No. AA893219
ggcaagggaaggctgtattgtcgactccctgtttgcctgccccccacatctctgcaatatctgtggtaggcgatggtcttagggtgggagccggagccaggctcagcctgtcttcttgagcacgtggatgaagtagcagggaacgtaggcctggccgggcctgtaaggcttgaagtcacccaggacgctgtgctggcacctgcccccaaaggcttcttggaccaactccgtgaaagacgccaaacagtgtgggtagtaagagagccgaaacttactgaagccaggagcgccatctctgccagcacctggcacctgcactgtgtagtccagggttaccatgtgggctttgttgtttactgtcagcactgacgtcgtaatgtccttggtcaggtcactcttatagtagatgttcttccctgggggtgcacagcccgtgctgaggatgtagtcgtagttgcggtggtcgatgaccagcaggcccccgggccgcaccatgcttgcgatgttctttagcgccagccggtgctcactctggtcacctttgctgtccggcaggtgagcaaaactgttcccaaggcagatgacagcgtcaaagccatctcctgctggcacatctttgtccagagtcaaccagttggcttcttcaatgacccacttgtcaaaggctggctccttcctccgg

SEQ ID NO: 625 - DNA, 645 bp, Rattus norvegicus
  Genbank Accession No. AA893235
gagacagaatataaaatgtttttatttcaaaatgcaaaatgatattcgttgtaataataataataataataacaacaacaataaaaataacagtataaaaagcatgtctccttccctaatgcaaagtgacagctccttgatcgctcccacagccttggacaaatcacagtgcatgctgcacagcagcaagtcagtcccagatcccttgggtgatctgtgcagggtcagttctggattcggtggcaccttgaaacagcatgtgactctctctcgcccacctcagtcatgatctctctgtgtctcgcttctctgccagtcaccagccttaagaggcatgctgccggagggacagggcccggctgcacaaagtcgcctcctgtgtcttgccttctgctatcagggcctgcttgtggagggactgctgctcacaagcatcccgcagctctgccactgccgcctcctggtcgcgcagacggctggcagctgtgaaagggctgcacacagtctccactagaccgagcaccacaccgaagaacgctagcacactgcccagcacgtacagcttcactagcttccctcgggacttctgcgtcatcatctccttagccagaaggatcagctcctgcacactttccatctgagctc

SEQ ID NO: 626 - DNA, 635 bp, Rattus norvegicus
  Genbank Accession No. AA893237
ccaaagaaacatttattgaaacacagggcccatgttagaggctcctgagccccagggcgaggcccacaaggcagagaccattgctcagcagacaccccaggttgcagagggaagacaggccatggtagtagaagaatttctgccggagagcactgtacttggggtccttctcccgcagctggcggtaggggtcagggccctggaggctgcctggcacctctgtccccaggcctcgctctttctctatactctgcagggcccacatggtagctgtggtgcgagcctcgagccagcgagcattgatggtagccagtgtgagactcagaagcagtagggtaagctgactgatttcccacagcgtgaggttgatccaggcccgctgtggtgccaagatgcagaggttgatgaaggcacaacccaaggagacgtgaaaatagactgggaagagcttgctctgcacaagtccaaacgtgtgcctcgggaggctccggaaaagcaggaagcctgaggcaaaggtcacccacatctgcatgccccagacaccagacaagaccagcaagtggaccactttaatcagacttcctgggtcctcaccttcttccattctgccgcccgttggagcaccggaggtcagc

SEQ ID NO: 627 - DNA, 630 bp, Rattus norvegicus
  Genbank Accession No. AA893239
aacaaataatgacagctttaatcaatttctttactataaaagacaatttaaagtgtatttttaaatacaatgttagcattgtggtaattttgctatgaaaaggtaattctaccttgtaggaaagagaaaatgcctcaaaaaacgccaagtagtttattcatatgttggaacgggtgagccagtgaaaatcctgggccttccgagtactttgtggttcaatcatgatgttgataagacacggtttacttgtgtctttcagagcctgcctcagcgagtcttggagctcttctggcgtttgtacaaaataccctttgcctccaaatgcagtcatgacctgctcgtagtgtgagtttggaagcagacacattggagggattgttgtagcagttccttgaaaatttaatattttcccccaggtgtcagcatcaaaaccttggtaaattccattattgttcactaccaagattatgattggcaagttgtacctgcagatggtttccacttccatgccggaaaatccaaaggcactgtctccttccacacagatgacccgctgcccagggcttctctccttagccaccacagcagctgcaatggcaaatcccaaaccaactcccattgttccaaagg

SEQ ID NO: 628 - DNA, 643 bp, Rattus norvegicus
  Genbank Accession No. AA893242
aatgccgtttatccagtctcagaggtagcccttgaagggaagaaacttttgatttgacccttttttctaagatttttgtttcaggacctgaattaagaaaaatcaaaacaaaacaaaacagaaaaattaagagatgattttttctttctcttgaaagtttaagagagattctcagttcatcttttcatgactggaactttctaagacaaaccacaaagccatataccaagcagaaatcagagaacgaagcccagtccccatcagctgcaggtggaaaccacggagaagccagcacagcaagtggctcatggttaatacctcaggtctgttctgagaaaagatgccgatgaactgctctgagcaaggtttgaaacccttctggatcagcgccgagcctatgcactcagccatttctgcaacctgtttgtaagaaatccactcatatggctggtttggctttctagaacctaaacaagggccatcatttgacacctgaatccccctctggaagccatcgtacatcgttctgacatcgtcgtagtagtacagcaagagcttgtcgtcctcaaggactgctgatcttcggacaccctcagtagtacccgttactttcacagactgcatggacagatcacatgggggc

SEQ ID NO: 629 - DNA, 433 bp, Rattus norvegicus
  Genbank Accession No. AA893244
ggcctttgagagatttattgaagaacaagtatcagcgggacactgaaacagtcacaccaactgttagagcaaaaaggcactttactgtctttagaatctcactccatttggtaaggcactgcagccctgtcgtgttttcagtgaacacacagttttaaaggcagcaatgagtaactccggcctaagtgagcacaggcactaacagttgaagactcactcgctgtggtcacggtatgtaacttactctcaaaagagctcttactagtattctaaaaacgtggcagtatgaaaaaaatcagtttctcttcagtctgtggtctcttccaaagacacctgtatgtaaaggtattttttcttttacgtatccctgggcaacagtgaaccatgcataaaatatcaaaattccctcttagaaaataaacgtcaaaggacg

SEQ ID NO: 630 - DNA, 500 bp, Rattus norvegicus
  Genbank Accession No. AA893247
cacggggtcacagactttaatgtagtgcattcgcagggaaggccagccttcgctcccaggcccgctctcgtcctcagactttaatgtcatgatttagaagatgcacgttattgcctaaatattactctacacatttccatcagtgctctggaaacacctttgcttgctacttaatttacaccataattactgggttacagctttagctcgttggcaattttggaagcaatgtttttgaaagcgatggatgtccctgatatccgcttaaaccggaccccattcagagacagtcttggcagcttacagacttccatctcccactgcaccaggctctcagcgtgcccgtcgccatggacacagaagagcaggaagcgctccctctgctcatagtcgcaggtattggcgtccagcactttgcggatctcccgcatcatgtcactgggattcatggaactagtggttttcatgctccaggtgaagcgcaaggaccgaggtttggc

SEQ ID NO: 631 - DNA, 480 bp, Rattus norvegicus
  Genbank Accession No. AA893280
gggtccaaaggtgatatttcttcacatggaaaaaaactaaattcaagccacacaagaacatgccttgagggaaacagtgatgaagcctgctcggaccacacaggagcagatgcccattcagagcagaggccgcatgaacaaatctttattcggaacagacagacgtttacagccaataagaacacaaaggccatggacaagactgtaagcgcacctgagctttaaggttctggtgaggtcctcacaaaactaacacactccacataccagccgggtaagaagaactcatgtgtcagggccagcgggggcacgaccataagtgagctgtgaatgaccataatgaggacctttgttcacactagctgcttttctaatctaatcaggttaatttcaatacagcaaataaccgataaaaaataaaaggtgccacctggtcagcaacatcatacactggtgacaagagaacgttactgagttgtg

SEQ ID NO: 632 - DNA, 370 bp, Rattus norvegicus
  Genbank Accession No. AA893320
gaaaaatagtcatttaatatttaagggagaatagaaatcgtgggtatctaagtttgagcgaccccaacaaaccctgaaacaggaacaccttggggttcaaaggccaaagttgcgtgagcagtcctcactgtcccgcctgtgatctacctggaacttctcatttgcagccaaagggcccagcaggatcgaggcccatgtggctacttttcccactgacgtgtatacaacaagttatcagaaggcacacaattcatagtgcaacagagaaaggaagtcaggttacagactggctcagaatcaggccagagaccctgcacttcctcagtctgaatacacaggtgcatgaatcccacacctgaggactcctgca

SEQ ID NO: 633 - DNA, 464 bp, Rattus norvegicus
  Genbank Accession No. AA893325
cactgtacagatatgaactggtcatagctttatttagaataaaaagcctgaaacacacccagtgatctcaataggggatgaaatgccagtcataggggtgaaataatacactgattattaccaaaagataaatacaaaatactcttttggggtataaagaaaaatgaagctttattcaaagaaatactgaaaataaatgttttacaaattgcaatcaagcacttaaagtataatttggtaatgaattctcagaaactatataatacattctgctgttggccaatgcaaagtgtactttaaactagtattttacatatgctcaaccctcaatcatcttaccattcattgattataatgattcaacagtttcttatgtagtatctcagaaaaaaaaattccaaatacaaaacattcatgccagcaaggaagatgtaaagacacatgtaaattacggcaggactctg

SEQ ID NO: 634 - DNA, 362 bp, Rattus norvegicus
  Genbank Accession No. AA893328
aaaaaaaggaaaaaaagacaaacctggaagattttaaaaacaacaaaacactagttagttgcttcatgttacatttcacaaccattatgttaaatgttttcttttctacagaaacagggtcctttacattacaactgcaatagtttactgctagatgtttaaaattacaggctagtattcactggaacctgttgatggtaacatcttgaggttttctgagctcccacctaaggtacaccaggccctctcctaggaccatatttgcaggggaaggggagggagaggaaatcacagatcaagttcttaagattgtttcactctcttcgtggatttccgtttcttggagatctgttcaaaaattc

SEQ ID NO: 635 - DNA, 512 bp, Rattus norvegicus
  Genbank Accession No. AA893436
aacaaatatccagtgtgtttaatgccacctcaaacaaagacaccacccacagagcaatgtgaaaccgaaggcaacacatgacaggctcactacatttcatcaatttatacacagaaataaaaatccagctaccaagaggtcctctcccagagtgccggtcgcctccgcgacattctcccctctccctcagcattcgaaccctcttactaagagaggtagcttgtgcccaggctctattccagtagagctggagaatttatgacacactaaaggaagccaccagaccgggcttccgggcaacccacttctgtcccgttcctccttttctcttgcttagaacacaaaagtgaccagcaggccactttgtggtctcgtaacccaatattcaaagccatcgtgcttctgatctgaagtgttttctgaaggttgtggtgttcagctgataaggcctttcgtaactgattggatcactatgcaatgaaggaagggctcaggcttcctcagcaagttaa

SEQ ID NO: 636 - DNA, 466 bp, Rattus norvegicus
  Genbank Accession No. AA893453
gagctcttaaattcattgaaaaccaataatgggagaagtaaaaccctgaaaaggtgcgtatagtgcacgtggacagtagccatttgtattctgaatgcaaagattcctgtcaatatgaaaagttcgggtcgatgttaaacaaactacaaaaggtttgaacaggtcgctcacaaaaggtatttaggttatcagttaccatgtgaaatattttcattgtcgtaacacaccagagaaatagaataaaaatgggggacagtatcactttacacctacgagaatggctaaagtcaaaagaatcgacatgcggcctcctgccccccgcagatgtacaatgtttacacctgacacacacaggtcaccagagtctggcttcttttcatcgaatataaatacctgctttccccaccaccaacaaccaaccagcaaatcagtgcccgtatctacttaaagaaagttaatgggtgct

SEQ ID NO: 637 - DNA, 410 bp, Rattus norvegicus
  Genbank Accession No. AA893454
gcttctcagattttattttgatttgggttcacagcaatcccaaggtgccagagcccactgtcagtgggcaaagtatactttagacacagggaaggtgggtacaccccaccactgacagacttagaagatgcatttggctacagcatggatgatctctggtgtgacattttctgacgtctccataagacactccccatgagtttctatttaattcgcttctaagaaactttggaaatttcaaaataagtggatggtcaagaataaaaaaatatgatcttttttaagctgtgtgtataatgtgcctggtaagttagagggaaatgagttttggaaagcagggtttatgtggtataaaaatactgttcatttacctaagactgataataaattttatggttgaataaaactta

SEQ ID NO: 638 - DNA, 354 bp, Rattus norvegicus
  Genbank Accession No. AA893471
aagcatgggctttcagcagggttcagcctaaagtgcagtcccagtaaagtcgggggctgcacgaccattacactttgcgggggttggctcaacttcatcagaagggatgactatgacccacagggaaacaacccatgaagagaagaacacagtgaggaaaacatccaccatcttacaagtcactttgttaccacgggcacgaaatggcagttactgttagtaggtatctgaattaactttctgcataatacaagtaggtcaaagtccagcagcaaaatattgcaacccagcaagtagatacagtttcagggtgttatactgtggaggagagtacacaaaggacaaacaatgata

SEQ ID NO: 639 - DNA, 656 bp, Rattus norvegicus
  Genbank Accession No. AA893495
gcaaaaacatcctttaataactgttacctctttctcagtgctcccttctcaagtgactttgtcttgagagtggcaacaagggctactcattgctagttatctaaaagtagattgggttggggagaccctgagaagactggggaaaggcttccatccctcaaagtcagatggcaccaaggcttctcaggacacgttcttaggctggattgaccacttggctcatcatcaggctgctccatgtgaacttgtcaaagagcaggaggatgaagggcttgttgaacttgatgtcaagtggttcagagcgcaggtgtaggggagccccgttggtagaattaggcaacacattcccttcatccagttgtagcatggccttgtggaccatcgttaatgtcaagggaacatctttggtgttgcctgagaaatctgattggttggtgagcaagtccttaatgttcaggtcttccagcacgtctttaaggtcataggtatcagacatggagaatttcgggatgtataggttcacctgccttggggtcataagcttgccccacctatcaattgtgtcccgactaagtgcagcgatgacagtgtccatctggccctggtccggaagaatgaagaaggcagttccatttcccacatagtccatctgtatc

SEQ ID NO: 640 - DNA, 630 bp, Rattus norvegicus
  Genbank Accession No. AA893552
cagagatgccatttggtttaatcagcgtggtccccagggaggtatctcccactttccagtccatctagccccacgcctccctctaccactcttgggagtcaggggccctttcccaccccaagccatgggtgcagagttattcatatccaggcctacccagtcacgttctcctgctggtaacagaccacctaatcctaggtctgctatgctgtggggttgaccaccttccccatgaagaggatatcctgggagctggtggaatacaatatcaccaagaagggccggttgaatataaggtaacgtttcttgggctgggcagagaaaaaggtggaaaaggagccggtggctgctgctgcctttgtgccaacttcattcacatccaggacggtcttatggaaaactttggataagtacaatttctcctttttgctgatatttgagaagttggcatttggggtgaacagatcctggaagcccaagtcaggcaaaatctcatccaattcataggaatttgaaatggagaatttagggagctgcaatatgagctttctgtaaaagaacctattctgcagcaagcgtttccaccttagtagcatgcctggggacagcacctgctccacctcattcaac

SEQ ID NO: 641 - DNA, 564 bp, Rattus norvegicus
  Genbank Accession No. AA893596
ccacattgtggaaaaactaagcagaacattgaacgttttcgaacaatggcacaaataggtagacaaagctaaacaggcagcagggcttacattgtaagtttatagttaaaactacggatgaacatttcagtgcaccacaattccaaactgcaacgaagacggtaggtactcggggatccagctgaggagagatgggtcactgcagctgtactctgtaagcacctattagcaacttcacctacagaagagaagtgaatgtgtcagtacacacagctcccatctttaaggttattgctgtttttagtaaaaatataatcctgctcatcagtggaaccattagaatggttcagcaatccagcttccttcctagagagcccagtggcagtttagtactgaaggtagggtttgggctgctaaggagggaggcctgcatacctgagccaaagtctacactcaagacacatatttgcccaacatatacatcttagttcttcgacatttcagtgttataaggatgtataatttaaagggaaaaaatgagcagttactgtctataaatatgaa

SEQ ID NO: 642 - DNA, 511 bp, Rattus norvegicus
  Genbank Accession No. AA893603
ggagaccaccatttatttttggttaatgccaaccaggaacactactcccgtagtacagtctgacacaggatcctcaggatgacaacaatggaaagcaagagcatggcaggtttcctgtttcagacctgaggtttgggagcttggggtctggccatgaagagcccactgctcataatcctcccaacacgcagagaaatcaagtctcaagtacttcccttcatctgctgcctctctcaagggagttttgggtttccctagaatagatgacaaagtaatgtgctgggtatggcggctcctccaggcacacaggccaaggctggaggagcatcttctactgtgcccaacctgggctaaataggcagatactatcacaaagaaataaaagccccaagtgctctaataatggacagatattcacaactcgaagcctcagtttccccttctgtaaaatgaaggagctgggtaggtcaggatcagtattttggctaagggtatgtggctaagggataaa

SEQ ID NO: 643 - DNA, 515 bp, Rattus norvegicus
  Genbank Accession No. AA893607
cgggtgaaaatcatggcaaactttattggcataaatcacaggagttgaaatgggaaaagccaggttagaggtttaaggtaaggaaaaaaaaaatcaaatgatcatatatccatgacccagagaatggccctccaggtaccccagtctcttcttggaggggcctggagcaggtaggtcactgtaaacagagcagtaaggcctgtgggtggaagtgtcggtcggtgtcgtctgcagcgcccaagctgaccttgagctgggctgctgctagcccagtcctgactgaggacccttgtctgggaccccatcacactgggcctctgctaggaagctgatgtactgtgtaggtccccagcctatggaaccttccagagtgccttttccaggacacatgaggttcaaaattccaggtccaaagggctgaacattcttggaccagttcttaatgaaaagtgttggcctgggcagtaagggaagggtttgagaatacagcagtttaaaaaacagtcctgggagct

SEQ ID NO: 644 - DNA, 401 bp, Rattus norvegicus
  Genbank Accession No. AA893611
gcccagccctatctaaacataaaataaaactacaggactgaaattaacaacccattaaaatcggcaataagttatgaaaatcataaagcttttttttttaagtaattaagggtagttaaattatttaaagaatacaaagtccgaacagcttggggtaaggtatccagaaaggcttcccggagcaaagcagtggcccagagggaaaccttcgagtttgaaaggagggagcacatgacatggagtgcgggctggaagtctcacccagaagataacatttctgcaggtatttgtgtttctgtgcccggctcaacctccgtgggggctttgagtgctgtagccgggggctcggcatggaggggaatgatgaagcgtagccatgttcacactttttgcctcgtgcc

SEQ ID NO: 645 - DNA, 508 bp, Rattus norvegicus
  Genbank Accession No. AA893641
acagtcttgtcccaaactctttattctgtgcctcagaaatctcagatttttaccttgtcttacaacttgtgccttcatctaattactaaaccagtggttgtcactgacttagtggtcacaaccagtgaggcttgggtatgtggatactgcagtgggtggctgagccaggaccaagaatttagaagaggccactgaccctgtgctcagtggggccagaagcagaaaccatgatgcttggtgtgttttctgacatacttaaacaatttcaacagattctagaatgtttgaaacacagcatatgccccacatacgggctctgggctggtaccagcccagccatgcttacaccgtgtgcaccctgctcagctaccgccctcacacatgcacgctcatttatgtgccaaggcaactctgcccatggctgcagccacatccaagaaacaacttcacttgtggaaatgaaaggtgggttccctgtcttcacagaggataagactaccacagtcct

SEQ ID NO: 646 - DNA, 346 bp, Rattus norvegicus
  Genbank Accession No. AA893658
agtaaaaacacaccaaatgacttttcactcggctgtgcgacaggcattgtcttactacagctccatttccagaacccaataccaggggctgagagtttaagtataagaaaccagaaggacagttgaccactctcgtttgctcgatggctactagggccaaacctacattttaaacacaaggaacacttctaaaacgggcgaaagaaagcctcgcgtccgctctaaacttggcttcgcgtcattggcgtccacacgtctctgcacgcaagatgttacttcctcttggttctgtggcccacaatcgcttcaaactgaatattctgtatacggtttatagcttttaagc

SEQ ID NO: 647 - DNA, 409 bp, Rattus norvegicus
  Genbank Accession No. AA893664
aaaaacaatccattttattaggttttaaaactagttacacaattgaaagtcaattaggtactactctgtacagggactgtgcctgggtatgctcacacttcaatactgtactaagcccactgtgtagattgagacattcagcatgtagatactaaaaaataaactgtagtattcctttaaggaagattgtaaagggtgtgtcacaagatgacattcatcaactttgaattattccaactagaagatattttacactctaaagttgtgacaggcaaacatgttacttaaaaatgcacacaaaaaggtacataaaaatccagatattctaatgataaatgaacttaaaaaaccacctatgtttcagcttttgtaacatgagaagataaagaatataatttaaaaacacaca

SEQ ID NO: 648 - DNA, 485 bp, Rattus norvegicus
  Genbank Accession No. AA893667
aaagacagacccacaacgcctttcaaaggtgaaaaagaaaatgccctttccctcctgggtcgagggtgaggggaaggatagaggtcaattcattcttctctcagactcgctctcatccactgggtgtcctcggggaggaccgttttctggaagccagtgcagaagggtgccctgttctctctggtgtcccaagctcagctctgtccagtgtccgaggagcctcctcccaggaacaggggctggctgtccctgtgtgggtcggaagaagtcagtcctgctccatctcgatgagcgctgcgctgccgctccatctcaccgtggcagcagcgtgtaccccctgagggcgggctggtcagctggggcatctggttcagtccaggcaggcccatcagaagccaaacatcatgtcggcaatttggacctgcactctggagctggggtccaataactctgcctcactcatccttgcttgtcatcagattttg

SEQ ID NO: 649 - DNA, 461 bp, Rattus norvegicus
  Genbank Accession No. AA893670
ggtagaaaaatcattgtattgaataatcacaatatttctctatagacagatctctacagttccagtgctctagggaaatgcttccagaataccagttgatttcagaatacaagctttgtccagaccactgtccacttaataaatattgaaacctatactactgagactcagactttattaagattttcacatataatagagcatagtttccattgcatccaaggagcaatcagggatggcagcatgtcattttgtaacaactgtcactgtggcttttcgattctggtttgcagaaaccttatcctcagttaaatctagtcatgcttttaagaaatgctttaggtcactccaagcttggcaattaacatttggcatgaacaagggtaaaaccagcacaatagagaacagacacaacctcacaggccataaacacatacagcaaaggatgaaaaaagagaaag

SEQ ID NO: 650 - DNA, 492 bp, Rattus norvegicus
  Genbank Accession No. AA893690
aataaggtgttctgaggaaccaggaaattaacagagaggggcgaataagtaatgcttcttaagccctgctcagtatttcgtcagtcatcttctggtaactggatcttgctgggatcaaaatagttggattccatgatggggaggccgttgagttctcggtatttcacaagtctctcagcttcccggcgggcccactcttgcatcctagattttgactttattttcaaatgaataattgtccttacctacttgtttgggagtactcgccctgtctgttaagctgcaccagaaagtgctatttataaaggttaaaaaatgtttggatgttggcaatttcctatgggttcacttaatctatagcaccctatacatttaagatcctcaactagaggttaggtacttatatattaggtcttttcaaatacacaaacctcctaatatgcccagtagagaggaaatggcaataataaacaccttataattctgagtatt

SEQ ID NO: 651 - DNA, 447 bp, Rattus norvegicus
  Genbank Accession No. AA893699
caagtaggttaccattttattgagatgatcaaaatcttaataaaacaacaacacactttactaaaaactaaagaacaagacatcttccctaagaatttccaaaaatcagccccgagtacaagcatggacacatttgtgtcaagcacagaagctaactgcagtctctcctaccctaaaatcttgataacaatcccttcttaaaaacagaagcttcctttccatccagcaaacaccctgtcacagctccacttccgaaagcagacactgaaaacacttaacaataaataaggaaagcggtcactggcttgggtgcgaaagggaggggagaaagaacaaggactggaagctcacagctcaactgcacgctgagtgagctccttaattctgtccatgcaatggtcaacggcattaatgagtaaagggatccagctatctcctggctggggg

SEQ ID NO: 652 - DNA, 254 bp, Rattus norvegicus
  Genbank Accession No. AA893749
gggacagcatgtttattcaaagggcacagcccccccctgcacctgagtgaggacaccacccccgggaaaacagtgtcccaagggcaacagcccccccttgggacccaagggggaattgggttgggcttctggggcaaagactgcaggccccttggattcttccccaggcagggcacctccccggtccaggaacttgggaaatgtccccagggccctggggcttttggattccaaaacctttcggtcaggtcctg

SEQ ID NO: 653 - DNA, 422 bp, Rattus norvegicus
  Genbank Accession No. AA893821
  misc_feature (1)..(422): n = a or c or g or t
agtcagcaaaatcaagtccacagcattttctagtctatctgtttcctaatcatttgacctaatatattttctaaaatcttccacattttaagaaaaacatgttttacctttctggcaacccacagtcaacttcccttattttccttcttagccagtagctaatgcactcaccttgaagtattaatgcccctcaaagggtagtggtaaacccaagctcaaagactgcaagatcagagtgtggggtaggagcacaggggcaaaccagcacccactgttctagaatccgaccagcaccaggatgtctctccctgtgtggttctgacctggctaagcacgtttcaagccctgtccgtggtacctaaggaggtccaccttgtttctgatcatggnctaactcacggatgacactanggcaggatcgg

SEQ ID NO: 654 - DNA, 392 bp, Rattus norvegicus
  Genbank Accession No. AA893885
caggaacttggtactttttaaaaattccaaatctttgcacacagatcagcactctgcttactctggaactgcagatgcttggacttcacgattgtcacttctctccttgtatcacacagcatagaaaacccaagtcctgatgctccccaaccccttctgaactactacagctactctgaccagctgctgtctgaatacattctgcagtgtgggggaatagctataccaagttatgccacacacattctggaatgcaccgtacccaggacacaggtgagtttccctttgtgttctgtgtggttcaagccaacactgctgaggttatctagtccctgagggagctcagaagtttggtaaaggtcaaagagagactccttaagcattcagcagtg

SEQ ID NO: 655 - DNA, 355 bp, Rattus norvegicus
  Genbank Accession No. AA893905
caaacaactcaactttatttatctggaaaatggatgagttcattcagtggtgtttaaagcctgagtctgcacgttctccttagaaaggtcagctatgtttggcaggggctctgacggtttgaaatccgcctgattttccaactgggcttcaggccggtcaccccagaggagatgcttggggtcattgaggaaccgctggcttcgctggcatgtcagacaggtctgtactgtccagcgttgtccctttcggcgtctctggcgctgcgtgcaggtgaggccagggatgaggagagaggagcagtcgcgacagagcgtcctcttcacagaggggtcctgccgtaggaccagccgcttc

SEQ ID NO: 656 - DNA, 416 bp, Rattus norvegicus
  Genbank Accession No. AA893939
acaaacaaaaataaatcccagagataatgaaataaacatattctctaaagtatcccatgctggtttctctgtccgagaatgtggtagagtccatgtttaagttcctggaacattcctggatgctatgaagtctccatcttgtaaccatgcttctccagctcagcgcgtaactgattggagaagtcgtcttctacattgtcatcatcccaattatcctcccagacatgtgcatcttcatcttcatctaagccggcccagtcttccgcgggaaactcctcgaactcgtcgtcctcttcaccacattctggataacaacaaaggaaacaacaggtcacatatcttacggaccatttcctcaccatcaaaaacatctggattcccctcagccagttacaggctagatgctcttgctgttt

SEQ ID NO: 657 - DNA, 430 bp, Rattus norvegicus
  Genbank Accession No. AA894004
gggaacagaacgtgtcctttattgagcatccagagggcccctcagttctgactcagcagccagaggggaaacaagcaggcaggtggtgggggcaggagagcagggatggggacacccaccctcacttccagtccttgaagaactgcttgaagatgggactctctcggccctggggcagaatctccacctgagtgtttggggaatatctcattcgagagatgaagccatcagccacttggagggccgcctgccgctccttctcattggcttttctccccttccagatgtagattttgccacatagcccgttgtccagaacaaagcagtcatctggaattagcagttcagaggcaaacgggctggagtcagccaccttggtcagattcatctgtccagtggcatcagagaccttatacagggctgcagcctg

SEQ ID NO: 658 - DNA, 445 bp, Rattus norvegicus
  Genbank Accession No. AA894009
acaggaaacaaaacactgacaaatactgtacagcttggatcatttatatattcttctcaaaaaagtgactgctttttctttacattttcctgttctttttcctcctcccaagaaatcaaaaaagtccacagaacaatggataaagacccctctgatggtttctgagtatgaccaaggcagattagaagtccaccgtgggtgggaacaactgggaattgcccttctggatgtttcgtgacaggaactagctcaagtctatttgatcaggaagcagtaggtacactgggcccggagacggaagcttcactatggcaatcagtaaaaactgacttctgtcttaattcaaactggcagccagttgtcacggaaacagtgttattcgtatggtccctgatcctgtatctgacatcccacctctgctgtgtctccacctcttcccccaagt

SEQ ID NO: 659 - DNA, 407 bp, Rattus norvegicus
  Genbank Accession No. AA894027
caattcaaagcaaggtttaatctgtgcacagaacagccaatctggcggccatctccccgtaaagtttgagttctggaactgaagggggtggggttttgcaagcaggaagaacaaggcagttaaggaaatcttctcagaacatctggtacagaacattctttggttatgggatggggtacagctaaattctgagaagcagacattggaacgtaagttttacagtaaacagagcctcgaaacgactcctggccttcaaatggacttgaactggtttctgactcatctgtcttatgtgttcctgtcacataagcctcttggaagctaacatttctggctattgtaatggctactagtggcaagcattttagcattctttatttgtccgtagacaagccttgtgaagcgct

SEQ ID NO: 660 - DNA, 498 bp, Rattus norvegicus
  Genbank Accession No. AA894029
cagcatcaaagcaagctttaatagttatttctaaaaattgtctccagatcatcttctaccccagactattcatatacaatggctgcaagaattcaaattccataaacatgatactgcaaaagcggaaaaacccaggaaaatcgtttctagacttatattctcattttatatttgttactaaagacagatctcagtatctgttactaaattctaagaactaactgtggagagagttgtgctggcagctggtggctgggagccaggaacttgggaggaaaaagaaggaagttctcaaacaagaagcacatgcgcactgcactcattttccatctcataaccagaataactcagtgtagatctctattttgggaactatgttgatatcaactattgcctgcttatgggatccttttcctcctactgggttgcctcatccagacttgataagagggtttgtgcctgttcttattgcatcttgttatgctgtgttcagctgat

SEQ ID NO: 661 - DNA, 555 bp, Rattus norvegicus
  Genbank Accession No. AA894086
aaatcagaacaaatgaagtagcagcaaaagaaccattcggcaatctggcttcactggtcctcaaacaaggagggaatgcagccagagatacatctctcagcctcagcctctcagaatctcacttgggccctaaagtgcatctgcttggtggcattgttcttcatcccggtcttcagcatccatttcgacttcatcctctgtacatactgcatgtcccgttcacgcatgagagctgctcctaaaatcatagaagtctgcaaactccagcgcagcatcaccatctgtaaagagcttacagtggcttttgtcattcatgtgtgcctgcacagcttctgtggaatagaaggacttccctttctcattgcaccacaagcagattttgccaacaccaactttctctcccaaatatttaattaatcctttcaaatctgaaagatactctatatcaggaataaaaaagctgtggactttagtcatatgagccacattcttcacaagggagcttgaatgatgggaacaacataagcagtctgttattgggatggcacctaaggg

SEQ ID NO: 662 - DNA, 613 bp, Rattus norvegicus
  Genbank Accession No. AA894089
cgggtcaaaactctagtctttgcctggcattctgaaaagctttaatcttaacctcagtgttatataaaccaagaggtctcgaagtagcaaaagcaaagggaccagtgaaaaagcatgctttagaattcagtttattttcaatgaaaccaaactgtactactgttgtgatcacagttttcacatctgatgtggaaaggagagcttaattctgatctcttagtggcagcacttcagacaaaacagaaacgtatgccacagagatgactactgacgttacaatggacaccatgttcaactaaagaaaatggatgcactgcttcaacattcagcttgaaaatgtttagtatcttctgcaaacctaaattcagtttagaaaggttaatattctctttctaaactacggcatatactatatagagcattttaaatatatttatatataattatttgcacatcagatttagaaggaatttgcagatttactgtgatagaatttcgatctcatttccccgtgacggcttacggggcttcctcagcattgtcgtttgcaggcgaggcatcaaggtctggttcagaggaagcagctgcagatgcgtcaatcactgcaggtggg

SEQ ID NO: 663 - DNA, 556 bp, Rattus norvegicus
  Genbank Accession No. AA894090
gctgacaatttattgaagcttatctgatcagagcttgcatgaatggacatacaacatcaaggcttttgtaataaaagacaatttgaaataaatatgtgtttaaaaaaacctatgtcaaacactaatgaataatcgacatttacaaattttaagaaaatcatttaggttaataatttttatttcccccacagttaaatagctctctttaagcaggagggagagagacagacagaaatgaagtcatgcccacagcacagtcatgatgttactcttagtgagggactctttaccaagattaagacctagaggagtatctgaggagaatggttaccgagtcgtctggaacctgggagagcattaggagagcgaaaacaagtggcaaagcagagagaatccttagatggaaagtccgttccccttgagaaaaattaatgaatacccacaaacttccatttttagggtttcaatattttcatatcagtttaacctctacccccaaatccaaccaaacaccataaaaactaagttgtcggataggcttagctggctgtactcc

SEQ ID NO: 664 - DNA, 580 bp, Rattus norvegicus
  Genbank Accession No. AA894099
caagaagggaaagggtttattagacatctccaggacaggaccagcagaggctgggctcagttctcagttctcagtgaaggcagcgataaagacctgcctgtctgccgtctctcctgatagaaacggcattgtgctcacagaagccatcagctcctgcaaggaggacctgaagctccagatgcaagcttaggagggtgggatggcttttcctactttaccacagtcagctcacaagtagccaaagttaagaggaaaggagtgagagcaggggcctggtggctcccactccttaacactttccagatgattttcctctttatttataaacaagacagaaatcaaagcagcattaatttaggggaacaaaagttagacaaaaacagatcagggcagagtgtgagcatccagtagtgaagtgtgcagagccagtgtcacgtgtcctacatggtgaagcatctctgcagctgccgaggcccctccttcatcctactaggtcggcagccaggcagtagagggaatactattgacttcacgacttcaggccctgcctggccactggtgtgggaagtcccatgaattt

SEQ ID NO: 665 - DNA, 622 bp, Rattus norvegicus
  Genbank Accession No. AA894101
gccaaaatgaggctttatttcgggagacagtaaggatggaggaagtaaaagtgcgcaggtgtgaattccaaaccagcaacggtctcttcaggccaaaaggtgaattcttcggtaacccagatctgatgttagttccctggagagatcttttcccataagccatctttattttttctgtagaggagagctttatttccaggaaacagtatattctctggagatgggaatttttttaaaaacatcaaggtagatctaatatggtcaacaaagtgggggggctcagccagaggagaagtagaaaggtttgggcctcctgctaaagctctcgcagcacgcagttgctcctctgggccacgatcttgaaaggaagctctgtaaatctctgcagttttaatgttgactgcgatgccataaatgattggaaagtgattttcattttcttcccggtcatttaattctgttacacataatgtcactaagtgaatgtcatcatcctgtttgtcaaattcactaagaagctgatgcgtaagtttctgtgacaactgcctatcatcactgaatcctcccacaaggtggacttccagccttccgcactcggcatgttcagagaaggattttaggg

SEQ ID NO: 666 - DNA, 494 bp, Rattus norvegicus
  Genbank Accession No. AA894130
aaaaggcccactttattaaacacattctttctttcagaatcctgatttttaaaaaacctttatctactaaaaaacagacatataaatcaagcaaacagttaagactacaggaatggggctcctagtgacgctgaaggaggcgataggtggggaagggcagagggctgtggggagggaggtcaggaagaggctctacgcagcccacaggctgggaaacaaagaccaaactccctaatgatctcaggcacaagcgttgctctgtcatggtgtcccccaggctctctgagaactggggcctctacaagacacaggtattcttcaccagctgctccttgtcatccgcagtgctccaaacagtgcggagagcacgctcctgctttctgcgaaccattcggatcaggaacaccatggaggatcccaggaggaggatcaggaccatgatgaacagccccaccaggatcaccgcttttgtgcccggagtcaggaaaggatac

SEQ ID NO: 667 - DNA, 670 bp, Rattus norvegicus
  Genbank Accession No. AA894174
ctgagaataattttaaaggaaggtgaaactttattatattttttattatagaattagaaaatgtcaaaaataattgtttggaatcacaaaaaattaaaaaggaatataataattgattcatcaaaaggcattctagctgctgttagcatattttctttctttggattatgaacttctatgatttcaactgaatacttttgacagtttccttaagatatgattttgacttattttttcttcagtatttctgtcatttcaggaaccaccttaaataaatctgcaactattccataatctgccacttggaaaattggagcttctgggtctttgttaatagccacaattgtcttgctgtccttcatcccagctaaatgctggatggctccagatattccaacagcaatataaagttctggagctactatttttcctgtctgaccaacttgcatgtcattgggaacaaagccagcatcaacagcagcacgggaagcaccaactgcagcatgcagctgatctgccaagtcatacagcagtttaaagttctctccactcttcaagccccgaccaccagataccaccactttggcaccagttagctctggtcggtcactttttgtcaatttctggtcaagccactctgatattcctgctgatgaaagaacttggtgcc

SEQ ID NO: 668 - DNA, 589 bp, Rattus norvegicus
  Genbank Accession No. AA894188
cacaaataaaaatactttattatagaaaaagcatcccatacacaggattccgtaaacactggtaggtgaacaagtgcaacttccaaagtaaataaaatgtaagaggcaaaatccacacattgcccttaggggagaatgtaattctccagattagaagtccatcagcagacactggagtggctctgcctcctaaaagggcagcagtatcctcctgagctcgttgcactgacctcagaagtcgctgatggccaacactaaaactctccacttgagttgaagcctgtgctcggaacatttatttccctaaggcacattctctgactccgagaagatgccccttcctggatttcctgaagagcactcgggcctgtacacatcagacattacacagcatctcctgaggcgctggttaaatgactgggttacccacttccctcctatcttcctcaaattttgccatcacccccatccgttacattctaacactgtgccccgttcaccaactcctggtgcaggcgttccctatcagctccacagactgcaacagcaagcaggtccgacctcaggctcagccttaacttttatcttg

SEQ ID NO: 669 - DNA, 560 bp, Rattus norvegicus
  Genbank Accession No. AA894200
cacagagagcaagttttatttggtgaaggcaaacatcatccaaaagaaaccagacaggcaaggtgctgtgattagggagcctctggggccacacaggaatctcacactgggcaaggagcaggctcgagacacgtaaatgtcctcagccattcagcaccatccggacaagctctgtaaagagatggggtggagtcagccaagcacagggctggggaggggtacccatgggccaggagaccacaagaccatgaaggtggcatgagggaacgtgcccatagcagccaaccttggggtcagtatccaaaacagccaccatgagtgaccagttctctctgtccctggttcccctcccactagctgttagcccccaccccactctaaatagcaagaacacagcagaggcagaaaggttctcagctacacctacagtcactgtcagccgccggcaggaggagcggcagtttggggtgaggtacctccaagctctccaagctgtccagcaggggtggaaaaaggactgtggtgtttcagcagcagaatggggcagttagctccccagc

SEQ ID NO: 670 - DNA, 630 bp, Rattus norvegicus
  Genbank Accession No. AA894207
  misc_feature (1)..(630): n = a or c or g or t
aatggagtgtgctggatgtctctacagttttgttcagatgactacagaacctggaaaagctgttgctgctgttgatgcataacacactgctattattggtctttttatataaatataaatatatatatacagataaataatttgaattttttgaaactttacctgtgctgtcaactttggaaaaaagtatccccgtttactgtgttgagttggcactgtaaagaaattaacagccatattggtctagaaatgttgaacttgagttttttccatttgtacaggggtaacacactgtattaaatatgtaaggtcttatctacgtgggtttgattacaaaaactaataaagtattctctaaattaaaaaaaaagatgtatgtgtactaagggctgagtcacaccactagaaatagtttttttgtaaaataaataacttaatcgtggggttcacattgagatcaaatatcctacaacaggtcggtttccaataattcctcaagacgtcaagtagcgactagctcctttccagcaatccagctctgctctgatgccatgtacctagagaccacatcacagattcacagaagcagggtgagggttcagcctanaggagtgcccctctacctctgac

SEQ ID NO: 671 - DNA, 511 bp, Rattus norvegicus
  Genbank Accession No. AA894233
  misc_feature (1)..(511): n = a or c or g or t
aacatagccctttattgtgatattcccctcctcttggaaacctgcgttccctgcagatagattcatccagagtattgtaaagaaatcacacaaagcctgtcactggagagtcctggcacgctctgtgaagctctgacatggccagcttcctgcagacagttgatcctgccccaacaaagggtgagcttgctgggtggcacccacgacagcagagccaggggcagagctgccggtgagtggtcagtctctgggagagagagtcaagtctcaactccagtgtggaacagaccttggtcacagtccaaatggggatggactggaaatcccacggaggctgctatctcaaggactcttgccacccataaccagaggccaaggccaaaagcaagcagaaagaagcagggtggtaacctggaaatcactcgaggactcagttgcccctctggtctctggagatcaangcagcaatgctctcccccagccacaggtctctatcctgggattcctaaag

SEQ ID NO: 672 - DNA, 672 bp, Rattus norvegicus
  Genbank Accession No. AA894258
ataatctttattgagcttctgttacagaaggggtgtgacatttgcccttatggtgagttagtctggatgcgtgttctcagcccgaatgagaagtaaaatcttaacagagcacagaatagaaaggaccttggggatcacttagcccagcccattattttcatggaggaaatgaaaccaaagaaaggagaacgatctagcgaaggtctcacagcaagggaggctggtccctgtcaatctccattcctaaccacagtactctgtgctaagctgtttccccaagcctttgggtttgctggcttgctttatgtggtcccactggttaaacaaccaaactatcaggtacctaacatgacggtagggacttttacttcagctttaaaatcagcatatcgaaatgattcctgagcctttagctacttcattattgagaatgcagtccacagtaaatcatggctatctacggtagtcatcttcaaatgtttgcacagacaccaaaagcactaatgacacttgtacgaaagcatccatgcgattccaggacgcttctcatggaatacagcggcaccatggtggtgaccagaagaggcttcagtctctcaaagtgcggtcatgagtttgtcccggtatgtgacactgtacgcccctcctaagttcctctggatctggtcgtgg

SEQ ID NO: 673 - DNA, 573 bp, Rattus norvegicus
  Genbank Accession No. AA894273
ggcgaggtttattacggcgacctattacagagatctccgggccgacacgtatcccgcgcaggagacagaggtgtcgaccccgaaactcaaaagtcagagggttatatagagaaggctagggggttttggcgtggatacatacaattggctcatttaaacatagcagtgagaacaaagcagaaagagtacgtgttagaagtcaggggctttcagcaggggtcaatcagccagtcgcagaggtctttcctccacccatgtgtttctgtcagtgtttgacactcctgctgtggtggctccaggtccggattgggcagcaaggtgaccagattgtccccaaccggtggagaatctagtccatggcagctgaccagtggtcccatcttttgggacactctatcagccactctatcacagtttaagtcctggattgggtgataattgttagtgcccggctggcaagagtgatgtgttccaagcagaacagcgctaagccattcatctcccagcatcagttactggtgcactgagacaggtcttaagctctacatacacagtctatacatatgtatacac

SEQ ID NO: 674 - DNA, 479 bp, Rattus norvegicus
  Genbank Accession No. AA894316
gaatctagggcatctcagggatccccgggaacaatcttgcctcaggcccctcccccgcaactccctgcatctgcatcccccttgcctgaaagcccttctaagctcggaaactgtgagctaaggagacatagcacaaaatcataaatgagttgcggggagaggctggaaacagtgtgcaagaaatacaggccaggggttggggatttagctcagcggtagagcgcttgcctagcaaacacaaggccctgggttcggtccccagctccaaaaaaaagaaaaaaaagaaaaaagaaaaaaagaaaaacaggccaatgctacatgtgaggctttgtggctgggctgtgacccagcgatatgggcagtggaggggatcttttgtctttggggactctctggagcccaacgatccaggctgtggtgcaggggatagtaaagttaaaatgctacccaccttttggccggttcctttcccctcaacc

SEQ ID NO: 675 - DNA, 569 bp, Rattus norvegicus
  Genbank Accession No. AA894318
tttttttttcaagtttccaaacaagaatttattctttattttttttcccttaaaaaatgtaccaggtacaatttttcctgttttttgttttgttttgtttttcaagtttcagcaaatgcttgttcccctcagccaagccccaagagttaagggttgaggctgggtcagagtcttaagtggggagtggagtaactgggaaccatatgactgaatgaggggcacccctcatcccagctgaggtaggtgggtcagagtctggtcaggtaagaggaggttccccagtccttaggcctgactctgtccctggacaccttcctcagtcaggacaccaaagcaaggagacaaaggcaggaggagagggacaactgagtctgagccctaggtaagaggtggttaaacccctgtgttacacatacactcaattctctctcgcgcaacacaccctacacaaacccaagtttgggtgcacacacacagttgtacacacacacactacacacacaccacacacacacatacacacactggctttcgaagatgggttgaagggcagggaagggaaaaggaat

SEQ ID NO: 676 - DNA, 475 bp, Rattus norvegicus
  Genbank Accession No. AA894321
aggtggctactgtccatttacatgacagcggctgctgagctacatgaagggcttcggttcatggaggttgctgtgcgtaacgtgtagcagacgtaccatccagctccaggatcagtgtggagaaaatccagttgccaggctgcagcccaccacaggagtcatatcccatatctttacaacacgatctgtcccacaggtcaccatcagtcccctcgcaatgtccatggacatatgggaaatgttatgttttccttcatgaaacgttgctagagaagtgcggtcctcatctttgatggagtcataacaggaatcacaaactcgaacctggaactcaaagcccatgacagggtagctggacctcttgctgctgcacttcccacagacggcctgcccacacttcctgcagtgatgctgcctcagccccagtgtcttcgtgtcccacatctgctttatattccagaagaagggctgctca

SEQ ID NO: 677 - DNA, 261 bp, Rattus norvegicus
  Genbank Accession No. AA894338
gagcaataaaggggtacatacacttgtctgctcctagaaatcgatacatgcacacgactgcttcgaagggaaggatgctcttcatgaatgtcacgatgtacatgagacgaggggtgcagatcatgggctggtcagtgaggatggccttcatggcatgcttcacacagtaatcgggcttcaaagggggcaaaaagggctcgatttcttttctgattcggcagcctctgaacatgcccgtgtctacaaggtaagcctcgtgcc

SEQ ID NO: 678 - DNA, 473 bp, Rattus norvegicus
  Genbank Accession No. AA899045
ttttttttttttatttaaagtttgatatgtttattcagaaaagtgattcaactgcaggagcatgatcttttcagaggaaatccaaaatctttttgtcagcaatcctgttgattccaacttttatcatcctgatgagattctcttgtctgaagctcttcatgcattcaggtacttggcatgatgcctgatgtggtcagtgatgaaggttgcgatgaagtagtagctatgatcataaccctcctctgttacgtaagagtacattctgtagttagtgttccaaggatcctcagtggcgttcacaaaaaaccccgcaccagtgccgaagtcccagctgtcatcttctcctttaatattgcagccacgggggctggtatcaggagcaatgaccacaaggccatgttctgaggcagcttgttgacagccagactttgatatgaaattttgttctgtgcaagttaaaccagacagccagt

SEQ ID NO: 679 - DNA, 476 bp, Rattus norvegicus
  Genbank Accession No. AA899057
tttttttttttttttttatacacacaaaataaatttatttgtaaagagagacattccaagtcttcctcaactatatagcaagtaaaaagaaagcaagaaatgaaaaaagcaagctgggtatggcgggaaagcctttaatcccagcatttgggagctcaggaggcagaggcaggagggtctcgtcagagttgaggccagcctgatctacatagcaagttccagggaagctagggctacatagtgagatcctgtctcaaaataaaagcaagctaccaacaggcagagtggcagaacagtgtcattgatgggaaagccatagtgacaggcactgcagcttgtaagggaggagatggcttcaccaaaggactgtcatgatcatccccgtcagctcaagacctggtgctggggcgcagccctttaccagtgcccaccccccactgtgttggtgtgaacaacaagcctgtgactcccactga

SEQ ID NO: 680 - DNA, 430 bp, Rattus norvegicus
  Genbank Accession No. AA899109
tttttttttttttttttcagtcgactgttttattgtttgtttgtctcccacttgcagtgctggggagagaacccagggctttacatatggtaggcaagtactctatcacccacctctagttccaactcgccaatgcactcctcctccttcactctctgtccagtgttctcagtgagtatttggcagtgactcatggtgggtttacattagatcttgttcatgaggcctcatagtttttatcagcaccttggatttccttgggttagtgtggcaatttccatatatcttgcaaaccaagagatatgtgtacactacttagaaattaaggaattggaagaaagaataaacagattcttttatacataagtaatagaataaaaaattgactatcctgagttttttctctctgtgcagtaaagtggtagccatg

SEQ ID NO: 681 - DNA, 128 bp, Rattus norvegicus
  Genbank Accession No. AA899120
ttttttttttattttttccctgttgataccatttattgttctctgctctgtacaagccgcgtctgtcccctccccaacccgcccccatccaggggcacccagacccccacctgtgccctcccaactcg

SEQ ID NO: 682 - DNA, 504 bp, Rattus norvegicus
  Genbank Accession No. AA899121
cggacgcggagccgccacccagaccctgtcgcgcgggaggcgggatccgcacgaaataagtcataatgagttacgcagaaaagcccgatgaaataaccaaagatgaatggatggaaaagctcaacaacttacatgttcagcgcgcagacatgaaccgactcatcatgaactacttagtcacagagggctttaaggaagcagcagagaaatttcggatggagtcagggatcgaaccaagtgtggacctagaaacactcgatgagcgaatcaagattcgggagatgattctgaagggtcagatccaggaggctattgccttgatcaacagcctccacccagagctcctagacacaaaccggtatctttacttccacctgcagcaacagcacctgatcgagcttatccgtcagcgagagacagaagcagctttggagtttgcccagacgcaactggcagagcaaggtgaggaaagcagagaatgcctcacagaaatggagcgcacat

SEQ ID NO: 683 - DNA, 490 bp, Rattus norvegicus
  Genbank Accession No. AA899152
tttttttttttttttttcagtgggaataaataccagctttattaacactcaaagtaccattcctttatgtccatcccacagttcagaagattactgagtaagcctctgcaccacaatctgtcgaaagatgaataggaatgaagtatgtttcactgcactgaatatcgcaggccttcatgcatgacaaatctaaataaagatgtgtcaataatacacaaattgccatataacaaagtcgtcattactaacaaaatataaacatggtttcttttatattaaaaaatttaaaagctatttaccagcaagaaaaaatacatagaaattataaaactcaagacattttacacatctttacaagcacaattttgaaagaacaacagaccaaatgtgtggaatgtggtacacactacactgtgtctggcttctgggtaggtgctactcacatgggttccttttaacacaatacactagtgatagtcagcttgaactg

SEQ ID NO: 684 - DNA, 472 bp, Rattus norvegicus
  Genbank Accession No. AA899256
tttttttttttttttttcaaaaacttcatcatcatctttgtctttctcaaattctttctgacaccgatttaacaacagttttcgaaaattcacagtcactgttggcttttctgtagtgggcactttcagcgccatgaggcagcggcacatgttggcataagccacagagaagttgggctctgaaatggctttctcgaagatgaggtcaatgactcctttgaggcgttcctccgtgtcaatggccagctgtgtcacctgcttcatcagctgctgaaacatctggggtgtcagcttattcaagatggagcgtacccttcggaacaggtcctgggtcttgcttccgtcagcatcctcctcccctcgatccttatcagcggctgtccgtttgctactgggtttccacgccttctctgctttgttcagttttatgtcttcagtcattatcactgaagaaatgatcttgcgagtttcc

SEQ ID NO: 685 - DNA, 461 bp, Rattus norvegicus
  Genbank Accession No. AA899304
tttttttttttttttttaaattttcatttctattcacataactttatttgaaaccaattttgactgtccaaggattaaagttcaaaaccaaacagaacataaacatccagtgtgcgctctggtggcagacagaagtccgtggatgttaggttatttgggggcttgagagagtcaggctttgttgctgctgttgtgatgatctttggtgtatttacacataaaatgctggaacttttactctgccgtcatcaggagagaacctgtttcaaactctctccgaggatggcttcctttacttgcaagtggaggaggaagaaagcatggtatttcacttctccgatttctgttcgtagtacagtgtgcaagtcctccctgctgtacgtcaccctctatgggtcctggaatcaaatgctcttttttttttatttgttttttttttcccccagagtttctactactct

SEQ ID NO: 686 - DNA, 387 bp, Rattus norvegicus
  Genbank Accession No. AA899455
tttttttttttttttttaagtgtctacgtttttatttaggaacagttaaaagattggaagtaccacttgaggcccatttaaactacacaagcagttttgtccctcatcccatccatccaaatttgcagatacaaaaatctacgaaatgtgcaatttgcatcttggaaatagcagcatccccatgggggaccttaggaggcccggatactcagcctgaagaggtcatcctcgcacctctcacaacacacacagcccacaccaaaagcaaaggccatctttctgttcaaatgtttgccagggtgaatgattcttacactccagcaggtgtggcccatgcctgtaactcagtgcttgggaggtagaggcagggagagcacccaagtctga

SEQ ID NO: 687 - DNA, 504 bp, Rattus norvegicus
  Genbank Accession No. AA899491
tttttttttttttttttacgggagcacaacagtttattatttcttgcctgaaaatggtgcaaggtcagaacactcagagcgagcggcccttgtgccttcagagaggacagacccttcaaccagggctttccctgagatatggcctctgctttccaagactctgagggcggctcatacatgcagccaccccagagggagagcactggggcctggacagctgctgttcttctgtctgtctagctatggtccaccggcctgaggcatggccagcacacttctggcctgccctccacttcagtcaagtgtcaaagcaaaagcatctgcaaaggtaacagaccgtccttagagtctggtggttgggagaagccaccactgggcttgacaaggtggagtctgggccatctgtgggaaagttaggacactaagggtaacaagcacgattctggagtggacagcacgtgtgatctggagtttagttacttcagcctcaagtctctcccacag

SEQ ID NO: 688 - DNA, 343 bp, Rattus norvegicus
  Genbank Accession No. AA899498
tttttttttttttttttcgcgtgttccagtacctttactttcaggtttaaacgtcgggtcactggctgggtttcttagcttctcacacccaagccctaagcatgatgttaccctagatcttaaaggccaaggagagcccgtcatccaggggcaggaggctaatgtagaccctggcgtcccgcaggatgcgctcgtttaggttccgcacacattcaacagccttgttctgcgtccaccaccgctatgtcgaaggttccggcctcgcccgccgccaggagctcatccaaagtctgcagggcgggctgcagccgaaggtcgatcttctgctccacttctgcctgct

SEQ ID NO: 689 - DNA, 498 bp, Rattus norvegicus
  Genbank Accession No. AA899535
  misc_feature (1)..(498): n = a or c or g or t
tttttttttttttttttgccttttcaagtttttatttttatacatttttttgtattaaaaagaaaagcataataattaccaccaattacaaaggactagagcaggaccagaataatgaatgaatcacttcagcctgggaagcagacactctcaataatattaatgttataatacaagctcattcaagtattttacatttttttgtcctgttgaatgtgatatcctagaacatggtaaagacaatgtacgagcgtaaggtggaaccttctctgcaaagcccatgagagttttcctttcctgtgagaactgggctcaaagttttcttctgcctctgccatcaccatggctggaggagagggtgggagctggggagaacctangggccctttaactagagagactctggggtcctatccaggggaacaaccaagcctctagcactccccactatcagccttgtcttcatgccctttccctcacgtccagaccttccaagca

SEQ ID NO: 690 - DNA, 333 bp, Rattus norvegicus
  Genbank Accession No. AA899635
ttttttttttttttttcctgatcagctgatgaagagactagcagctcgctgctttgccggcttgttaattttatccccactaactgtgatttccgatagccggtctgctgatagtggtaaggccatcgaagacggaaatttggaagaaatggaagaggaggtacggctgaagaagaggaaaagacgaagaaacgtggataaagatcccgtgaaggaagatgtggaaaaagcaaagaaaagaagaggccgccccccagctgagaagttgtcaccaaatccccccaaactgacgaagcagatgaacgccatcattgatactgtgataaactacaa

SEQ ID NO: 691 - DNA, 445 bp, Rattus norvegicus
  Genbank Accession No. AA899681
tttttttttttttttttgtggtctaaagtaaactctttttaattgaacatttctgtctcctgttattctgcggggtgagaactgtccttccttacgcacaaggaccgtctcttcgccatcaaactgtcggtgaggggttaggctacgagcaagcccacagcctcttcagggtagggagctcagaccgtgattgtatttgcactgtttgagggcctcactgaagccctcacacagggttaggtcgctctgagtggtggagcagtccaggaactgcttgatctcataggcgcagggccccatctgctggaccgcaggctgggcaggctctgagcttcccccactgaaggcactggtcaaggcgctacccatgacatgccctacagctgagcccacagctacgcccgcggcggtggatgccatctgagccataagacccggctgtccc

SEQ ID NO: 692 - DNA, 470 bp, Rattus norvegicus
  Genbank Accession No. AA899721
tttttttttttttttgtctataatgatccaatttttattttttgtcttaataagaatgtttatacttaaggttcccctttaattcatgatacaaaagaactctatttttggataggcactatttttaaattacatgttatttgtgtgtgcatgtgcaggtgtgtgcgtgtgttggaggacaacttgtcagagttggttctctcctaccatgtagatcctgggggaaagacaatctcaagctgtcaggctgggcagaaagcaccactatcactgagccatctcaccaggtcaataggcacagttttataaggaagttttaatttctttgttgtcttatagcactggagaatgaattcagggcactatagaagaaagtcaaatgcattgccactaagctatatcctcagtctctcacaggcacttaattcattatattaagaaaaaaaagggggggttggggatttagctca

SEQ ID NO: 693 - DNA, 299 bp, Rattus norvegicus
  Genbank Accession No. AA899723
tttttttttttttttttaaataactttaaatactttatttttaaactgctacaaatgctttatacagtattccaacatgaagtctccttaacagaaatttaacacaatgggaatgatagtgaaaggttaaagtggcacaaattcatcaaacaagtattaaactacaaattttaagaggtagattacttttaaggttgagtacaaaacacagtatgaataaaatatagccattttccaccacctcagtcattaatctaggggaagcatcagcactcatggagaagtggtgctgacccggt

SEQ ID NO: 694 - DNA, 454 bp, Rattus norvegicus
  Genbank Accession No. AA899762
  misc_feature (1)..(454): n = a or c or g or t
tttttttttttttttttcatttttagaaaagcttttatttcaaattccattttgcatattgatttttttttttttggaagaagacaagtgcattttccttgagcaaaagaattgagttatgatttagggacaggatcttcattcagcactcttaagcaaagtcaaggttagggatgtgatcttgcaggtgaataaatgcttgcttctcccagaaaccgcagcagatacaggtgtaagaggtgtggcgcatgccacctttagagtaacaatagtgctggaacaggctttccatctcgtattccttcatccccacttttacagccttcatcacctcacggtgggcctcactggagatccgatttgtgtancgcaaaacctccagctccatgtctgtcttgaacactcggcattccacgatctctgggtgaagaatcgtgttgttgacagtgaactt

SEQ ID NO: 695 - DNA, 344 bp, Rattus norvegicus
  Genbank Accession No. AA899797
tttttttttttttttttagaatggaaaaagagataaattcatctttatttgaagataacatgatctaaagaatctgtttttaagaagctgagaaggtaatgaatagatctgactactgcagggcataagccatactcaaaaaattaactggggttggggatttagctcagtggtagagcgcttgcctagcaaacgcaaggctctgggttcggtccccagctccgaaaaagaaaaaaaaaaaggaaaaggaaaaaaattaactatattcttatatgttagcacttgaaaactcaacatagccaggcactgtggctcacgtctagaataatagcactaagaaagct

SEQ ID NO: 696 - DNA, 380 bp, Rattus norvegicus
  Genbank Accession No. AA899814
tttttttttttttttttgttttcaatagtaaagtttacatggctatcaagtcacaaagacagttgtatagcagtttacattacagttgatgtctgcacacctcaaaacgcattttaaataaacaaaactggtttggaaaaacattacaaaatgcagtggcaagcatgtttggtcaactggtcaatccttctaccatccaacagctgactccagcggaggtcttctgttaggattcttccatcctgttcaatgggccctggaggaaatctaaatcctccagtactgatagtttgagatgtgtactatccaaaactgtcacaaagaaaagttagctacagcaacctactttcgactgtggaaaaattcatccacgtactgta

SEQ ID NO: 697 - DNA, 497 bp, Rattus norvegicus
  Genbank Accession No. AA899828
tttttttttttttttttcagaaccttttaactgtcagctttatttaaaaaatacaaatattttcacatgttggatttttaaagcatcataaaacaaagaaatgtatgtcaaataattcaaaaacaccaattctgtccactaagttagtatttacgattaatcaaaaaattttcatattatcaacacttaagaaaaaagttatttctaacatattgctacaattaaaataaaacaatcagttttcttttcttttctttttcttttggtttttagagaggattttcctggctgttgtggaactcattttgtagagcaggctggcctcaaactcagacatctatggagtgctggggttaaaggcttgtgctactactactgcccagcaaaacaatcagttttcaacagcaatcagttttcaaacttaccacttgcttaaaacaaacatcaaaacgatggtgaattgatgcaaacatttcacatctgagaaaaatgcactt

SEQ ID NO: 698 - DNA, 426 bp, Rattus norvegicus
  Genbank Accession No. AA899847
  misc_feature (1)..(426): n = a or c or g or t
tttttttttttttttttcaatcaacatccatttattgatcaccttgtgtgtgctcagcactgttacagtcttgagtatacatatagacaggtctaagatatggcaattgccctccaagtacttacagtgaacttttgagatcacacagatagacaggtagacggatagacacacacacacacacacacacatacaaacacacacacacatacaaatgtgcatacaagaactataaactgttaatcaaaattatgaatgataaggattaagcaatttatatattgggaaatggaggangggaagggcaggaaggagtgattagagaaggctcaatgaaggggatgacggtgagcaagttctccaagcatggggatgaaatggcttccaggtcagcataacagcttgaacccaagtaatatggtggaa

SEQ ID NO: 699 - DNA, 528 bp, Rattus norvegicus
  Genbank Accession No. AA899854
tttttttttttttttttgactttcgatgtttagaacatttattaaagtacaaaatagttggaattaagctgaatagacagacatattaaatatttacaaaagacactgataatagcacttaagtaacatatacaacagcacagaaggtctcggcattcacaagtcggaattacggagattggcacggatcacacttcctggctgagtgtggagatgtcaacagtcctgcctccccccagggatctcgagttcggaaggcacccccaaacaagagtcaagacttcacgtaactggcctaactttcttcatcctgctgcttgtgctgagtcatgaagacatggtcaaggtgacttcctccagcctctgatgatgttcaaaaggtacgagcaatttctcatggccaaacaaaagtccatcacatcagaggctgggcactgtatctgtactagaactaaccagctctttatgactgaattctacctataaaattgaaaacaagggctgtcttacctcatatttagtgggata

SEQ ID NO: 700 - DNA, 493 bp, Rattus norvegicus
  Genbank Accession No. AA899898
tttttttttttttttttaaacaaattaggtttattgaacttggagatggaccactttataagggccaaaccaaacgaaaatagaaacagattagactctaacacatgagaacaaaattaaatgtaatgaggattcttgttggctttaaggctgatgaaacgggctattaaatgaacagacttctccaggatggttttcctagcctaaatgggaaaagacctagataacttgaaaacagctgtcccacccagcactgttagaacactgcttcatacgtgagaatcaagcagcagttcataaatttagtgttagactgcctcaaggcgtggttggttgtcatacctaatgagaagtccaaatgcacaataaagatcagcagtgagccaggccccttccagaatgtggggtccctgaacagaggcacccacactaacacaggcaacgggtgacagcgacacccacactaacacaggcaatggggttgttctctctt

SEQ ID NO: 701 - DNA, 432 bp, Rattus norvegicus
  Genbank Accession No. AA899899
tttttttttttttttttgagcaatatcattgaagcatatattttattattattattatcatcatcatcatcatcatcattattattttccacattttaaatattacatttccttctttcgcatagacgatttgatgcagtagaaatcgcccaaaggagccaggcacattcataataaagacagagtggagcactgtcgctcgctggcagcttccaacaggacagttcacctaaaataaagctggatttaatccattacaaacgttgcctagtgtctacacgttggccatgatcattgacacctccatgatgtgcagagagggaagagagcctctgcatgctgaaagcaattatttcttgaaaagacgtttggccacctttgacagtgttggtatctgggtgccttctcagggccaatacaagtcaagcagat

SEQ ID NO: 702 - DNA, 351 bp, Rattus norvegicus
  Genbank Accession No. AA899964
tttttttttttttttttggctctccaaaagcacgtggtttattatggtgagctgtagtgcacatcggtttctttagtaattctaagctgatacaggttccccactaggagtacacatggggagtgactgggcgcgcggtgacagtgacaaaccagtgagccactgtgatccatagaaagttacattagcaatcaggagagaaagggaagtgtgaggtggcccataggcaagatgtgagcagagcacctggacccttccttccctacatgcagtgcttgggccctgctgacgggcacagtgaccttatgacctatagtaagtggccagcctctgactgctatgcatggtcag

SEQ ID NO: 703 - DNA, 587 bp, Rattus norvegicus
  Genbank Accession No. AA900148
  misc_feature (1)..(587): n = a or c or g or t
tttttttttttttttttgtaaaacaccaagtctatatttacatccacatataataacataactttaagctgaaatatatcataaataaagcttgtctactgacaacttaagtatcaacaattaaaataaatcaaactggaatgaaataaatacgttaacaaaaatgcaacgagtgtacctcctcacgcgtactgttgcctcccagggaaagacacacagccagtagtatcccagagttaatactgatgaccagacacacggaagcacaaagggctgtttaaagaaaaaacctggaattcccattaacgcattcagaaaatgtacctagaggaatctgaaagccccgacatttcagcatttcacacagacttgttttctaatagatttggtgattatttctttaaatacaggttttaacttttggccccgactgtataacccctccagattcacatgtacggtctctgaaagcgagcctcctcttacactcactgcattcagacaaagatggagtcatcaccctgcaaatgtgttaatcttcaaaaaataggctatgaaagtgcagacctaaaanaacagtctagatt

SEQ ID NO: 704 - DNA, 531 bp, Rattus norvegicus
  Genbank Accession No. AA900187
tttttttttttttttttagcattgacttttttattcattcatgttaaagtcacccgaaatgatctgttgcatttaaatgctcattaatgtaaatggctgaacaaatccatctcaatggataccaacatcccacagttaagtcacttcaacacagcctcatgacaactcccacaccaaaacagtactttattttgtaaattttgacccattatcactcccaagttatatatatatatatatctttttcagctgttaagtgtacaagatgaagaaaattttagttagaaggggatgcacctggaaaataaatttcttaaactccatatacacgtttcaaaactgctgagtcccaagtccatttatgaactctagggctgccagaatcatgtgcagcgtattaaagctacactatttgaatagcttattaattctgcataaatcaggtcaagcaatgtgtcaacctgttaacagactgtgcactttaactgaacatggcaatatattcactcttttgaactttacatcatcatt

SEQ ID NO: 705 - DNA, 400 bp, Rattus norvegicus
  Genbank Accession No. AA900198
tttttttttttttttttccgacaaggcatttattagctcctgagtgtttcggggccagggttaggctggggccgaaagcaagctctgaggagtcctgagtgtgcaccatggtgctcctggggtccccttctccacgaggccctagagataggagtctggtgtgtggttccacttgtcctctatcctgaaagcaggggcggtgcccttccaactccagtgtgccccagaagaaccagtccaaccggtccctagccattgttgctgactggcattggtgtggttggcagtgggggggtgggacttggcgtttctatgtgtccagtgtctatgttgtggggtcacacgtaaactgcccgccgagagatgagggagccatccagatgggactccatgtcgtcct

SEQ ID NO: 706 - DNA, 493 bp, Rattus norvegicus
  Genbank Accession No. AA900290
tttttttttttttttttgtttgtaagttcgtttattaatattaggtaatattcagaactcagacattaagctatttaccatcttaccacactggtcagttattttgtttggaagaggcttcaacaattggaagagaactccaggttatctttttgactcttacatttttttttagaaaatttgaacccaatcatctggctgtcttcgggatttttttcgagagagggtcttgatatacagcccaagctggcctccaagacagacttccttgtctcagctgagtgttgggatcacacctggcatcttgataggatgtctcactaatattcttagcagctgttctcaagctacttgtaaaaagcacattgcagaagaagtgatggagtaatcttcacatctaccaatgtcatcacaacagaaaaggcacaaatacccgacagtgactacagtggaaactagaaccgaacgctacagaatctctgaaacacaatga

SEQ ID NO: 707 - DNA, 495 bp, Rattus norvegicus
  Genbank Accession No. AA900326
  misc_feature (1)..(495): n = a or c or g or t
tttttttttttttttttaacttgtaaaaatcaggtttgtttttatttaatacatcctagtcaaagagtaacagcagtaaataaacactttgaaaaacaggcaggtacccccctatatctggaagaagagtaagtcatagtattctacatggtagaagggaggcagctgttgatgtccatggtcagacaattcaaggacaacttggaaagttctaaagccatgtccaaaatgtcatggcaataggttaggactcacagctacgccgaggggtaaaatgtctctgtctgcattggttttcgttttgtttttgtttttgttttcgaggattgagttgcacctgtgtagcgtgacattcttgtctttagccttaaaggaaaagagagaagtctttcctgtttgcaccagtttggaatgtttctaaagtaaggctgccttgaaatagatgactacagtactcattcacggnggagttcatacatgtagtaaaaaagacaa

SEQ ID NO: 708 - DNA, 362 bp, Rattus norvegicus
  Genbank Accession No. AA900422
tttttttttttttttttgtttatatgacatactttatttccaatctacaaccattaaaaacactttgtaagtttacactgtacagttctcatatctgaaataagacacagggcaaagacagctggtggactagatgccgtcctaccacccaatatgtcctgggaaggagcctttaaagatagaaaggcggaggggggcagtggaagggagaggaggaggacagaacagaggaagggagaggtggatagttgggccaaggatgcccttggtcccttccctcctgaggggtccggcagggcccacgactgcaggaccctcaccaggaaaccaggctgagcaggaaggggcttcacagtattggc

SEQ ID NO: 709 - DNA, 465 bp, Rattus norvegicus
  Genbank Accession No. AA900452
tttttttttttttttttctgaagactgggtcagcctttttatttttttaagacacaaagctttgtgtgtctcaggctggtctccaactagtctttataatggtcttcaacttctgatcctcttgattctatctcctcagtgctggggactgaattcctcatgaatacatgctaggcaagcattcagccatctcaagtgaaccaggcagtcagaagttacctcgggttctattcaacaagtgtgtgtcagttgctgggaccacagtgactgacatttacatacagttgtgaagcagggaagtccttgggctataagtaactgcagtattacgattgtagctgctgcgtggcaaagagaggggacatggagcaactagaacttataatcaaacttaaaagtcagaaagggagatgatgcctcaaactttctgagtatatcatcagtataagttgtttgagaaatgtg

SEQ ID NO: 710 - DNA, 525 bp, Rattus norvegicus
  Genbank Accession No. AA900460
tttttttttttttttttcaagtaaccttaatttttatttaaataacctccagtgagagcacagttaagactaaccatttttctcaccccccaatacacctcacaaggaggtatgcggactgcctctcaatggaagcggccctggcctctgccccggccagctgctggagctggagcatccacagtggagcgggggttcttgatagtctcatccacagacacaatcaggcacgcagcctcacggtcacagctatctctttgattttattaacagccaactgggtggctgtgcggaaggctctgatgatgatctgagggtgtaaaccttcctccacgtagggcttcacctgcttcagaaactccgcagccagcagggtcactgaggtggtgccatcaccaacctcagcgtcttgggatttggcaatatccactaaagtctttgctgcaggatggacaacatcaaggagtttcagaattgttggcccatcattagaaattggtgctttgcctcggccatccacaataa

SEQ ID NO: 711 - DNA, 472 bp, Rattus norvegicus
  Genbank Accession No. AA900461
tttttttttttttttttccaaaagagaaaatccttttaatccttaacaggtccctgtggaaacaggatgcggataacagtgagaagggagcacctaggacacccccagaggctcgccaacaagtcagcatcacggcccctctcctgtgcacgggcgggcggacagacggacggacggccgatgacataagtccatgtgactacagttcagcagcgcttcaccattgctgccagctgaagtcatcattgctcccgaagaccaggaagaagcctataatagtcccgaagatgactgtgtttccggtgagaacaagtgcgcatgctccccattcaatcagatgtgccctggcaaacactacagggagcccaaaggccgagacgacgacacctgtggtgaggaatatggcgagctccttacaaacgttgctcatggcgtctgtgtcgtccaccaatcttctggctatgcattacgg

SEQ ID NO: 712 - DNA, 274 bp, Rattus norvegicus
  Genbank Accession No. AA900548
tttttttttttttttttaagacaacattgaacattgcagacctcacatttattcccttcatataagaatcctgaggaagactgacaagaatatgggctagggattctccagaagtctcaggctcatcatctggggtgagttactgtgacctcccttaaaatcctggttcttcacaacaagtcgggcaatggttttcgaaaccggaccgctaagcttctcatggatcatcaaggtgttccattaaacatgcactgtaaaaatgacgttttctcgg

SEQ ID NO: 713 - DNA, 431 bp, Rattus norvegicus
  Genbank Accession No. AA900593
tttttttttttttttttggttgtttctggttttgctttttgtggagggttggggaagtatagtactcagttatgccctaaaaataacatgtataaaaccctgaagtgtgacgtgggtatgtgtgagtgtgtatttgtaaatgtctggcaattcaacctttgtcttctggaagttagtgattttcccccgttctctggaagtatttgttacaagatttgtaaacaaaagctctacatagtcggtgtaccatgaacatattgcagcaaaccttagatgcttcattcctgcaaggcttaagacgtcaccaggttgctcagccgccacgatcagtttgccttgattcatcttttagatttaattcgccagttctaaagactcctagtcttcctcggttttagtctttaatctttcgtgttctgagcagaaagtga

SEQ ID NO: 714 - DNA, 398 bp, Rattus norvegicus
  Genbank Accession No. AA900613
  misc_feature (1)..(398): n = a or c or g or t
tttttttttttttttttcggtccttcaatatggcttttattttgtaacccaccaactgcagacccgcggccaccccaaggggccaatccatccccatgacccatcgggacagagggaggtggcacatgccctgtgtacttcttcagtggcaggtggcactggcctcagacccgtaaccagctgccaggttaagagtagtgaggggaacgagagtgcccagggccagggcaggaggctgacccccctcgtcctatgacacgagtgccaccagggtggcagccaccactgctgaaccgaggggaactgcanagacaggcttctgggacccagccactggggaggccaacagcagtgtgcggcccttcagtgcatgtggcccgggtcatcattccatccca

SEQ ID NO: 715 - DNA, 441 bp, Rattus norvegicus
  Genbank Accession No. AA900688
  misc_feature (1)..(441): n = a or c or g or t
tttttttttttttttttcacagttggtaaagagtttattaagcggctgggaagctcttcccactctaacaacagaaaaacactctccacccctcaccctccccagtgttggccactccgactcatggtggagcctcacactgtaaacacctgcctttcagagttcagtacagggacatgtcttcctctggaaataaaactttcagtctcaactcaaaagggaacaaaggcatatatctcggcttctgcaacatttggtacaagtttgcaacaaaaccgtacatagcagcatgctgctaaccggagaggagatggggctagcctgggcaagccttgcaggaatgctttagcatctgttatcactgcagttttcacatatggcaggtggggctgcaccacaacgcaggagtctcattgctccagggtcanacactggactctc

SEQ ID NO: 716 - DNA, 534 bp, Rattus norvegicus
  Genbank Accession No. AA900863
tttttttttttttttttgcctcaaaaagtgacatttattcaaagagagagagagagagaaaaaaaaaacaaaacaaaaaaacaaaaacaagatgtccatcccttggctcccttccctcccccctccagctgttcctcagccctgcccccaggactgaaccctgggctagggccaggtagcaggacagcccctcaaatgaggtcagcaacgttgaggggcatctcttcaatggaggtgttgtagaaagtctcaatgtctcgaagagtcctcttgtcttcttctgtcaccatgttaatagccacacctttccggccaaaccgaccacctcgaccaattctgtggatgtagttttccctgttggtgggaaggtcataattgatgactagggagacctgctgcacatcaatgcctctggccaacaggtcagtggtaattaatactctgctatagccagaccggaactccctcatgatcacgtctcgttccttttggtccatatctccatgcatggcagaaactgttaaatcccgggca

SEQ ID NO: 717 - DNA, 460 bp, Rattus norvegicus
  Genbank Accession No. AA900976
  misc_feature (1)..(460): n = a or c or g or t
tttttttttttttttttggaagaaaacagacatcaaaacatttattcagttccaggacactgtcaccagtgtggagggaatggctgctcagctcagagccgctctgctcacacaaagttctgagcgatggccagcaccttggaatactctccttccctccggcggaggctggtggggataggtatcttaattcgagtccccacagggttgccattgtcctcgatgaggaccacgttgttggagtcaaactttggagtcattcgggagccaggcatgcggtggcccacgatgagtgctttcttcttctgccccctgatggccagcaggatctggtcacccaccttgcccaccccgctcttgttatagacgtggatgcatcggggtggtcggtggtanggggtgttgcccagggcactgttgtccactactcggacccgagtcatcttctggattgcgctga

SEQ ID NO: 718 - DNA, 481 bp, Rattus norvegicus
  Genbank Accession No. AA900981
tttttttttttttttttaccacacgtcataactttaatactgtgtaatattttcttttaaaatacagtctcttctgaggtagacagaccacaactgcagagcatcatcagacaggagataaatatgcccatgtacaacatacagcaaaatgaggtagaaatgggttacaactgagagaggatcccaacccaatgttagcagagggagtggagggccagcgtgccctcccccgcgctccatccctggattctttggtatgccccccaacattgctagggctagacccgccctgccatcctgccccatgctcatgaggtaggtgctgcagctgggggctgtcttcttgtgcaaagcttccaagcctgggaacagaaagaacccagcaaaggaagtgtggggaccctagcgattggcccatgaagggacagcatggggaggggtcagtgacaaaaccctgaggagaaaaggaagccaatactga

SEQ ID NO: 719 - DNA, 492 bp, Rattus norvegicus
  Genbank Accession No. AA901041
tttttttttttttttttccaatttactaatggtcatttattaaaaggattctatgcaagctctccaagggatattagcatatgcatcagtaggtaccagtaacccatgtctgtctccagtgaatggataaacacagaggggtgttacacatacatcagaatattactaagtcttaaaaaggaaatcctgtcatcttacaacatagacgcatattgacattacattaagtgagacaagccagccactaagagatcaatcttgctgattgcatctacagcaaatctccagaggagtcagattcacagaggcagaaggcaagatgctgaggaccacagtctagggacaggagaaatagggaattattcagtggacagagcatttgttttgaaagatgcaaaatgtttgcagattggcttcatgacagtgtgagagtatgcctatgcctaacagaactataattctacacttaaaacgtatgacaagattgtgttt

SEQ ID NO: 720 - DNA, 541 bp, Rattus norvegicus
  Genbank Accession No. AA901042
cggccgctagagttttttttcagtagaaaccattgaagtttattggcggtcacaatgcttacactgtatgcagcaaacagccttacaagtctatccgcaacctgatcacgcaagaaaagattcaccacacagtcgccagaggagaaggaaaattaataagcttgtttgtgaggattgaggaaaataaaaatgaaacctaattgataaagtcccgtgggtaagagctgaactagagatgtgtacagctagcagcagctgtgggaaagtacaaggcaaagagctttctccatccaatgttcctctgtaggctcacttttcatttttaatattcacaacatttattatggtttttagtttatgaaaatgtacatttttcaagggagaatgttaaatacttcatgctaggtagaccttgttattaagaacccctcgcctgtagtaacttcctccagttcatacattcatgagtgcagggtacatacataaatatccacacacacatccacacacactgcctcaaaggctggggaagacaaaagtt

SEQ ID NO: 721 - DNA, 406 bp, Rattus norvegicus
  Genbank Accession No. AA901069
cggccgcattggtggtggcgggggtgaagaggaagatagtcagcaggaatctgaaactccagatccaagtggaggtttccgaggaacaatggaagcagaccgtggaatggaaggtttaatcagccccacagaggctgtgggaaacagttgtggggctagcagctcctgtcctggctggcttcggaaggtaattcccttggaacagatacttcagctaagcctgtagcaggagccagtaaggactgccaaggtctcactttcttgtgccctactaatttagacaggagtcaaggcttcaccgtcccacctgcgaagaagatgtctatattttattttaaaactaggtctcagtttgtatccctggctggcttagaactcacagactcccacttcagacctcgtgccg

SEQ ID NO: 722 - DNA, 330 bp, Rattus norvegicus
  Genbank Accession No. AA901107
tttttttttttttttttcaataacaatatcgtttatttaatacccttgaaagtctcccatatctattcagtggtcacattcacaaacatggcttctgcaggttcagtagagtgccagcaaacaaaggacagcgtgaagatgtagctgtggtcatccgtgcacggactgggctcttgtccatttagctggctgtcatgtcaaggtttcttaaatgccaacctcagtgggttataaattatcggccccccgaggatttcagcaagtccagatcatccgtcttcgaatccatctcttggtactgaacttgatgtatcaagacccctcgtgccg

SEQ ID NO: 723 - DNA, 517 bp, Rattus norvegicus
  Genbank Accession No. AA901237
tttttttttttttttttaaagaaaggtattgcatctttattgcacaggtacagcagttttaaaataacaaaattcaagtcaagacagttatcaattctaattgatacaattaccaagcatgacaggattaacaagaagcacaatcgtcagagaaccacaagcagcagtcggccatgactatactattgggtacgcataccaccagtctagagccagccttcggtggagagcctgcactggattggctgaagacggccgctgtccctgcaccaaagcgcttggacagcagaggagaagtcttagtcacttaccctcagaggctacccatgcagtctggaccaggtgctgattacgctcacattctaacacctgaaggtacataacgattatcttgtgaggatgcttcacatggacacaaaagcccaattccttgagaacccgtctctctgcctttataatctggttcttcagattaacatactcttgatccagcaccagaggcacctcgtgccgaatt

SEQ ID NO: 724 - DNA, 478 bp, Rattus norvegicus
  Genbank Accession No. AA901350
tttttttttttttttttgccaaaattaaattttatttcacatcgatagaaattgtgaaaataaaaaaaaaaaaaacatgacattttcccacattacaacacaagaattcaatggaaaatttcttaccccaaataaaactttactggtgggataactgaagtaagtttacattctacagaggaaagcaaaatagcaaatgactgtttgaaattgttttaaatttaaatccaaacatgagcacaggacttcataattaacattttatctagtccatacaaatggtctgcatgtcaggtagcaccaattcataaagatgctttttaggatggtctcgagtagcacccattcataaagatgattgatagcatggtctcaggtagcacccattcataaatatgcttgttagtatggtctcgagtagcacccattcataacaattcttgttagcatggtctcggtcagttaaaaaaaaagaagg

SEQ ID NO: 725 - DNA, 467 bp, Rattus norvegicus
  Genbank Accession No. AA923852
tttttttttttttttttcattaccctcatgcattttattttctgctatacctcccagttatcaggatatgaaccataattttattgtgaatacagtagaattcacagcacaatggtagcttattgacacaagttatctacatcattttttcaaattatgtataaattctaactcagtccataaattaatttctgcacaaattaaattacaatttcatacttcacaatttctgcctatgattgtctctgggaaaatgtttaaattttatttaatgataaatatgtttactttccccctcaaatttctttacttttcttcttaaatgtgtttccttccacctcactgaacttctgtaatatgagcactttgaattctccttcctgaaactcatgggtctctaatttctgtggtaagctgctacagccttgttatttttctttaacagtttacaggttgccacactgctt

SEQ ID NO: 726 - DNA, 519 bp, Rattus norvegicus
  Genbank Accession No. AA923955
  misc_feature (1)..(519): n = a or c or g or t
tttttttttttttttttcgaattgtatagtttttatttttttgagaactctgaaagaaaaagacttcagaagtgaacttttgaggggcacttttttattataaatttaatatgcttgattaatgaaaaaattacaatgaagtaccgtgaaaatgtatgtcaatataaaaatattagcagcgtttccatggtttcaggctcttaacattttagtgacaccgacgccctcccgccgccatcagaagagaacagcggctccacaggagaacctcggatgttctccacagaaaaggcctcaaagatccccaagcccagtgtccccgcccatacttccggctaagccctgagttggcagcatccgagcccatcaagagcctcactggctttaatgtctgcaacgagattcctgcttttcaggccactgggtgcgacggggagggaccctggagttggacttgatatgtatgtantgtttaattctacacccccactgctgtatgtcatccgcgctggtgacagt

SEQ ID NO: 727 - DNA, 522 bp, Rattus norvegicus
  Genbank Accession No. AA923982
tttttttttttttttttacatcagacattctttatataaacagtccagtctgagcagcagaatcaaatgcagagcgaatgctttcaaaggtatgtgtgcctatgtggtgattacattctccacacatttaaaagaaagggacactaggagagaccacagtataataaagaattacagcacattaatacccgaagccattcaccaaggtcttgctcatattggcaactgaaacttcacatccacgtgggcttctttggctaaggtcacgatttcagagagctttacaaccattttagcagcttcatccaaatcatcgcaagcaagaattttaagaccactgtctgcaattagtgccttagcatcatcaactcgtgtaccttgtaaccgtaccacaacaggtattctaatttctagatcttttactgccatgactattccttgtgcaataatatcacatctcatgattcctccaaagatgttgaccagaatagcctgcacccttttatctgaagtgatcagttt

SEQ ID NO: 728 - DNA, 434 bp, Rattus norvegicus
  Genbank Accession No. AA923998
tttttttttttttttatctaacaaaatccacactttattaaatgtcacagcccacagcttccagtccacagcactctcaaaacaagtatggatacctcacgcaggcagaagatggggggtgggggtggggacacaacacagagctattaataccacagtggcagtgcaatgtacaccccatttctgctcagcccctccaacacaagggcttcaccactcaaacacggttgtggagctgggtaggctaagactcaaggctgcagagggcagctcatgaactggggcggctggatgccaatcagactcctctacccaaggacactgctgaatgcgggctcccagctctcaagcgatgcagatgagacagacaccttacagtgcatgctgagggctgggagttttcctttccacagcctgggcaccaggccagttct

SEQ ID NO: 729 - DNA, 492 bp, Rattus norvegicus
  Genbank Accession No. AA924036
tttttttttttttttttaatagacaaaaaaatcattttaattgtgtaaaattttacatagaaaatacatagaatgtaccaaaaggataactaaaatcttcaacatcaaaagtggacagaacaatttttctcatgttctttggagtcttgggtttttgagaaaaacaataattccaggaggtacaaggacaattcttccccaaacgataacccttaacacatcttacacaaaaaaaggagcccaggagaaactggaggattcacggtgtctaggttataaatatcaatttaaaagtcacccatatcatgtaactcaggagcctctgttccaacccagtgtgttttatgaaacaaagagacagggctaactaaaggaatcaaagaacccttctccaagcactgacaccaatctaactggacaccctactctgatcccatgtgtccttgtcacaaagatgattttaaaagtaagaaagctgcttgtcctgaaagg

SEQ ID NO: 730 - DNA, 359 bp, Rattus norvegicus
  Genbank Accession No. AA924059
tttttttttttttttttaggttaggactcatgcctctctttattcagatttccccacccacttacagcatattgtgaacccagcctcaggtctggggtcaggggccctgaacctccctaggattccccagctctgtccagcaacttttctttccagttcacagacagagagatggagacccagtgggcacagccagtctggcaatctttaataagaagagaggccttggccagggctctgtgtgtcctcgctgggctgtggttgtctctggctggggttcagggagctgttgatctggtgtgtgagggtttccagtcttggggtctggtttgggatcccagatcctcctcttagcactt

SEQ ID NO: 731 - DNA, 477 bp, Rattus norvegicus
  Genbank Accession No. AA924092
tttttttttttttttctcatcttgtgaggcctttagtagaaaagcacagggcacgaagccctgcccgcaggttacactcagggagcagaaagggaataaataagtatcatccagctggggtgaacaccggcttctcttccggatggctggggcagaggtcagcacacctggaccatcatcgaagttaccatggtatcaaaggccctagactggattcggtctcccgggttgtagaaggggttgcacatcacatctgtgtaggagttatgcagcttccggaacatactgcggatctcattgtcccgcagggccgtattggaggaatccaccaccatgacaaatttcaccttggaattggtcacatagccgtataccttgtagtcctcggttgggtagagcaggcccaggtacagctccctctggtccacgagtgctttccccatcgcagagatcttctcatccaccacgtccagagac

SEQ ID NO: 732 - DNA, 524 bp, Rattus norvegicus
  Genbank Accession No. AA924105
tttttttttttttttttacatggagtgcactttattggggtcacttactgctctatggtggcaggaagaacagctgggtccccacaaagttggacatatgtatggcttagggcaaaaattgatttcatctcagctggatacacctggcttaagcttgcatcaaaaccagacacattccaaagtcccaaagactagtagtttatccatttataatctgctgaggaactatgcaagaaaacccaacagttacccaaagacactcatgatggttacacctcgagatggctctaatcatgtcaggctgaatccatgtgaatactgtggactacatgtgctgctttaaacctgtacagaagaatacgtgctttaaatatctataaaaacaaatgcttagcgcttcctaggtggtcactggggagacagaagaatgcaggtggcagtacgccctccttctcaagcaatggcactgttcccagatcttgggcctagcttcagggtgcttatgcacgtctgaactctctgat

SEQ ID NO: 733 - DNA, 280 bp, Rattus norvegicus
  Genbank Accession No. AA924140
tttttttttttttttttaaggaaataaaacacatttattaatccactcagaacctagatgagcagggggaagggatggctgattcacccccagcgcgcccaccacagagggcagctggccccagagctgcagaatgcttaagcatagacctggtgctccctctccacaaaggcctggaagaggctgcccagctcctggggggctggggtctgttcaccagtaagcagtcctctgagagcctccaggccctcctgctccagactctgctgctcttgccgca

SEQ ID NO: 734 - DNA, 275 bp, Rattus norvegicus
  Genbank Accession No. AA924144
tttttttttttttttttcagccataaaaataaaggccttttatttggttttctatgccattacaagaacatctggacaacacttcagtgtcagcagagcctgagaccacaccatgtctactaaactggggggctagatgcaggagccaggctcctcaccaggctctaggaggggctccgggttaaggggtcaccttcttgtaggtaatgtgaagatgctgagtcattggctgtgtagtggttgccatagagaccgtctgttcaagtttgccttca

SEQ ID NO: 735 - DNA, 577 bp, Rattus norvegicus
  Genbank Accession No. AA924151
tttttttttttttttttcgctttaagaagattttatttccaaattaagacgtgtaagaaagcaagccaggtgccccctgcttctggttgcaatggaaatatctggcacaacaaaccatactgaacccatttaaaaactgtcacgagaacagagactataaagaccccagagaggaaagagaagaacccgggtccttgacatttctgcttctacacaggcactggctcacctggaattttaaaatgttcagtggcttcttggatgtttccaggggcttcgtctaagctgcttaactccaaatgaatcctagaatgtggctgaggttcaacagcacattcttatgtttaagacagagcatccactaggtctaaattattcttcaattatatggagtcaagctttatcatctgttataaattccccttccatgggaggccattgagttccgtcaccacaagacaagacagtctttggttatatagagacgaataattgtaaactggtagcattaacacatcttttgcaacctgtgtaggtattgccaaatagtatgtgacaggaccagttatcaacactg

SEQ ID NO: 736 - DNA, 494 bp, Rattus norvegicus
  Genbank Accession No. AA924152
  misc_feature (1)..(494): n = a or c or g or t
tttttttttttttttttcaaggttcacaggggtttatttgggggtggggagggaggccaggtgtccccagccacacacatggctccctatgaggtggcttcctcaggtcctttctggacagagctggtcaggcaggcggcatcccacaggagagtgggtggagtccttgggcagcacctcacagaatgatttggttggtgaagcttcgactcagctccttatgtggtagaacaatcgagttcaagataagcacctcagcggggatccgtactcggcagcccaggatggtgatggcaggaagtagctttccatctttgaagaggctctcgctgtccatgcgggcgcgggggtcattgggattggggtcattgggagtcccctctacgcgggcccagcgccccacagtgctcccccagcccacaatgctgtgaaggacacaggtgtgttcctgcantgtggctccatggaggacaatactctcccgcagacgcaca

SEQ ID NO: 737 - DNA, 475 bp, Rattus norvegicus
  Genbank Accession No. AA924169
  misc_feature (1)..(475): n = a or c or g or t
tttttttttttttttttcactatgggatggaagcagctttatttgtggccacagtctctcctctggaaagcggtactcacaggaggtcctgcacacactcacaacctgctaggctagggtgatctcctcagggctccacccacagcttgtgcttccccagggatcaggaccttaggggcccacatttgaggggaagtcgagctgaagagcacaggcatacacaaaagactagtgcagaggagactcccacagcctgctttcaagcacgaagagccgaggccaagaggtccactgtgtcaggcacacaccgtacagtgtagagctgcactcacagtgcctggggctaactctaaagagctccatcagccctcagtgcagccctggacagaggctctgccatctgttgcaggctcanaggggtgctgagcgtgtaacacatggactaggttctcctacttgggaagcaaagcactgt

SEQ ID NO: 738 - DNA, 309 bp, Rattus norvegicus
  Genbank Accession No. AA924267
tttttttttttttttttggagtttttcagtggtcttgatgatgtcataagaacatttgtaaaagggaaggcttttagaagagggggtatgggaagggtgctggctttaaagcagaggaatattccagtgctgagaagggtgatctgtactgaagagaggaggagaggactctctgaagcactcttctgaagaaggctagtcacaccaccaactcagctttctgccagtgaaactcatttcagatttcggagctccacaacggaattagtggagcttcttgagatacaggtagatcccatttttggactt

SEQ ID NO: 739 - DNA, 441 bp, Rattus norvegicus
  Genbank Accession No. AA924301
tttttttttttttatttaaataaaatagttttatttatattaaatgacttttaaaatgataaaacacttaatagatactaaataaatagaactggctgtaaatctaagttctctgatgataaccatacaaggatccgcctgggctgattagtttgggagatgatctggaggttggtaggactctccttcatcctcaatgtaaactgtgcctctggtttccaaagttccccttgtttctccaaacgttgtatgtctagaaacatgttttaagaaacaaactggagaattgtatgggtttagagtgcagttgagaagagaatgagggttgttttgtttaaagtacagaacaagaaacttccactgcttaactgattatccagaagtgaaaaagaaactgagctaaaggttgtgctggtggcggagaaagggagcaacaaagat

SEQ ID NO: 740 - DNA, 406 bp, Rattus norvegicus
  Genbank Accession No. AA924310
tttttttttttttttctatgtaaagtatgaatatttatttcaggctttagatcccaatcaattccaaaaaacaaaatctgatatctcctcagagtagctgcagcctccgtgttgggatggtctcacagaggcagcacatttcatcagacttagcgagcgtaagtccctgatgcccaccgcagcccagccttaggaagggaaagaaacaaaactcaccaccacggggctgaacaaatgcacacgcactaatgtaaaggaggagctaaaccttggcaaattggcttttttttttttttaagtttgttttgtggggttttttttattttttatttttttttaggttttgttgttttttttttttttcttttttttttttcccattttcttttgctacccaatatatgca

SEQ ID NO: 741 - DNA, 511 bp, Rattus norvegicus
  Genbank Accession No. AA924335
tttttttttttttttttcagaattcaattctttaatacaaaatgctttttttttcttaagatatatctgtatttctttgttgctgtttaaaaataaatatgtactacggaatatctcggaaaactgctctagagacaaagacgtgatgttaatatcttttcccccacaattattacggataaacagtagcaccaataaataaatgataacaaatattaaaattaaaaaaggagagagatttagtatgtagaattctctattttttctcgttttgtttttacatataaaaaacagaatagcaatgtctattttatcagaatcacatatatacataaacatatatatatatatatatttatatacaaacacaagttgccaaatatatatatagtatgtaaatgtatattgaaaccttatttcaaaggaatgtgtggtggggacaggggagggcagagctgagtgttagcaaaattaaatatcttctcaggacaagctagtgactgtcaccgat

SEQ ID NO: 742 - DNA, 596 bp, Rattus norvegicus
  Genbank Accession No. AA924339
tttttttttttttttttgaaaggcaagacaaagttttacttttaaatgattacaagcacaccaaataacatgtaacaagctgagtcctagcatctagtgacttgggttaggatgtactaacagcaacctggacaagcatatcattgtcctaaatgatccaggatagagcactatatggctggctgcttcttaggaattacaaatggctacttactactttttcatagataacgcccctgacctttaagaaagtagaagggagcaattcactccctttctttcttcaaagaatttttttttttactagactaataaaagaaaagtcaacattgataaccattacttgcacgaacacacaggaaggtgacatatacttcttatagatacacaaggtaagaagatgaaacttcaggtacgtagtaaatctgtacaaaaagctagatttgatactctcaaaaagtgaagggtcctacaacagtatagagacataatttaatgtcttccagaatacaattcgagctctgcaggtttcctattccacggggacagatcccatgccaacccacagagcaggcgcgtctgcctcctatccattt

SEQ ID NO: 743 - DNA, 360 bp, Rattus norvegicus
  Genbank Accession No. AA924396
tttttttttttttttatggcttgttttagttttttattataaaaacacatacaagagttttaagaaatgatgaatataagacaaatcagaatcacagtgagttattaaacccatttctatatacaaataaaaaattccgaaagtggaatatcatccaatgtgagacacatcatagatagcattgcctgtattcatccccacacagctgtccctacgcacacaccccacagagctgtccctatgcacacaccccacagagctgtccctacgcacacaccccacagagctgtccctatgcacacaccccacagagctgtccctacgcacacagcccacagagctgtccctacgcacacagcc

SEQ ID NO: 744 - DNA, 355 bp, Rattus norvegicus
  Genbank Accession No. AA924405
tttttttttttttttctggttttgcgtttttattggggtttatcatgggcaggaggaactgccaccataaagtatgcccctcccaccaagcaggtccattctaatcctcctcccgggccttctgcgactttttctttttctttgtgctgctctttgtgcagcttgcagcagcctcaggctcctcagaaaatttccttttcttcttaggggtgatggggcttgctgcctcttcaggttcactggccacttcctctttaggtaaggacttctttttcttaggaacacttatgctgctagtagccatctcttcaagatcactggccaactcctccttgggaaaagctttctttttcct

SEQ ID NO: 745 - DNA, 537 bp, Rattus norvegicus
  Genbank Accession No. AA924413
tttttttttttttttttcaagacaaaaagtttattaacaaatatacaaaatacagtttgcaactgtgtctttataaaaattcacctttgtatataagcgatactatacaatacttacaggtatgtacaagatccccacctgtatgcaattctctgggtcatctgtatcctcacatcttcaagagaaacctcacccatgaacacggcaccattaagcctctttctgtaatggatttcaatcacatttactgctgagattactcaggcaggtgagctgatgctggacacgaacccctcagtaaagtgcagttttaggcaaccccttagttttcctttagacaggtatccacagtccataaggactttttttcttatctatttttggtgatcctgatgacgtctcttcaacagcagctttcgttgttttctctagaggctttgctacagaattattagagctgaacgctatgtttctctgtgcagcagcagatttcccactggcatttttagttcccacttcagtctgcttttctgaatg

SEQ ID NO: 746 - DNA, 449 bp, Rattus norvegicus
  Genbank Accession No. AA924444
tttttttttttttttttggctgtgtgcgtacagtttattaggatgattcactaatttcttaagctgttcttcaaccaggagggcacttggggtaagctactagattgatagaaatcagtccatttgccccacaaagtgtgtcccttccctctgggccaccacagaggcagtaggcaggtttccagttgaggcaaagggacgtctccatctctaagtggactcggagactcattttaaccagggacaggaccaggttgtgggcaagagccgaaaactggtatagctgtaggatccatcctaggcaagaacaggaagccaagaaaaagcaggcagtttctcttggggttctgagccctgccgtatgctcaagtccagagtcagccataggcagttattggcaatgtcccgtcattagctttgaagcctccctgggcacctgcccgaaagct

SEQ ID NO: 747 - DNA, 510 bp, Rattus norvegicus
  Genbank Accession No. AA924557
tttttttttttttttctatttagaatatttatttatcttttacatgacaagacacaaaaagttacaacttcttaaaactcttcaaaagaaaaaaatataattctgtaagcagcagcagcagctttcaaggtacagacataataggaggggtggctcccaggagcaaccgtgaactaggggcagcccagacttgagccccaggtagtgtcactgggaagggcctccatggagggggttgggcttgagggacacagcaccagcacttcagtcaatcaccaaacacaatcacatggccagggcaggggaggactgctttgattcagaacagaggatccagggctggaagggtggggctttccaaacatggatagaggcccagagagctgggaggcccaggctccatagtgtccttcatgcctgcccttccccccaagcaatctctgtctgggagtagggctctgtcagaagagttaccaggctggagaactaaattatcggatggggtcagca

SEQ ID NO: 748 - DNA, 487 bp, Rattus norvegicus
  Genbank Accession No. AA924578
tttttttttttttttttgaagcagagttaaatgtttatttaaaatattttaaatataaatttaagttacaggagtaagaggtgctcagggaaagagtaaggcacacctgagagctgaggtgtgggcttctcaaaggaaaaccgtccttaagtgtcttaacaattagttgtacacaggagttctgaagcctttggtattgcttgattggtttctaagtcccacccctaatctcttcccctttttgatagtaagagtaaaaggtggctccagaggtgccttggataggactgtgccctgataaaatgaaaccatgggtcataagtgtagcataggagtcttgagatatgcctttgactgtaaatgagttttctggcaaagttgtaggaaactgtatgtttatagccaggaaaggaaaaatggcatttatattttggccttaagcataactccttgctgctttaacattcctacttgaacctcgtgccga

SEQ ID NO: 749 - DNA, 510 bp, Rattus norvegicus
  Genbank Accession No. AA924586
  misc_feature (1)..(510): n = a or c or g or t
tttttttttttttttttgagtttttaatacattttattttagtagcataaataaaagtttattgataatacagtaaacattcttcagtcagctttttcaaggccaaagaataagatctgaattacaatttatattttgtttcacacagtagaaactccatccatgtcagctgtgggattgtaatcctgagtgataccgttggtttcttgtagagataaacattagtcggggaccagatccttaatttttgctatccaaccatttttgctgatctttttctctaaccccatacattccagactgttcaatggatttgtaataaacttccaaaatgaagggaaatgtcttgctcattgtttgcctgaaatcttggctcgagttcatctttttanacaaaaaataagctccaaaaacgcccacgagctcagcagctaaaactcctttaaagatcttctttgccaggggttccatggtccgagccatcctgaggccttggccctcgtgccgaat

SEQ ID NO: 750 - DNA, 467 bp, Rattus norvegicus
  Genbank Accession No. AA924598
  misc_feature (1)..(467): n = a or c or g or t
tttttttttttgggggctctccaaaagcacgtggtttattatggtgagctgtagtgcacatcggtttctttagtaattctaagctgatacaggttccccactaggagtacacatggggagtgactgggcgcgcggtgacagtgacaaaccagtgagccactgtgatccatagaaagttacattagcaatcaggagagaaagggaagtgtgaggtggcccagaggcaggatgtgagcagagcacctccactgctctcatggtggtccacaggatacccagaagctgagggggccttggtggagggaggctgtccccctatctctaaggaactgggacttagtggttgagacgctccactgcctgcaggtggcaccttttcctcaaaagctcatcaggcactaagtccatggttgttgcanaaggtgctctgttctttcaggtactcggttctggttcctcccctcctt

SEQ ID NO: 751 - DNA, 545 bp, Rattus norvegicus
  Genbank Accession No. AA924604
tttttttttttttttttgcactacaatttttttttatttagtttacagaagaaatctattaagtacaggctgcagaaagaaaaggtttagtgctatttacattcattttaaaactctgctctatacaaatttaattctgatcagtatgaacaatattttcgtagatctctgcatataaagccttctcatggaagcattaacaatgaataaagtaacctgattgcatttaaacaaagatgaccatagagaccatttacatttaatgctgccgagggccaagaaccctcattaaatacagaacacaacgtagtctgcaacttcatcttttaaaaggctggataaagttattgatatggaatactggtctatatgctacacgccaatctatatttgcattctacagttagatattttattatgtcttttttattaaatataatctacacatatttgtaatttcatccaggaagatttcttcccagtgaaaaaatataaaatcttttttttacaggtttagatgaaattagctcatgctttagtgctgt

SEQ ID NO: 752 - DNA, 348 bp, Rattus norvegicus
  Genbank Accession No. AA924673
tttttttttttttttttcaattggatgccaatttaattttaaaaagttattaagaattgaaaattaccaaatgcgtcataaaacaatgtctgagaaaaacaaagggatatgcttacttgatggtgtacaagatctaagagggctcttcaaggtgctaaaagtattcctggggaatgaaatggccgtaggtttgacaggaagggcaagttggaaaagacaacccgtccctcaaccaatccccaaatgtttcaacctcatagtactatacaagggaaaaatgggtgcaattactgtcactagacctcaagaagaaaataccctgtgagacgaatttaaacctcctcctgc

SEQ ID NO: 753 - DNA, 561 bp, Rattus norvegicus
  Genbank Accession No. AA924691
ttttttttttattttttcttttttaataaagttaaacaatacaacaaaaattcacaagctgcctccctgtctacccctggcttccctccctcccttgtcctcagcactggctccctttccttcacccctcatacagacacagggcacctgactgagaaaacgaacctgctctaagtacacatggacatgatggaggaggagaactgtccacactcatgggtaaaccaagtctgcattttctggggtctaagtagttgaccttcattagccaaactgaaagtagaaatttcctgggccagatgcttcaaagctgaagcccccaggaccaccaaagaatgccttgaagatgttgtttgcatcaaaatcgcccatattcatgccctcctcatccagatcctgtccactgtcataacgagtctttttcttaggatcagagaggatggtaaaggcctctcccacttccttaaacttcttctcctcctccttctgcacttcggcactggccccactgtgacgattcggatggtgcatcacggcccgtttccggtaagctttcttgat

SEQ ID NO: 754 - DNA, 470 bp, Rattus norvegicus
  Genbank Accession No. AA924716
tttttttttttttttttggttgagagtcttactatgcagcccaggctggcctcaaacttgggcacgaacgatcttcctgcctcagctgcgggagccttgggtgttcattacggcatgactatttttgggcacactgtttcaggagatggttgccagctgactgcaggtacctcagtaaagaccatggcatcttatcgcttttttcacacatgtacttttagagagtggaccccctctgtgggtagagtgagctcaggtttgtaagaactcaggctgtactctggctacttttcggaattctttagtgtgggtcttggggcactgcatctcacaccagctgatggggaccatctggacacctgactcactgtgggccaccacaacccctaactcattttcagcagtcgtcagcaggtaattggactgtgcatcacctagggagataactttggccaaaactatatcacctg

SEQ ID NO: 755 - DNA, 352 bp, Rattus norvegicus
  Genbank Accession No. AA924737
tttttttttttttttttgaccaccaccgagattttattcttaaataaatgctcagtctacggccaggttaggtgacagacaggtgggcagaatggaagtgcaagtccaggtgcccctcactgtgggtgtacagatgccaggagaggcagggacagctgaggaaggcaagcaggtacatgagctgtaggggacaaattgaaccacttggaatctgttctgtgtacgccaggaagggcagaaagaacctttttcctgtattttaagcggtggtgctagagagcctggagtggtcctgagctcctgagcccttcccaggctccctatgcccagcgtatgggctccacctgttgtc

SEQ ID NO: 756 - DNA, 536 bp, Rattus norvegicus
  Genbank Accession No. AA924751
tttttttttttttttttcagtggttctatttatttgattataaatttatatgctctaaggacttttacagaggaaaacctacccttttcttcatctccagaaaggacactttgaatccattcactccaaaaagcgttaaaagaaataaatatgtcccaattttgcactcatgagctaggaaaacgagttgcctgaaagcagtgtacgtaagatagaaggaagaaacctcggcagagactgggtcagaaagcagctgttggggttgtaatctgggagacttgggaggtagagaaactcttgggggaacttggttcagacacagacatggcttctccgtgacgatccctcagtgcgagggcttgcagctcatggtctgcatctggcaagtcatctgtttcataaataaaggtctcactaagctataaccatggtcctttgcttctactttatctgtgacagcttctttgcaccactaagagttgagtggctgcacagagccctgacttatgcactctggtctttaacgagaacaattt

SEQ ID NO: 757 - DNA, 465 bp, Rattus norvegicus
  Genbank Accession No. AA924763
tttttttttttttttttccggtttggttaacacatctgagcttttattttttagaatatagtctacatctggattaaaaaaaagttttaaataaacaagacatataacaacagtggagcccttcatcattctacgtacaacacagatagaatgtcagttggttccactttagataaatccactttctcacaataatgttattattttcgctggccgagtggcaagcttcatcctagctggcacgtcaccagtttacacacacggggtgggggaggggtggcgtgaaagggatggggtgccataggactactgtacagtgtaacagaaaatcattaataaagtagtaccggttaccaacagtgctgcctgtgcgcttatcacaatggaatcgacgaagtttcaaagcaaaaagatctgaaatacttaagacagggtcactgttacaaaaagaaatagtgcaaacag

SEQ ID NO: 758 - DNA, 435 bp, Rattus norvegicus
  Genbank Accession No. AA924783
tttttttttttttttgtctcgtgaccatcaaaataatttttattttaaaaaaataacttcatttgtcatgatcataatcaagtcagctccaattcctggccatatcatccataacaggtccctactgccaaccagtgtctacaaataacttgtttgcctgcatgtccgataatgtcacccgaaaccagggccttgttccttgaagtgttctgtttgatggttccttgacccttttccaagagacttaatttgcccaagggagcctggccttggaaaagggtgtttgcatctgcttaggaaaatgagcccgaaatagtgacttatttggaaccgagtacagaatggactgggaagggcagatgagctagtttgagcaagcagagaacaacctgagccttgcacctctcataaaagggcctcgaagcaaagcacttt

SEQ ID NO: 759 - DNA, 475 bp, Rattus norvegicus
  Genbank Accession No. AA924787
tttttttttttttttttaacagaaagtcagagatactttattgtcacttctaaatccaaaggctaaggatagcagaggtgtaaaaatggaatcccagtctgcttcacatgaatactaacgtttaatcctgtcttcagagtccaagactgaaaacttgcaagtaaacactgagcaagccacatgtttaggtaatatttcttaaaaagtcttaaaaaaaaaatatgatacaggacctaagttctcaaagtggcatatgtgctattaacacatgttctgaaatctggtaggtcacaacagtcctgaattaatttttaataataataataataaaaaaaccaaataactaactgcgctttatactttttctactccactatagctttctttcacctcattttaatgttgatcttcactttattccgttttcagtattcttcaaaaactcttcaacagtagtcctctgtgtgatctgagg

SEQ ID NO: 760 - DNA, 389 bp, Rattus norvegicus
  Genbank Accession No. AA924803
tttttttttttttttttaggtaagtagattttaggtagtccgggctgcacatccatttcatccatcatttatgtctgatgggactagatacctaaagctactcttagctccaggaaggagtatctcccgtctccattggaatcaaatgctctcaagtgttctggtcttggcatggcagaacctagggaattccagatttcctggtaggtcagcatcccatccacatcttgaccagtcttgtggaataaatcctgaagatctttgatgctagaaatcccaggcagggagataggttttagttgggtctcagtttggtctccaagaaactgtgagaattttggcaatgttgaaggatctgatgtgaagttctgtactgctcctcatctgtg

SEQ ID NO: 761 - DNA, 402 bp, Rattus norvegicus
  Genbank Accession No. AA924813
tttttttttttttttttcattattattatttgtttattttacaatcagtatgccatcttttaccactatggctttaaattttcattctacccaacaggtgtcaaggaatagttaagtccatgccttaataaaacagttaaaatatttacagattcaaaatagatgttttcataactgaaaagttcacctgagagttcactgtaacggtgccgttggcttctctcttttctttccaagttgttagcatggctgagggccctcacgccatctccactatccgtgtcctagatgttgaattcctcacttaaaattggctaagcatcaagctacagtaaattgttctaaagtttgcaggtggacaaccaatgtcatatccatgtttactcttaatataagcaattt

SEQ ID NO: 762 - DNA, 529 bp, Rattus norvegicus
  Genbank Accession No. AA924881
tttttttttttttttttgcaggactgctcttcatttattccaagcactcaacatcgaacaccatgacttcttagatccttacaatacagctacgtccaagtggtgacatcacacgtgtgttctagcttttaccaggtacacaatcaacttgcacgacgcacatccagggacaggagcacaccggagccaggccaggccaggccaggtcaggccagcacaacttttggaatccatggtcctagtggatgtgaccctggaactagaatgacaggacaaacactgtgacagggacaaggtcacacaaatgtgcatcaggtgtcctctacagccctgcccccagagtagcttggctggagagcaaggtgacccagaagggccagggcagcagggtgtgtgaggagggtcacggcggctcacactgatgggcctgagctatgagctctctcccacaccaaccatcctacctccagaaaagagcccaggaacgtcattctcaacttgggaggcagcccaacagtcccaactccca

SEQ ID NO: 763 - DNA, 497 bp, Rattus norvegicus
  Genbank Accession No. AA924902
tttttttttttttttttcaagttttaaaaatcactttattaggttgaatagttagagtggtgagaactgaatgtcaacactgcttacactgaagtgcagaattgaacttcactaggggagattgaatacacatagagacaactcaagatcttcctgggtttgtacatgttaacaaattaccaaggtaaggccatatctgagaatctagctggtccctgaatggccccaggttcccctaataattagttatgctatcatttaagtcttacagatattgatcatttagttcctactgtatgtttcaggagaattttaggagatggttaattattcgggtcaatttaattattcaaaatttgtgcttgagtgctgttaaatatacttgttcagccattcgatgagattcctcctcgcttcctcaatgtagggtttgtctgcaggggagcagtcttctctcttccgatgcacaaagccatgagtttgcccagaaaatgtct

SEQ ID NO: 764 - DNA, 286 bp, Rattus norvegicus
  Genbank Accession No. AA924993
tttttttttttttttttgattcaaatgactggcaatagcctttattttgatgatcttttcgtttaaaacatttaaatcctgtctctgtacatggcgtagtacgtgtgtcctcccacctgtggggaaggggaaggtgtggaaacagggccttggagccctggtgtgtgtggggtggggtaggtgggcagagcgggcgagtgggttaaaacaagcatcttgcttactaacatgaagcctcacaccctgtgaacagggatgaggctgcattggcttgaggggggcctca

SEQ ID NO: 765 - DNA, 381 bp, Rattus norvegicus
  Genbank Accession No. AA925004
tttttttttttttttttgcgtctaattttattttcaaagagtacattttctaggcaccccagacttcgactgtaaaatcagacttcagtgtggcccctacatgtgcaggacttagcctctccatacggccctgcctggtctgagccaaagctgcctctgcctaccagcatgggcctctccaccagaatctgggtgctaggcccttcatcctgtctcagggctggcccaagctgccctagtgaggactgaagtcctgtcctcctgtccacaagctgctccctgggctggtcttctattccctgggctgccgcagccatctgctcactgccctgtcttgcgtggcacataacttcagggtggattcgtcacccaacgtcagaa

SEQ ID NO: 766 - DNA, 495 bp, Rattus norvegicus
  Genbank Accession No. AA925045
tttttttttttttttttgcagtttgaattgtggtttatttagaagcattcaagagttagactgtaaataaacatattatgaataattaaaatcgccatttattataaataccaactaagttaaataatactatttcacctatctttcccctttgagctggagtccagattccttctctcaaattcttaccaggagtaaaatctttagtgttgtgacctctgtacccatctgtacccaaagtgcccttttataaactaaatgagacctagaactctgaaaggaagcttcttcccacttactgtagtggtaaactgacctttctgtttcctgagttgttgggagtacaggtgagcgctaccagcattaaaatactttcctgggatatacttgctttgtgcttcaggcttcagttcagatacgaactcccaggaagccttggacctagtagggggagacgcactaacacagtgtcctgtcctggaaatgtgtatgctt

SEQ ID NO: 767 - DNA, 118 bp, Rattus norvegicus
  Genbank Accession No. AA925049
tttttttttttttttatcagtcttataaacaaaactttattaaatggtacagaagatcctgtgggagataggaccaccaaccgtgcctgtccagaacaaaagttggctgacccacacc

SEQ ID NO: 768 - DNA, 428 bp, Rattus norvegicus
  Genbank Accession No. AA925057
tttttttttttttttttccaaagatcaagtttattaaaggcatggagggctgcggagagccctgctgtctagggacaaggcctggcactcgcctgggcgggtagggagagtttccacaacctcagtctacttgaaagtgtggctttcagctccacctcgcccaaagcctttgggcccaaacatggcggagtagcagggatggttgcagtagggcttgccttcatgctcagcatgacccccagaggtcagtgtctttccacatttctcgcacttcaggcagggacgatgccagtccttgcctagtgacgtcactcgctcagcgaaatacacctccttgtcgcacttggggcacttcggcatggcggcacctggtcctgcacaagtggctgcagctagaaggaagtaggttgtcctcgtgccgaattctt

SEQ ID NO: 769 - DNA, 487 bp, Rattus norvegicus
  Genbank Accession No. AA925061
tttttttttttttttttccaaaccacgaatcgccccaagttttatttgtagtccatacaaaagagggggggaaaattaagatttctaataccacctacttggggagatagggaattgggaccatgccagtcaccgtcagctaaaacatcagtggtaagcagggatttggacacataccaactgactgtcccaacaggatctcagtctcaacaggctacacggacagtcagggtcccctggactgctggcacagcacataggaaatggttaaagtaactctttcctggcctccctcacatctaaaaagaataacgcgccgcctgacctcagctgtaggttgtgtcacctccaaacaaccttaagtatcgcgcacaaaaataaaagggagccaggaaaaaaaaaatataaaagaaattcccattttggggagatggctgggtagagggaaaaccgcagatctaaagccagtagcaagatgtgctgctga

SEQ ID NO: 770 - DNA, 570 bp, Rattus norvegicus
  Genbank Accession No. AA925063
cggccgcccatgagggcctggggagagcccaccccacccccggccggctgggactcaccgatgaagacgaagatctggtggtgcgagtatcgcaacagcatggacacactgagggtaaagatgaccatgatgacaaaggctgccaggtaggatgtgcgtgccatccacatgctgacaaagcggtagtgctccccagagaccacattcctcaagaagcctttgttctcctcattctctgccaggcccttcacactagacatgaggacgtcgtcgtagcccaggaactcgtccagcagcaggcggctgaagcggtccccgaagcactgctcccgcgtggggtcttgatggagctgttggtgaacatctccacggaaagctcctcctcctccagctccaggcccccgggctccaggtctaggccaccgaggcccccatcacagaactgcaggatcaccggtgcccggctggagttgtggcgcacctccacccgcaggacaccctcccgtggccatcggtctcgaacatgctccaagcagttgatgggggaccgggagaagacgatgtgtatgt

SEQ ID NO: 771 - DNA, 456 bp, Rattus norvegicus
  Genbank Accession No. AA925137
tttttttttttttttatgctcaggaaaaaagtacaatgtccaccttttatttttaatgtaaagaatccatatttacacaatacattcatgtttttaaatatgttacagttctctatagaaaaccactccattaaaacatcaacgagtgatctgaattcaaatttgaaaatatttggttgaatcaaaatattctcatcaggactccaaccgaatttcacagcactcctgcagagatatcgcaggaagaggactgaagagggccatcgatgggaagagtcttctccctcgtgatagagtccacgggacaggcgatggcaggtggtgctgtctctcctgttccagccagtgttcgtgaggccaggctgagggcgggcagtgctgacactgcagctcagtggaggccgtcctcagcctggctgagtcagcagcgggctgcatcagggctgctgttctgac

SEQ ID NO: 772 - DNA, 527 bp, Rattus norvegicus
  Genbank Accession No. AA925167
  misc_feature (1)..(527): n = a or c or g or t
tttttttttttttttttgaaagagctcttacatgtgtttattaaaccaaggaccagtcacggggtgggctgggctgggctagtgtgagaagacagagctctcactgacttttgagcatcccagggaccagccccaatgcccacatggttactgatagccaactggcttcttcccaagatccccagcccacacccagaacagagtcttacaaaagcgaacaaatacatttatcttcctttccatcccctggccagcagaggtgggggttaaacagttcattttaaaaaagacaacgactcataaaatgaaaacagaagaaagaatccagagctggagagctgagatgtggccctggcggggagcacaatgtgcatgggagaccctttctgccatactcttggagggggaagcgggtctttgggctccggcccatggacaccaagcccacgagtcccttggagctcatggccacatggtcacaactgcattgacttcttanaaaagcatcttaagactgtgtccctgng

SEQ ID NO: 773 - DNA, 265 bp, Rattus norvegicus
  Genbank Accession No. AA925186
tttttttttttttttttactttaagtacactatttattcattttcccaaatataataggaaagtacgatatgatgacagcagcagccacaggcctccaagctcagttcccagagcagcacactgcagggtcagatcctgggagcagctgggaaagcggagttgaacctgagaggcccaggacgccaggagcatggtgccccaggcccctgcctcagcctcccactggctcggctgggctgacagaaggatggaacagctccagct

SEQ ID NO: 774 - DNA, 380 bp, Rattus norvegicus
  Genbank Accession No. AA925204
tttttttttttttttatcaaaacgtgctttattcacgtaagtggaaccatcaatgtgtacacccaaagtccctactcgaaggctaaaacacgtagctggaggatctgcttctattgcaaaggtaaactgaagcaaggagctgcagggcagagctttgcctacagatcagtcagcatggactgtgcactgctataaccaggctcaggcctgctgcagactctccacctggcttccatggaggacaccactcctgtgcttgagacatcaggcccggcacctgctttggtgaacccagcattcctttctccttggactttgtccagactgaatgtcagtcaggcctttgcccactgctttccctatatcccaaccaccatcca

SEQ ID NO: 775 - DNA, 452 bp, Rattus norvegicus
  Genbank Accession No. AA925212
tttttttttttttttttcagcagtatctgcatctttatgtacactacagggtgggctgggcagagtgcctggtcccagggacacaccacttttaacactttacaaaacccaaaggaaggaaggggcaagtgcaagtccaggaaatgaggccaaagtcacgcagagaggtcgctgttatcaaaacgctcctggtcatacacttcagccaccaccttgcgaccaccaaaccagcgcccattgagggcctggatggccttgtgagtctctgaagccatggaaaattccacaaaaatcttgacgatgatttctgcatcttcctcctcgccctgtttttcttggtagataatgacccggttcacagcaccaaatttgccacattcctctgtcacctctccctccaggtcatcatcaatgtccttgggatccaccatgtttcggagaaccatcactgt

SEQ ID NO: 776 - DNA, 510 bp, Rattus norvegicus
  Genbank Accession No. AA925274
tttttttttttttttttgaaagtcagacatgatttgtcagcctttattagtcaagagtgaagccgagacctagagtttcctttaaaaaacaaacaaaaaaccaacccaaccttgtttacagcaaatgatgactgatttctagtgacttttaattatacgtttaagactacagatcaagaattgtttgttttccaatcatatattcttttgagattaaaatacaagtgtaaaacaggttaaaattagattcaccccaatgatttaaaaaacaattccaattgaaagaatttcaaacaccatgtatagaactcaggaccaaaagacaaccatagaatctttttacctttgaggtagcacaataatgcttaattggtttttttttttaaaattattattacaatgaatttaaaacataacaacaaaaaacgacgaatctaacctttgctcaaggtgggctatatggttttctgcaaatcccccatgaggtgagtgacaattttcactcttttt

SEQ ID NO: 777 - DNA, 543 bp, Rattus norvegicus
  Genbank Accession No. AA925306
  misc_feature (1)..(543): n = a or c or g or t
tttttttttttttttttcaccagcactcttccctttattgatcgcctggcagaatcacattatgcaaccatgactgcagcaagaaccacactgaatggaagcaggaagtctggggctcaagagtcaccagagagtggcagctgggagatggcacctcgaggtgcagggtggaggctaggcctcaggtgtcccttaacccttactatggagaggctgaggcccctcatcgatagatagtcctctgactcctggtccctgggtatttcctcatgaagacagattctggcttggctgtggagatgaaagagactggccagggcggaggaaagggactcttcacagctcctgctgaggaggggtgggctggacgggttcccttccccatgattcacatcgatggatgatatgctggggacccgggccttagtcttgttcagcctctgggctcagccctatacatactacagcaggtgctgaggacaaggcctggaaggcacttggcttggacctccgggccctgctanagaatgcttatctggctca

SEQ ID NO: 778 - DNA, 479 bp, Rattus norvegicus
  Genbank Accession No. AA925318
tttttttttttttttctggttgtcaggtctgaaattttattaaattggaaactatattaatattagatcttaagtcaggcagggttggggtcatcaggaagaggtttggctgctggggaaggaggtggctggttttggctcctgcgactgtgaaccacgatgtcatcatattcatcgccttcatctctgttgtcactgtcgctgtcactgctgctgttgctgcaagggctaagcttatcatcctcatcctcgggctcaggttgggttgggttgggggtccgtggcaacaggggcatggctggtgtctggggtgtggtcctggctctgagtgaggtaggtatctgaggcatctcttgggtggctgggacggggctgaagcagtacatatgcacacgtgtgtgccctcacacggcaggccaagtgcagtgctgtgtggccccctctctcagtcaccaacactcctgcgccagctgcataga

SEQ ID NO: 779 - DNA, 540 bp, Rattus norvegicus
  Genbank Accession No. AA925341
tttttttttttttttttcactgtaattcagactttattgctcatcagtcacgtcatcacacacagttttaagtaaacagactttgagaaaatatactgggagcattatcagaccagcattatttttgatgcaaatgttcaagtgtttataaggtaacaagggatagcattaccaccgtctgccccagagatctatacatttcatagaaaagagtaaaaatagttcattggcatttaactagcattattgtttgcaatctaagaaccacaataactttgaccagagaaccagagaaatgacctttagaacagaacaaagtactttttttctattacaaaatgtttcttgaaaagaaaaaaacaaatcaagatgacaatgaaaatgcacaaacagaagctctcaaagaaaagctgttgtagtctaggcttctccaatatttgtctagaaaacaagacaggcgtgaacaaactctcactgtgactacaggtgtgagcaaactctctcactgtgactacacttacttttcagctcatacaattt

SEQ ID NO: 780 - DNA, 423 bp, Rattus norvegicus
  Genbank Accession No. AA925352
tttttttttttttttttaaatttcaaaatgatttattggattttaaaacaagatacaagaaattctgcctgcaagaaacgcacatccatcacatagtcatacaaaaactaaagatgaaatatcagaaaattatattctagaaaattaaatcagaaaccaagcaggagacttaaagacaaaatgttcagaaaatataaaaaacaaggtcactatatatcagcaaaaggaattgtactaggcagcttttcatcactgaaacaagtaactgaaagaaacaattttaaagaaggaaaggttgattttggctcacagtgtgagaactttcagcaaaggctagctttctccacagctctcacattggagtaaagcatgacagtggaggcaggtggcagaagcttattatttaatgacagagaagaagca

SEQ ID NO: 781 - DNA, 318 bp, Rattus norvegicus
  Genbank Accession No. AA925391
tttttttttttttttttaacaaacacagctcatttattagaattaaaaaaagagaaccatctcccacaaacacagagtactgcctctcagtcgatatcaagagcaagacaacagttgagaattgtattcctgagaagcaaagagttaccagtttgcaaacagatataacaggtgatttcaataaaagatatacagtttaaaaagaactaagaacaaagtttcaagtattattccagatgacatggcaaacctaataatgtaccacatcagggctggtgaagcaatgccctgtcagtctggagccatctggagcttcag

SEQ ID NO: 782 - DNA, 252 bp, Rattus norvegicus
  Genbank Accession No. AA925393
ttttttttttttttcttcgacaaatgtggaggtttatttcagcagaacgtgaaaagagtgcattggactgaagcccctgctcgttggcgtgtgtgtccagcgaattctcactgacacgagtgaaggctgctttgtgaacaagtggacagataatatggcaatctcagttcaagcaagtctgggtcaacacatcattcatcctcctccctcagtaaccttgcatgtgtaatgggctgtggggccatcaaactg

SEQ ID NO: 783 - DNA, 438 bp, Rattus norvegicus
  Genbank Accession No. AA925432
tttttttttttttttttacagcgtgtataaaatatatctccagtttaatgaagtacaattctcactataaactatatacaatacagaaatatactctcccagcattttaaagtttagaaataacttacgtagtaacagtgagggggtaatgtcatactattgaaccctttagtaattaattgtaatggcaggaaacgacaaacaacatgaagaaaggtgtctcaaatggctgtgtgccatcttgaggaatggaacagtgtggtctccctttctggatggctggtgctggagcagcatcaagtgtgtagagcacggtagcccaagcagggtgcggggaggtcacagagtcaaaaacaccagattaccacgccacgtcacttacacatagtacgttaggaacacgtttcccaaggcgaagtgtattttaccctcgtgccg

SEQ ID NO: 784 - DNA, 427 bp, Rattus norvegicus
  Genbank Accession No. AA925450
tttagtttcatttttttctgtttttaatttttataccaaaaacgtcatacatttaacgttgacatctttcttacctgtgtgcctcagaccaataaaagtactctgcattagaatttaaatctggagacagtagtatagcagtgaaaaactgtaaagcagctcagatacattgaacccaggttttacattttcatttgtcagatcagaatataaaaagtaagctcgaaatcaacttgaaaaagcttattcttcctcaagaaaaagtatgaacaatctgaaaatgatcaactagtatgaatgaaacactgtacatagtgaagtcacatcagtggctgttaaacataccactccctcctggaaattacggaaccatctacatgggaaactaaatcatcttcattttcattataccgttcatcactgacga

SEQ ID NO: 785 - DNA, 536 bp, Rattus norvegicus
  Genbank Accession No. AA925473
tttttttttttttttttcaaacaggatggttttattcctttgttttaaatgatctttctacagtagtgggacaggaagcagcagcaaaggggggaaggagaaaacggtttagaatatacagcacttccttttgggttgagtttccggaggctcgagggcagctaggatagcctcatcaaacacattcttcagacctctctgtgtgagggcggaacactccacatacttgacagccttcagatcccgcgccagcttttcagcagtctctggagtaataggcttctgtttgttcttggcaagtttctcaatagtagaagggtcatctctgagatcaatttgggtcccgacaagcaagaaaggagtctttggacagtggtgagttatctcaggcacccacttttctttcacattttcaaatgaggatggagagaccactgagaaacatactagaaaaacatctgtctgtggataacttaacggtcgtagtctgtcataatcctcttgccctgcagtatcaaaaagtccaagagtgtatg

SEQ ID NO: 786 - DNA, 463 bp, Rattus norvegicus
  Genbank Accession No. AA925478
  misc_feature (1)..(463): n = a or c or g or t
tttttttttttttttttccatttcaagttttaataaagcttagtgaaacatattttatctcttgtgtttgttttaaccccagtacaaaaatacagttggtgaattgacaaaatggcttcatgtanggtttgcaggcttgagtttctctaacaacagggaaaacatgcttccagttggggctgagcctcagcacacagccattcttgacgcacatccgtgcaaacagggatgcctgagcaaagaatgaagggtgcacggattcacgaagtccaggagtagtaccaagccttctttaaaatctgataaggacctcccgcactttgtacactatataaaagatacttcggtttgtttcacttcagcttgaggaagtgggaggaaatggatgaagattcaaatactgacgtggagcaaatctccaaatggctcaagtttcgtattaaatagtttcattctttacatt

SEQ ID NO: 787 - DNA, 528 bp, Rattus norvegicus
  Genbank Accession No. AA925490
tttttttttttttttttagtggcatggtattctttattttgaatatttatgtgtaagactatacaactgtcataaaatggctaatttttctcttttactataataaaggttcaaaatttttatgccaatttattcaccacaaattattattaagactattaataaatgaaacttgaactttaaaaaaatacaggatgcatcttgattagcagaatttgtattagatggactgaagtcagtgagaaaattctcacataactatgacatgtcagaaaataattattcagaaaaaaatgtaaggctccccagtggtagtgttacatgtgagccagcaaccttcaggctgcaattagccttcagagagcaaaccaacggctgctctgagtcagggaaagaacttgtccatggttcacatctttattttcttagcttttcaagcaaataatcaaccgtgataaaccagtaggaatcccgcctgtaaaccaccctcgataggaagccgaactctttggcgggcgctatgacatg

SEQ ID NO: 788 - DNA, 489 bp, Rattus norvegicus
  Genbank Accession No. AA925540
tttttttttttttttttaccgtaggtttatttttattcaaaaagttactgtctcaagacataaatacaaatcagcaaacagtacaattaggacaatagaatgtggaggacaacaggttagagtaatagagaaaacattttagctggttcaaaacaaagctggaagaactgctttcacaaagaaatactcctttcaagagtgagaaaaaaatcaacttaggtttcaaatcatatatacagtcctctcagcagttgtaggaaatgcagtggtgtgtaaaagaacatatgcaatacgtttgcacataacaatgtttgttgatggaaagtatgttagacaggtctggttttatttgttaaccatgaattaataaaataaatgtattttgtggtctttcatttaacctatggttttttggctaccacagcccaatgcttgttgatttcctgacttgataaaccagaaaccttttggaattcacacatctgaaga

SEQ ID NO: 789 - DNA, 598 bp, Rattus norvegicus
  Genbank Accession No. AA925541
  misc_feature (1)..(598): n = a or c or g or t
ttttttttttttattttccaaacaattttattgaaatgtgccaagatacatgggcagcacaaatgtatgaacaggaaaaaaagaatcacacatacagttattttaaaaagtgaaggttaatcttgggagataccagttcccctccccccctccagagttccagcatttgttgtggttaagcctctactgacctagcatttaaatggaaaaaaagaactgcaaaaataaagacaaaacaaagaaaccaacagcataaaggaaagaaacatcttcctgctcggatggagtcttccttcccagcatctaattaggaggcgtgctgtgcggtggagaagcacaacttcagagtgtatggatacgggccatttgggtttttcatctggtaatggttcaggaagcccaaggtctccagggcgtcattcttggagtcncactccagcagcccagaggagctacgctcgcttttgcctgaaaatactttcacagaggttggccgcttcactcccagttcatcgcagatctcaaagaagttctcctcagtcacctccaagggagcattgaagaagtgcagaacattgctaaggtgctggatgcggtt

SEQ ID NO: 790 - DNA, 485 bp, Rattus norvegicus
  Genbank Accession No. AA925542
tttttttttttttttttcaacatagaaaatgatggagtttagttaaaaaatgcacacataaaattacagtcagaaattcacacgtaaaatttagtgtttgcatagcaagatgtgattgccttacagccaggcagaagaatataaacccaggtgcgtgtcttataataaacaatgtgttgaatgctgagaaccatacactgctaaccaactcctgtgatgatttatctctctgtgaatcataccaactgcttagacaaatcaaattcccagcccttttcctctcccgtataaaacggcagaaataaggagcctgtgtcaatagcaaatgcctcatgggggaagggcttgtgaggccacccatcagctagcttcatggtcacaattatattggctcttccattggaaatgtttgtgatgaaagctttgtcccttaagaatgtatctcctgtaaaccactgctggtcagaaattaatcatcgctaacc

SEQ ID NO: 791 - DNA, 621 bp, Rattus norvegicus
  Genbank Accession No. AA925554
  misc_feature (1)..(621): n = a or c or g or t
tttttttttttttttttcaagtttcagaaagggtttatttgacttacaattactggttaaagtccttcatttcaaggaagtcagggcaggaacttgaagcaactagttatactcatgaataaatgcatgcatggagagtgctcagcttgttcttatacattccagattcctttgtgtagagaatggtggtgcccacagtgggcggtcttcccttcacaattaacataatcaagccaatccctctaagacatgcccagggaccaagctaactgacacaatcctgcactgagaccctcttcctaggtgatgctagattgtgtcaagttgacaaagctagccagcacatactccatcaaatatacgtagaaatatgcaaatacctctcccctaaacaaggcactggcttgatacttaccatatccaaactttgcttcaaattattaaggacctgccctacttctctattttccatttacattttaacattccttaaagtctagtttagtatatggcacagagaatatacaanacaatacttgaaaaccacaactgcttcagctagacaggggaagaaaattgtatttgatatttcagaccaatagataggactaaactcaaata

SEQ ID NO: 792 - DNA, 424 bp, Rattus norvegicus
  Genbank Accession No. AA925556
tttttttttttttttttggattgaggtaaataaaaaagctttatcctgcaacatttggagataaagagtctgtgcccctcaaaatcccagcccagcccatccttcacatcagactcttccggtattgactgtgctgagaggtctgtctgaggtgggagtccggggtctgcaggtccatctgtctgtacaggtctctcagctccctgacttcctgcagcactctcttcgcctggctccagttagacgaagcctctcccagcagcctctctgtctccagcagcagctgctctgactgggagtcgggtggagaccgtggggggtccttggccttccatttgccatctcccagtccctgaacctctgccagcagctcctgagtcttctccagtttccttgctaccaagtcctggatccgggacagctg

SEQ ID NO: 793 - DNA, 499 bp, Rattus norvegicus
  Genbank Accession No. AA925603
tttttttttttttttttgggttgcttggtttttattaacagtcacgtttgtatatgggaagagtttcacagatcaaacagggagatccaagcacactcagggttttgactaaacggatactattactaacactgctcacggaggcaagcctgattctacctccaccggaaccacctaccctgcattctcctgggtccattttgtaccctagtgtcatgaccccagcctcctttaagactaactatgaatgcctccacccacatctgcccctccaatcttatcatattcctcaataagaaatatatttgatgttttttctttacttgacgaagtagagttattattgcagaaatgaaaactcaatgaccaactttaattttaaaactagaaaagaagaaaaaatgtcatcaataatgaacttgggtagagtacaacaaggagtatgagttattttcaaaggcaacatatccctattttgtacatatttgcatataaaagt

SEQ ID NO: 794 - DNA, 452 bp, Rattus norvegicus
  Genbank Accession No. AA925664
tttttttttttttttttgaaaatgtactaaaatttaatcatccataaaagctgtaatttaatctgacagtaaacacaagaagcaatattagagttggtttagtatagtatatattttagctttgaaagccatagaaatcagttatcccagtgtttccctataaaagacccatttttccaaagcattattcacaaacaattttaattagaatataatgacagatgatattttcataatttttaaatataaaatgaagtcaatgactcaaaaaagttatctgctgcaatgagtttgaggggagatttcataatctatatcattacagataaaaagtatgacggttcagctttttagtgcttggcagggaggagtcatgataaaaacgtcaatatgaaatcatttgattatagtagtaacatctaacatttgaaatgcatccatgctcttctgta

SEQ ID NO: 795 - DNA, 337 bp, Rattus norvegicus
  Genbank Accession No. AA925767
tttttttttttttttttaaggaagacaagtgtttattttggctcgtggttccagaacagagatgagtccattacggcaggaaggatgagagcacacagcaggcatggtggcagggatatgaaactgagaaatcacaccttgaagatcaagtatagagcaggaactaatcgggaagccaggcgaggcttttaactcttaaagccctccttcaagggcatatttcctccaccaaggcgaacagactaatgattcacaggagacaagaaggcagtccgattccacactactcagtacctggtgtcagttcaagtttagtaagcaatatatcacatattcc

SEQ ID NO: 796 - DNA, 401 bp, Rattus norvegicus
  Genbank Accession No. AA925826
tttttttttttttttttcatttaaaaaattatatttaatatagttccataatttacattgcttactggatttgcatgctctgatgcaaacctatacaatattttctttagatgagcatcatactgcattaagaacacaggctttattttataaaactccggtcttacttgcattcagctacagaaagccaggcactaaagcatacccctactaccaattaatctggctgtttccttaaaaattaaaaagaactggagccgaactgactgtttttaaatagaaaagaaaacacttcaaacgattcatttatgcactaagctactcatttaccttaaagacaaaattgtgtaagcccagctctatcaaacagaaaatacattgattcctcgtgccgaattctt

SEQ ID NO: 797 - DNA, 364 bp, Rattus norvegicus
  Genbank Accession No. AA925849
tttttttttttcctggtcaaccgggaatggatttaatgggggaaaaaattacaaaaattgggtggcaaaaaaaagggatttggccttaaaaaaaaggggggccaaaccctaaaaacccaaccaaggggtcggaagggttctttccaacaaaaaattaaacctttcaaccaattccaaggtggaaaatccccgggaaggttcaaaaccccccccccggggggggggggaaaggtttccaaaaaaaccgtcgcccctttaggagttcaaaaaccccttcgggggtaaggatccggtcaagggccctgttggaactttcaagttccccccccgaaccaatcaaatcccgggaaaggaatttcaaagt

SEQ ID NO: 798 - DNA, 440 bp, Rattus norvegicus
  Genbank Accession No. AA925854
tttttttttttttttttcagacaatgtaccattttattccttataaaatatatttcatatcattgctgtaaaaacattacatttcatttcacatttaaaaaaaatcttaacagtaaaaataatacttggaagacagcggggaggggcgggggagaagcgccaataagacaaattcacagatgggattctccctttttgtgttgttgtttcttgcccccggtaaaatcagaacctggggtgatcagaaagtaacagattttttttccccaccaaatcagtttccgtatccaatttcatagggtcctctaaggtgtcaagttatacactcactcccacaaggcggccactgctcgaagtgctgtctggagcagcaacactgtcttcaaggccaggtgaaaagccttgtacacccaagccttggttcccagggagccctttgg

SEQ ID NO: 799 - DNA, 470 bp, Rattus norvegicus
  Genbank Accession No. AA925868
tttttttttttttttttggcattcaaaaagctttaattcaaacttgtcaggcatatcacaaagactcatagattacaactggatcgaataacccattctggatctgaactcatggctacaatcttacagagaacatgggaacaaaaaatataaagtttatataacatggtcctggggaaacctcctggacctcaaaaaggagaaccatgcttcattttcacaaatctagacacaacctgtatggaaaatgtaattgccagacaaaattgagtaggcacaaaagcttgtccagcttccaatggatgaggccataatatggacaagatttcaccaagctgcatataattaaaaggcctcaaagtcttttatcaagtaaatcaacaggcacctgtacagatagatcctcttctttcctcaatgagttctttgggatcactcatcaattctacagagtaccctcgtgccgaatt

SEQ ID NO: 800 - DNA, 489 bp, Rattus norvegicus
  Genbank Accession No. AA925869
tttttttttttttttttgttttttgcatgagatttttaatgtttacaaagtaattcttctgctacaatattgttttaaagtaggaaatgtttaaaaaaggaaaatttataaggcatcaatataccctctccaaatttcaaggtttggattctgataatctgtacataatttggttaattactgataaagtagaaattacagtcatcgttttaatgagaaatgacttgggattctctggagctcttaattttcttataaaccagggaccagcaaaccgtttctgacgaagatcacagtagatacttagatacttgaggtgctgtgggtcatgaagtctgtgccatggccactccaagccatagggaacaagttccgctccactgcaggaaggctccataaaacattggtgtttgaactttagctgtcacatcaggaaaagttataaacactggtgcttaaacttcaggcaaccaccctcgtgccgaattc

SEQ ID NO: 801 - DNA, 531 bp, Rattus norvegicus
  Genbank Accession No. AA925876
tttttttttttttttttacaaagatagggtcatttattcatgttatattactgcatttcaaaggcaaaaatacagatgtctgttctgaatatcaaggtcagagacagccacccactcccagccccagtggtaaatacatctatacacatgggatatcaaaatacacacagagcatcacaggtctgtaacagcccagtgggcagccgagaccctgccaggctaaagggcagcacgtttcctttgcctttctgtgcctctgagctttcccaagggccctgccacacaggccaccacaaatatagacagagaaagacacagcatgggacaacagggtgagaattcccaagtgaaggaaatggtccctgccccctcaatcctccagcccccaacggcatctcctgggtcaggcaaatgcccaggcctaacaacagtgccttgggtgtgccttgggcctgaggtgccccaaagcatgctgggaggaaacggaaagaacaggcaagacaatttcccttgggtctgagaatgaacctc

SEQ ID NO: 802 - DNA, 475 bp, Rattus norvegicus
  Genbank Accession No. AA925983
tttttttttttttttttactggaagtaaaaagaaatctttattttcaaataaaattacctacaagagattattcattgatccactatgaatgagtctctcatcacatacagcacccaaaatatattttgaaaattaaaaaaaaaaaaagagaaaacaaacccacagcctcacctttcacacacacacccttcctcccaaaagccacacagcccacaccaaaaggcaaaggcaaagaaccaaaccaaactcagtacccacaccaaagttatctttgaattaagatttacaaatttatttattctttcctatgaaggaacaaaaggaggaagaaaaagaaaaaaaagaaggggtaaggaaaaccatgaaagtctggtgagacctaggaagataagaccctgcctgcctgcctgcctgcctgcacgctagcaggtgtcgaagcattcagcacttcagcacttccctcgtgccgaattc

SEQ ID NO: 803 - DNA, 521 bp, Rattus norvegicus
  Genbank Accession No. AA925986
tttttttttttttttttgaaatgacattaaatctttatttgtacaactcaggtataatcacatacacaccacaaacttgatcccctcattagttgtctgtgtgccttgatgcacctgtgacaaaatcatatgtaaacctagggcaagagttaacaagaaatcaaaatagcttccccaaaagggagggagagacagggaaatcaataaattaaaaaccatagctctcattttataaaaaaatagtttggataatctttataaatctttcatgcttacaaaagcaaaaaagtacatttaaaatagttattttttaacagattcatttgtacaatacggttatagtcagaaaaactcaaagttttagtagtctacattttctttgcatctaattccacatacatttttacaaatttacaattcgaagtgagaattaacttccaataatgttaaacgagcttgttagtacctggatagtaagcttggccacacttgatacactgtaccaaaacgttaactacaac

SEQ ID NO: 804 - DNA, 498 bp, Rattus norvegicus
  Genbank Accession No. AA925994
tttttttttttttttttcacggagaacaatcccactttattaatacatcagtgtcacagatgtgcccagtacagccagagtcctgaacagataaagtgctactgcagggacctggcaacaggaggagggagccagttcatctcctccaagtccccagcctgaacggtatttctactacacaaaagtaagggcagctagtaatccagtctatagatactctgagctaagaacagaaaaccatactagtgggctgtgtgcagagcaagaaaaaagggaagtcagaaggtatccatcccttcctcaaatggaacatagagataccaaacaattgtcttcaacttcctggatgtggtgtctattaaggaatgagccaggtctgctactccttcccagggactcagaaccatgatgtagacactttcttacacctaagaaaaagtaccattttctaactatgaaaaacttactgaccttacttcgccagccccccaaaagcaa

SEQ ID NO: 805 - DNA, 498 bp, Rattus norvegicus
  Genbank Accession No. AA926036
tttttttttttttttttgaatttaaatcaagttttattatggaaacagttaataaaaaacaaaaaaaccttacatggccaacctgaaattgggaagagtttggaagatgcttccctgtaaagggagaagtgatattcaccctgagttgtacatgaggtcagccgtatatgacgtcattcggtctgtgtcgagaagcagctcttcagttctgaccacggtagggcggaattctgggcaattgacagagcagaatgcgtctaacaacaagaatcttgtcctgcaaaatgagctgctcacggactccgatcatggcatcgcccccacagtggaccgaaagtacgaagcagatattgctgctgtgaaagcgccattttatccacagagcagcgtgtcgccctcaggagagcaccagtggccaaggcaaaagcaaacactagagtccagtggtcagtgactgtctgaagccttaacaaggctatgtaagtactctaggaagga

SEQ ID NO: 806 - DNA, 545 bp, Rattus norvegicus
  Genbank Accession No. AA926037
tttttttttttttttttggttggtaaaatatattttatttgttcatacaaagaaaaagtatgaattaccagaatttcattttcctagaaacatctttctctgtgtaaaattaatttgtgttatacataggacaaaatacttgatttaattttttttgtacatattggctattctaacatccacgttatagaagacatactgctagaatttgcacagcgttttttgattactggggtgaatgaaactcaagtcataaattaaataaaatgttataaaaatgaaataaaaaaactaaccacaccttcaaaattcattaaccatttttatggaaaactgaaaagagaattgaccccctggcatcctcatcaacaacctttgatactcactgacttggagccctccagtcctgaggagagcagccaggcaggatctgcaactgggtttctcccaaagactgaagagtgtctgtcactcagattgactcccaaagagtcccctccccccagaacatctctccaccgccaatgaagagttcattccatagt

SEQ ID NO: 807 - DNA, 534 bp, Rattus norvegicus
  Genbank Accession No. AA926066
  misc_feature (1)..(534): n = a or c or g or t
tttttttttttttttttaagacaaatacatgtttatttatgctttcaagggctagaaagaggggactaggctatgcagatgcaaatgtaagtcgtggaggctttgacataagtgcagcactcgaacactgatatcaggaagttgctccaagtttttacaaacgtaaggagtagattcatttgaacaactgtgtttcaggacactggagagaaatgccttgcctctttcctcaagctgggagcagcctcatggaatccgtctttttagtttcttcacattctggtctcctctagaggtcgattcatgaactcctgaatagcttggtccaaaggaagccattttttgatagatgttttcaaagctgcaatccagcgctgattttctgttttaatttctgcacagaagtagaaagtcttgaactcctcggatgaaggtctgagctcaatcaccggttgctcaaagccgtgggtttgctcgatcacgctgtacccttgtaggtanaggccacctgcacagggtgaaagcagggaagac

SEQ ID NO: 808 - DNA, 580 bp, Rattus norvegicus
  Genbank Accession No. AA926067
  misc_feature (1)..(580): n = a or c or g or t
tttttttttttttttatatctttaccatttatttcttaaaatcttattcaaaatattaaataatacaatttcagatatgaaaaaaactactgcaataaaacagtccagatgtgtttcaccacagtgcccttcccagggacagccaacgcccctgaagggggaagaccacgctgatgcttccgtgtccacgcagggagcatggctgctggccgccccagctttactgagcacgcagtaaagaccatgttttctggaaagttgtaatgaagcttgatagtcaagcatggttcaaatcacacattttcattctgatcaactctaaaaaaacaggctaccataaaacacagcaaataaccccagctgctgggggctggggaggaggcaggtttgaaggtcattgctacataggcctgtgtgaacttcttcccactactgctttaactgcaggaccaagacacagtatcacttaagtaacaatgggctggagagtctcctccaatgtactgtgatcaaganacaaagtaagagacctctgacctgttttacactccgctcgtcatnctgaacctgggacccatgc

SEQ ID NO: 809 - DNA, 558 bp, Rattus norvegicus
  Genbank Accession No. AA926080
tttttttttttttttttaactgttcaattctttattagtgtacatgtcattagagttggcattcaactactaatacaaagatagatacctacagtaactcaatcaaagcaaatgagattaatgagccctgatcaaaagaaatacatacaacttaaagatgaaactgtaaaagttacatacacatataactaatagcactaggaatgtacagtatcagtaattggaaaaataaatgagtaattcacagtcatagaaattattttaatattactatgtacttttccttttacagacaaatgtgacatacacacagttctacctcacacaagacagagtagaaaactaagcattacttcatttaccccaaacacagcactaactgtgccacaggtaacctggtccaaaatagtcaattctacagataggccatggtatgaaatacatggccactttaacggtttcaagaaaggcatatacttgcagaagtccgttaattacacaaatatcagttgtataaataacaaaagccatcagcaaaactgttaagctcaaatgttc

SEQ ID NO: 810 - DNA, 367 bp, Rattus norvegicus
  Genbank Accession No. AA926088
tttttttttttttttttgattgaagagcgtttattgtcttctaagaggacaactggaaacgtgtctatcagacgcgacaccatcacttcacaagtcactagaacaaggccactccaagacagtctacatacccgtggggacgctggaccctgtggtggcgttagaggggaagagggtttaaaaccacagggcagaaggggagaggccaggttgtggacacgggtgtttgctcgttttaactcttatcagaactgcttgtttgggtttggcgtggtacttcagacacattcccttgtaatgttaagggaggtgcctaaggtgtggtgcatgctgggtagtgttctacctcacctccaggtcctcacag

SEQ ID NO: 811 - DNA, 369 bp, Rattus norvegicus
  Genbank Accession No. AA926089
tttttttttttttttttaccacttaggacattttattggcatatgacaatttacaagggtccctgttgaaatatacaccacactgaggaagaatcgtttagccatctacattcattctcattggatattttcccctcaaattataatttaattcccaacactgattttaactgtgacgaaagggaacaataacaattctttgaaatagagtgcaactgggaaagactttgctttttatattaaaattcctaagatgttgaagcatacaaacctaagaattgagtcatggccttctaaaaactgttttcttattttttttttctggaaaaatcctttggttcctttttatttcctttctccgggtaaagg

SEQ ID NO: 812 - DNA, 425 bp, Rattus norvegicus
  Genbank Accession No. AA926098
tttttttttttttttttcatttggcaataaatatttaattaaaatgtacgtgggtgacagattcaaatatggttaagcagtgagaaagaaaaattcaaatttgtacggacccttcaccacccaatcttatcttgccccagcatttagagtgattaagcccagctcttcttaaaccactgtctttagtttcaagccaacgtcggttgttgggattcttctacaatgtcatcggcgggtacccgtacctggggcgaccttgtctgcgctgggtgcagatgctgctgcggcagcgttcctagcccgaatgtgggaggccaaggcacttaacatttcctgagtggtgaggtgggctcctcgcataatcagccgatacccatctccgaataacacgtccacgcagggctcagagccgtcatgcctcacgt

SEQ ID NO: 813 - DNA, 437 bp, Rattus norvegicus
  Genbank Accession No. AA926109
tttttttttttttttttacatcccaaacaggtctttttatttaacataaggccaaagaagctatcgggcattgctgaaaactgtcaactaactgtacaaaatattgactgcatgcctcgcaaacaccggagtatctgctggaatggaataaaaataaataacttctgctataaacacatgaaaacatatccaaccattacccctttaaacatatcgtaaataaaaaattaccagcacttctacaaaataaatattaagaaaccattgacatagttgaaatgcactcatataaattaacaactttaattacattacccaaacagacatcggttaaggaattgcatgaagtatgcaagggaactcacaaaataaaaataaaaaaaaacaaacaaacaacatcaaccacataacataaaaggttttaaaacaaaacagat

SEQ ID NO: 814 - DNA, 314 bp, Rattus norvegicus
  Genbank Accession No. AA926129
tttttttttttttttttgatataataagtatatttgagaagccagagctctggggatgacacgtatctcacacaggagacagaggagtcaaccccgagcccaattaggggaagggatttatagggaaaactacatggcctcagttcaactctaggccaccctgcttctggggcaagctgaccctagttcttgttttcctcagaactgttgtgtcaggccttatcgaggccagatggtttgtggtggctatagccaggctacctcaccaaaacatgtgatgctattcttttgggaggtgcacttgtcctcacagc

SEQ ID NO: 815 - DNA, 406 bp, Rattus norvegicus
  Genbank Accession No. AA926193
tttttttttttttttttactattcaagtttgtttatttattagcttattaagccatcttactgatttgtactgaatagtggagaaagtatacactggacataatatgattttgtgaattgtaaagtgatgtcagtaataacagagtcggtgtcacagtccttggcatttacagtttgctttctgatcttcctttggctggattgaggcttgcagacagactcctgtccttgatgtctatcttctcatcttgatcagagttccatgcagaagtttagagaggttccgtccatcttttgctcatagatttcatcaaacctctcattctgggccacagtaaagtggtttttccaatcacccacaattccttttctcatgaaaggggaaatggactggtccatgatagtc

SEQ ID NO: 816 - DNA, 421 bp, Rattus norvegicus
  Genbank Accession No. AA926262
tttttttttttttttttaccttatagcttgcatatttattgaacaaatacgactaaaatagctaaaatacattgggtacttatggaaggaccacatgttacaaaagcctgcgttttcagcagcgtacaactgcaactctacgtaaatgccacaaatgcacaataccgtttccttgctctatttacatagctgatatatctaccctaacagaggtgggtcaattacagttttgtgattgctcccgctaccgtgactgcacatccacccagggccagtcacgagaggacagcctctcacactcttggtagcatccgctcagcctacaacactgaagaagaaagccacactcaagacacaaggaaaacaagtcagtccagtctagagaagaacattccgggaaacagagtaccaacaccttctt

SEQ ID NO: 817 - DNA, 439 bp, Rattus norvegicus
  Genbank Accession No. AA926292
tgtttttttttttttttaaagggaacacaaaagtaaataaaacaccaccagaggacaatgtcatcaaagtgcaggtgcaaaacctgaagcaatcccatctctgccagcccagacttgccaccaaaccccacaggtcagtcttttcatttctcttgattcggaaacaaatcagcagggaggacaaggttcttgcagacaaaatcaaaatcaaagctttaggttcaaacgttggtagtcactggcctttggcctccgagtgactttggatctttttccttccagggcaaaagcaataatctttcgtttgttgtggtaagcaatatagaggacagcaacaagaacagcagcggtcaccagataagcaaagaagtggctgctttctgcactggtgtttccagaattgtccttataatggtcatccttctcatccttcatagaa

SEQ ID NO: 818 - DNA, 457 bp, Rattus norvegicus
  Genbank Accession No. AA926328
tttttttttttttttttgggacaattagggaaataagttaaaaacaaatttattattcaaattccagagggtgggaaatttgaggttgcaattctttcttcatctactgggccctattcataaaaacatcagtaactaagagcaggtaagaatcacaatttcagagtcaaactggtttagcaatgtctaatgcatatgagtaagccaattaggcaaatgtgacaggcttcaggcagcacttgtaagctactcgaatgagatgacatcctgctgtccactgctttaattctcctcagcctgggagctgaggcaaaatcaaggtaatgagttgtaagggaagagggtttgtggcaccacacgtgtgatttcatttctctggaaaccacccccggcccaccgcacttcatctgaatgcaggatttgtttaatttgtcccaaaggaatgggcctcgtgccg

SEQ ID NO: 819 - DNA, 207 bp, Rattus norvegicus
  Genbank Accession No. AA926354
  misc_feature (1)..(207): n = a or c or g or t
tttttttttttttttttgagagtataagaggagttttattttacttttttacaacagaggatatagggcagaaaagagttagtcagagttggagatcagggggaattctgggaggatctanggccccatggacttctgccttctgcagcattatgagagcagacctgcccctcctgctgtgaacccaccagtgacagtggcttctgc

SEQ ID NO: 820 - DNA, 516 bp, Rattus norvegicus
  Genbank Accession No. AA926360
  misc_feature (1)..(516): n = a or c or g or t
tttttttttttttttttattgtaaaaactcttgtttatttcctgaatgaattttggggttcactaggtattgtcagaccatactccttgacaaaattaaaaggtcttgttttatttatttaagtgtatgttcatgtgtatatggaagcacaagcatgtatgaacatcagatgtcagaggtcaaccctggctacagtttctcaggaacactatctaacttgattttgacacaggtaactcttcgaagtgatacttgttcacttaactatgatggttgaccagtaaacaccagggatccacctgtctctgtctccccagtgctagaattacaagtgtgtccgcttatctgtcttgtttttctgacacaggtcctgaagactgacctcaggtcttcttgcttgcacagcaagcacttttgcagctgatgaatctttgcttctccctcagttgttttatacatganataatcgcactgtttttctccataatgaagtacttccatggagcataaatgctt

SEQ ID NO: 821 - DNA, 512 bp, Rattus norvegicus
  Genbank Accession No. AA926365
  misc_feature (1)..(512): n = a or c or g or t
tttttttttttttttttgcacagaagatcatcatctttagacagggaacaaatggctgggaattccgcctggcccgagctcgcggctcctcagggccaagctataacaaacataagggacacaaagcagggaatcatcagatttggtctcggaggtaggggagggaaacagcaggaatccaaatgaggacagcctgggtgactggactgggagggaaggcacttggctcagtctcctgttcccacccgggcaagagccagttgctcctcaaccttcagtggcccagaggctgctcctggttgagcctgtggaagaagcttttgccaaactcgtaagtgctgatcatgatggcgcaggagggcgcagccttgatgatcctgnggaggaaacctgcaaagagtcccctggtgccagattcagcctggattctccgaagcaggagccaggtggagtcaactcttggcggcttcactctcatagcctccactgctcccagtgacatttgtcgctgt

SEQ ID NO: 822 - DNA, 400 bp, Rattus norvegicus
  Genbank Accession No. AA933158
tttttttttttttttttgctctgtagtttttgttttttatttttatagttttaagtttttcaaaacatagtttcttcatgtagccctggctgtcccggagctaagctctgtagagcaggctggcctccgtctcaggtctgccggctgttatgcttttatccacacatcctttactgggtatagaggctggctgcgaagacgatgtccctccggagcaaggtggctgccgtctccatcttggcccctaacacaggctctcctaccaaacgggccgcccctcgaagtgagcggcacatctcagccaggcgctggatacagcggacaaccaagccttcgggggtccccgagagccctgccaactcggagaagggcataccccgagcccactcataaacaactt

SEQ ID NO: 823 - DNA, 587 bp, Rattus norvegicus
  Genbank Accession No. AA942670
  misc_feature (1)..(587): n = a or c or g or t
acctcgttcactagcagttctgtgatgcaaggttaccacacacagttagataatgtctgcattacacatccagggctatacagcaaaagaatcagggttagtacaaatacaagaactgtatttacattttgtatactcaagctccaaacattaatatttacaaaataaaacatgagagtgaatccagaattaataatgtacattgttgcttgtgctcaactccttccctggggagagatcagtttgcaaagtcttggttcaaaaaggccacttatgcttcatggattctgttatagcatggggaggatgacgagagactggactctcaacagacaagtatgtcagagccacaaagtctacgacaatgcttagacgtgaggaagctggtggatccctcaggtgagctgatgcctgaatagacagcatgagaagggtcaactgacgacatgacaatggacggacaacatccagggttggcacctgcctctgcctgactgtctgtctgagcggccgtctaccgtgaggctctctgatctgcangactgtgactgaacccgaagcatcacatagaactgccaagtgctcta

SEQ ID NO: 824 - DNA, 609 bp, Rattus norvegicus
  Genbank Accession No. AA942697
aacaaatcctaactttatgtatgatatatatttaaaacaaaaaaaaaaggcgagaacgacatcaactatcgaaaagctgactcggaatgcgtcatcactcccaggcagtcttctccctcgcttgccgattctgggatcactccttccgcacagctcccaggagacccgacagtctctcgatgacttgttcggaaccgtccacaggtaagcaggtcaggcgatacacccaacggagaatggtcgagaagcaggagtcaggaggatcggtccacagatggcagatggggaaggctgggaagcgctcgcctcagttctcctccggcttgtccgccggcggcccgctgggctgcagcattttctccatcaggttgaaacgcacgcgcgctttgctctcattctcagcaatggcgaagtagttgaggaggtcgaagtgacccatgtaggagcagtaggaatcccgatgctggttcacaagccattcccacttggtggtgtcggcgtggcccgtgccgatgtacttggactgcagatgctcgagctggctgtggatggtgtaccggtccgtcatctcgccgctctgttcttaggcttcgaggtcaggccacagat

SEQ ID NO: 825 - DNA, 588 bp, Rattus norvegicus
  Genbank Accession No. AA942716
aatgaaacaaatccaaaagatgtacagtcaggctcacgttgtgcagttcacaagcatggaagaaacaaacagacagaaggacagagttccaacagaagaagctaacccaagaccaggctggacttgccgccaggggggtttctcctggatggcgctggggccggagccactgggctgggcacaggagcagcgggcaccggcttctcttccacctgtgccaggctggcttggaagtctgtgtccacattttcatgcacatcactttctcccttgaggtctaagaaatctccagagcttgcttcagaagagttacttctctgtgttccaggcgactccgaatcctccctgccacctgctgacttggcccaagatggggggttttcttcaggtgtcccaaagatgttagaagccatcttgttcttcctcacgggctgttctgttggctcatcaaaacctaatgaaaaattggacccaccacctggaggccgcaaaacccgggagctgttcctgctgttagggtctacacccttgaaggtggtggcagtggtcatggcgcaaaggggcgaggtagactggccctgaaaacgc

SEQ ID NO: 826 - DNA, 323 bp, Rattus norvegicus
  Genbank Accession No. AA942718
cacagagtcacagacaccatttattactgaactgcactttcaccttcacacaaactatttcaaagagctggaaaaagtgtagggtgaggggaggagagggacaggtgcctctcagaagccacgaccctcagtgggcttccccaggcagggcagggacggagcgtcaggctgtcagtctctgggcaccagctctccacgggcacgcgcacagcaagccagcagctcctcatacataaatacagacacgcttaacaaaaatagtatatcatcttcacaaggaactaatgactagtctcacatatgtacagcagagatcccggggt

SEQ ID NO: 827 - DNA, 550 bp, Rattus norvegicus
  Genbank Accession No. AA942770
acaatgttccctcataatgcaagacattttggacttcacatttttaagccagaggccactcctgtctgtttctttagagtggtcactttagaaagcattgataggcggttgttgaacgttgccacggaaacacattcaagatgttggtggtcttctttgctgcctgctttgggttaaaatcaacatgaagcacacaaacagaagcatacgtacatttgcagcaaaggccgctgcaaatacaaccccaaagagaggtggggctcagcgatccatctcacagcaatgcagggagcctttgtgcctcctgcacaaaattagcacattcaggggagacgtgtgcctcacaaagggccatgtggaaagagttattcactctcatccaaaaatgaagacagtctgagggacaaaattgttcatggactctgctcccaacgctccccccattccccaaacaagccaatgctcaagacacctaccaaagccatgggcaaacttgaccatgagcaaacaatatgaatgagaacagaatgacgtaatgccgttgtgcctg

SEQ ID NO: 828 - DNA, 522 bp, Rattus norvegicus
  Genbank Accession No. AA942774
attctccacagagttcctttctacagctctacagtataaatacacagaggtgaccttctctcaccaggacaaaggggtacacctcacctgcttggtccccactgccaaaccctcactgttctgtgtggggcccatcagcagagagtcactcatgcggctcaagtgtgcgcgccaagtccatgcttgggtagaaacagctccgctgctactgatgcaagttcctgaagatctgccccaagggcggtccatggctacagaagggtcgcaggcagaagcccctcatcgttttcatcccaccctgtgctgcatgctcccaggaaccatgaaataaataaataaatactctgaaaaagctctgggggaggggcctgagccagctcatggcttaagaagaggtgcagcgcccccttggcagagaagagggaacataaaactggccatgtgccctatcctacgatgtaaactcctctctaggaacagccctgaaatccaggcgatccatacttcccccaacctcaaagg

SEQ ID NO: 829 - DNA, 520 bp, Rattus norvegicus
  Genbank Accession No. AA942812
gccttaatctacaacatcacaagagtagtcatcctttctgctgtctctggggttataagcgatcttctaggattcaacatcagactgtggaaaattaagtcctgagctgagatgtgcgcctggactcttttcttggctgctgtcattgctcacccactgaggacaaagatggctcacagaaaccagtgaccccacctgcaggctcacgtgcagtctaactcagcccagactaacgaatggagtttctgcacatcctttccctgggcacgtgttaaaaacctgcactttcatggttctcaagcaacatgaatagtcagcaaactaaagcctgcctcacagagactcgggactgtttcgtgagtcaggacatttatcttggagcctccggtactgtgctagttatatttactgtaaatagtcttttgggtaaccatggcagatgcccaaagcatgaagcaactatcttttattgggaatatgcaaatgcagtacttttctattatagtctatggattgggga

SEQ ID NO: 830 - DNA, 503 bp, Rattus norvegicus
  Genbank Accession No. AA942889
atcgttgccaaatatctgaagagggctgtcagaaaccctgacgatctggaagcaaggtctagcatgcacttggcaagcgccttcgctggcattggcttcggaaacgccggtgttcatctgtgccatggcatgtcttacccaatttcaggtttagtgaagacatacaaagccaaggaatacaatgtggatcaccctctggtgccccatggcctctctgtggtgctcacctctcccgcagtgttcaccttcacagcccagatgtttccagagcggcacctggagacggcagaaatattaggagccaacattcgcaccgccaagatccaagatgccgggcctgtgttggcagatgccctccgaaaattcctatttgacctaaatgttgatgacggtctcgctgcccttggttattctaaggatgacattccttcactggtgaaaggaacactgccccaggaaagggtcacgaagcttgcgccgcgtgcccagtcagaggaagattg

SEQ ID NO: 831 - DNA, 373 bp, Rattus norvegicus
  Genbank Accession No. AA942929
acaaaatgtttcactcacagaaaaacacaaggaaacctttatactttcatatttgtgaatggaactggtctctcagatacaaaataatttacaaataatccatacaattttatttttttatagaaataggtcattattacaacagctgtacaattcactacacttcctcttataattacataaaatcttctctttagaaacacctcgatgtaacaaaacataaaaaaaaaaaaagcaaagtgcattctgaaaaggaaaatccgatcttcggaatcatcggggaagatataccggaagtcatggtggcctacctcactaggaaggccatcacatgcctggtttcctgggagattcggcctgcggagtacccctg

SEQ ID NO: 832 - DNA, 492 bp, Rattus norvegicus
  Genbank Accession No. AA942961
ccagagtccagcgctgtgggcggttgcgggagagcggtgggctgtcagtgcgacagcgcgtttcttgcttcgcggcctcgtttcgcgctgcccgaagccgcgatgcctcagttccagacctgggaggagttcagccgcgcggctgagaagctctacttggcggaccccatgaaggtacgtgtggttctcaagtacaggcatgttgatgggaatttgtgtatcaaagtgacggacgatctagtctgtttggtgtacagaacagaccaagctcaagatgtaaagaagattgagaaattccacagtcagttaatgcgacttatggtggccaaggaatcccgcagtgtcgctatggaaacagaatgaatggtttgaaatgaagactgttatgttcttgggaagtaaacagcttttgaaactgagaaagtgttgggacggaaatatttatataacggagctgtggaaagctgggagatcagcctgtgtcctaaggtt

SEQ ID NO: 833 - DNA, 535 bp, Rattus norvegicus
  Genbank Accession No. AA943009
gctaaacaatactaaaaaaaaaaaaagtttttttccattttgaaggcagggcttgaattatttaattttgatccatttattttaattaaaaaaaaaaaaggaagggaaaagagatcatggccaaaaaaaataaaataaaaaaaaaaaaaatatagccccaccctactcccaaagctctagccggtcacatgagcatcacccacgtcccactcagtgcctgatattcaggtggtggcactttgccccctgagactaccctggaggtgcaagggcgacaagtaccagtttcggctctcaacaggttagtcaaaccaggcaaactggtgggctaaagtccagaaattctttccaggttttctgcccattggctgagcacatacaaactgtcagtagcttgtaagatttcaggggtaggaggggcagaagagcaggaggatggcagaagagaaactagaggttattcaagcttgttcctgggctaaaggctctggacatacttaagaaagactggggtaaatggagtccaggtttctta

SEQ ID NO: 834 - DNA, 546 bp, Rattus norvegicus
  Genbank Accession No. AA943020
aagttaaaacaccaaatttattggataatattgaactatatgcagacacatagaaaataaacatttcatatagttgtgtatcttttttaaatgttgcatttataaggacagacaaactaccaatttagcaattggagaaacttttaaaaaaacagaatcaacaacaccaacaaaaaaggaaaagcaacatctacattccttcatcaagacttggtgctgcatcaccatctataagtacttcttcagtttagataaataaatactttatctaccacagatttaaaattagaattacataaactctttgaccacgtagagttttcttacacaatgatgagcagtcaaacatgtcactattgagacacatgtatttgacttaacgtaatccccctgctgaaatatcactgtcaatgcacatttcatatgtgataaacaaaaactctattataaagagaatcttcagattttcacagttagagacagaggtttaaaaaaaaaccttacaacatttcaaacagaaaagacagcatgcatccactagcagaa

SEQ ID NO: 835 - DNA, 596 bp, Rattus norvegicus
  Genbank Accession No. AA943028
gactgttaatgaggacgagtcagtttggagaggagcacgcagtatttgcttggcgttgtcagccttgcaccaaggtcccatgcctgtcagcctagaatgcagggcactaagtaaagcatccctggctctcagctgccactgggctcctagtgtacaagatccaggatgagacgggactgtagataaagagaaggtcaagagtggcgaccagtctgtgagcttgggaagggccgcctgccccaagaagcctgcagtctgagcctctgtcagggaggcaagcttctgctcacctacaacctgagacctgtctttttgagacacaaatcagtctttccattgaaacgagagttggggacagttttttcaagtgggaacaggatgaagaaagtgaagtatgggttcaccagttggtgtagtaaatagaggctagcactgtgagaaccccactggcagtgatggcccaggctatgggaacccctcatgttcagaagcgtcagagctgggccgagctgaggacgaagttcatatgctctccccatgtcgcccatccatggagctcactggagctctcctcttcaggctcactgctgcctcgt

SEQ ID NO: 836 - DNA, 492 bp, Rattus norvegicus
  Genbank Accession No. AA943066
  misc_feature (1)..(492): n = a or c or g or t
gggatcaactgagaatatgtttatttaaaagcaatcttaaatattaaaaaagtagaaattaacacatacagtactgagaaactcacatcaaatacatgtgaaataaaaagtgtactgatgctccatggtaactctcgggtacgaatgtgggatttaactagtggcagtcataaatggtcttcacacgcctcactttatttttccccgtattgatttttctgggcagtggtacgggtgtctctggcagcgtgggtgtgaggtcgttggagtcctcagatgcttgcttctggatggcatctctggactgcacatttggagacagatccccagtgtgtgacctctgtgtgacctctgagggtggctgcaccttggccgacaaatcgctagcctgagactttgccagcaggtcncccagctgtggcttggggggaaggccttcatctgtggcttgggaggtaagtctgagagctgtggcttggngggcaggtcacc

SEQ ID NO: 837 - DNA, 605 bp, Rattus norvegicus
  Genbank Accession No. AA943110
tttgaaaaaagcatcatttatttcaaagtacaacacaaagttgtattttaagaaatacacaatcttgtaatgcaagacttggctatgtgcatttcagttcgctttaaaataagtcaggtgtacaaatgtgcacacctcaacacacagcacagaagctgcgtgtggttccttcccaccgggcgctctaccgtcagccactgctcttacgctggcttacatttctgtaatctgcttttaaccaagatagccttactttaaaaaaatactctgtattttcagcacaaagtcctcatacatttttaaaattagatcttggcgcataatattgtgaaattattaaaaaccaaacttggtaaatttagtaaaattgtcacatgccaggacttgtcaatcagttcaaatttctcccttaactgcaatgccaaatttgtgttcttatgataaagaaggcaggaagagacggtggggaactggaaagtcaagatttcagatgacaggttgtagtttgtggctgcgtccagacttttgtctacaagcacaacagcaaatctcagggtatcataattgcgagaaagacgtgagagaagcgagtggacaaggctgcc

SEQ ID NO: 838 - DNA, 612 bp, Rattus norvegicus
  Genbank Accession No. AA943116
  misc_feature (1)..(612): n = a or c or g or t
tatctcaaggaaactgcttgagaatacctactaaagttcagaatagaagcagcacattacgggcaagcagtaggcagagggagatattgtacaacttgtccattatcacccaaacaagttgtgtgtggagccttacagatcccttctgccaagaactagctcctgcggaacagtgttgagatgcgagccttctacgctctcccagagagccagaggatagtgctgaggtgggagagccagagaacagcattggcagtggaagctctgatttatttccatagctcctccagtggcctctgtgcagcatttcggatggcgtcctctgagagcgcacggatttcttcatggacatcctcaatgcttttggaagcatcaaccaccttccagttgaggttcttctcactcatgagctgctggaaacacagcagaacctgctcctggaacgtcccagtctcatagcgctcaagaccaaactctcccctcgaagcagcgtccagcaattgtaactgcaggaacaggatcagatcaggcttgggaaggcccacatctggttgtttgcaccantccaaggaaaaattctccttggcgctagtgaaggcaaccccagaaaac

SEQ ID NO: 839 - DNA, 522 bp, Rattus norvegicus
  Genbank Accession No. AA943149
ccagcattaacataaaactttattgaagatgcacaaacaaaatcaatgcaaaggacaaaagggagcctacttcgggtgaattggttcactgtcacttacggggagggaacagtaaaaatgtttcaatgtgggcagcaagataaaatgcaacacgtttcaggacaagtagtgaaatacattcattcaactcaaacctgaaaacaaacttggctaaatatcaatcaacattgatgatacagtatgatattcatcattcaaaattggcagctgaaagggttcctttgccatataaacaaagtggagataaagaatagtttacaaggtgtgttgctgctatgctacaaagccaccaagttattcctggctctttgggaacatccgctcagtcagtttggtcacaaactttccaaccttgactctcacctggaaatcatggtggctttcaattcccaggactttatcagcacacacttgaaattcttttaaaaaaaaaaaaaaaactctagcggcccggcacgaggc

SEQ ID NO: 840 - DNA, 229 bp, Rattus norvegicus
  Genbank Accession No. AA943229
gaaagtgtaaacattttatttggcagttgtttcgggacgcgtgaataaataaatggaaaagtacatatgaatatttcctcttggggtaacagataccattaaacgcttatttacactgcaaagaacagttacgtaatgaaactttggcctaaaaaagggaacttcccaaaacaatgggctgggcaattaagggtggggattccaagaataatgggtttaacaatcccaa

SEQ ID NO: 841 - DNA, 402 bp, Rattus norvegicus
  Genbank Accession No. AA943307
aatcagacagtatgcagagtatgtacaaccagtctgggtaaccctcccccacacctgggccatggaatgtgggatccccaggccctgccgagagctgggggtccccaaggcctctgcatagtcatccgaaatctacaaaacactgttaaaaagaaagaaaaggagaaaaccggaccgctgaggccaccttacacaaaggtccttgggcagttggagttgggtagggagaattgggtggcaagcttagactcgccaggtgcatggggagacttgggcacgagaccatgtctggggacagagtagggatgtttttacacgttaaatatggtcacaagggaagacacaggcacatgtgtacacacacacacagacacacacagacacacacacacaggggtcctc

SEQ ID NO: 842 - DNA, 423 bp, Rattus norvegicus
  Genbank Accession No. AA943494
ttttattacaagttagtgtttacttctctaactgagggtaagcgaccaagattgcaggtatgcagtagaggacacattctttcgtgccagaacctgtgttgcccttcaggctgaccggtcacacgtcccaggttaacagagcacacagccggtgtgtgttagcagcttccagtctgaccctcatccatgccttatgtttacttccccttcccctgggctgcctgtgatcaaaggtcccatcctgccagaactactttaggaggggacggggaaatctcacaagcccttacggccttagttgctttccgtgcaaaatttcttctagggagctgctggctctgctctcctcagaggctacaaagccacagagtccagatcacttcagtattagtgttttccttaaaccaagaagagcttttcagt

SEQ ID NO: 843 - DNA, 432 bp, Rattus norvegicus
  Genbank Accession No. AA943501
tattgataaatcagtctggatagggtttttgtccctgaacctagagtcctaagagaaaacactgattctactgaccacagacagagatggggacaggacacacagacaccagacacttggtagtgacagggcagagacctcgatgggctggcctggagggtacacactgtacatctgggtccagcttggcacgacccagtggccaggtggtggcgtctgcatggtagatgtgcagcctcatgccctcccgacagctgtacctgttaggagttggaggtgggagtggggtctggagccccagcttcagagttgaagtggacccccccccagttctgggctggcgttccctttgcccttttcaactcccaacttaatgcttggggcacacctggcctgggctaactccaagggttgcaactgtagcttgtgaaa

SEQ ID NO: 844 - DNA, 512 bp, Rattus norvegicus
  Genbank Accession No. AA943506
catttcaaagcaatggctacattggtcatacatattagaaaccataaaaaaagttaagaactaaaatgtacatcatacacttgtatatatatatttttttacagaggtaaaaaggcttattataaaaaaaaatcaatacaacaggggttttagtgtacaggtaaatgaattttgcttcaggcactttaatttgttaatgtgagcgaatagcttgggataagagtcagggaaacttctcaacaggaaaccttttggttaggttttgttaccacggatataaaaataaaatctgaataatttctctcaaatgattgacgtcagtatggcaaagctgactgggaaaatactacacaccgttcagctgcagtgtggcaattaaacgtatttacataaatgtccccatggctatctttgtgcccttaaccgctgccttcacgaaccaaaagacgatgatgcacggagtaagattcactagcataactcttaagagggtgggaaccagcaagggaaga

SEQ ID NO: 845 - DNA, 435 bp, Rattus norvegicus
  Genbank Accession No. AA943555
aagcttgcccctctggcagagcttctgtccaaagctaagagtagaagcaggattatgaagtgtccatcgcctgtgacatgggacttagacttgccacagaatgaagctacagggaaggacaccatgtgagaatccagggactgttagggttttgtgcttcccgatgaccctacctggtaagaagtctgtcatcagctctgtcagtttccactgccagctctgggcctgcagccccgcctcctctgggttgggaacgaggccttgggtgccagctagtggcacctgtgcacaagaactacatctacagacagtgggaagaagccagggctagctgtggctgacaggaagcctgtgacagccttgtgtgtggtggaagcagggcacatctgagctggggaaggctgacagcagcaacctgtagttctctggagggaa

SEQ ID NO: 846 - DNA, 618 bp, Rattus norvegicus
  Genbank Accession No. AA943564
  misc_feature (1)..(618): n = a or c or g or t
cctaggtcagctcccaccagtctgtctggtggcctgggtccaggccagagccatgacacacattagatgccaatgactctaaaggagttctgggacaggccagccagcatggctctagcacaatctaggtgaaaagtcttgtgaatggtggcacacacctgtgatcccggcacttgggacagtatggggatcaggaattcaaggtcagccttggttatataagcagtgtgaggtcactttgagtatatgatacattgcttcaagaaacaaaaattcaggactggagagatggctccttggntaagagcacttaggaggatctgcttttttcctagtacccacagcacttcagtaactaaagatccagggttccaacgctctcttgtgacctctgtgggcaccaggcacacacatggcacacatacacacatgagggcaaaacggaaaatacataagtctagacaacttcactctgtcgggggataaagctcccctccctcgggccagggctagctccctctatgcagccatccggaaacaccacacggcaaccagagttaaggagatgcttcctttggtataaatatattatatacatccaaaacatgacattaanat

SEQ ID NO: 847 - DNA, 522 bp, Rattus norvegicus
  Genbank Accession No. AA943588
tttattcaaaatgtcttttattgaaacagaatgaagagcgagaaagagcaaggtctgggaaaatgtctttgggcataggatggatcccagacctaacggttatagcgagatgctatccccgtcctgactcttgctgatgaagtgaacagaaagcagcggggaggagagggggttgggaatggcactctgagctctcctagatggcgtgaggcgccttggagccttttgtatgtacagggtggccttgcctctccgtctatcttgctagccagccctccgtcacctttctaaatggccagcctcccaccaggctcagaggctgcttagagggcaggattaggagtggctagcagggggacatggtcacagcggttaggaggtggctgcctcagcagggaaggccgacggcacagttccccatcccggagtacctctggcagaagcttgcgcttggactctggcagcagcaagatgctaacgatgcagaggagggcacaggccgccagtaccacatgctgcagg

SEQ ID NO: 848 - DNA, 500 bp, Rattus norvegicus
  Genbank Accession No. AA943610
  misc_feature (1)..(500): n = a or c or g or t
gcgggcaaagctttgtttagatgagccaaggggggagtggagangaaaaggaactagaacattacatagcagagtatggctgtaaaatctcaaacaagacaggcaatgctttatttagagcaacaaaaataatgtttctgagaaagggaactgctacaagcaatgcatagctgcatgttctcgtttgccatcaatatcaattccctcaaaaatactttgagagtgctttgcggcttccaagcaccgactaagatctgttgaacagaaaacagttttcaaaaccatctttgtttaacattaacaaataatcaaaccatgtggctcttgctaacaaccaacggtgcagtctactggaaccatgtttaacctaagtatacagtcgtgaatgtatccctatgaagacagctatggctgtttttatcctgccggcacacacagcttgtgtagcagtgttactttggaatacgttcaggcaaccaagaagtcatcattacagtttt

SEQ ID NO: 849 - DNA, 574 bp, Rattus norvegicus
  Genbank Accession No. AA943734
aggttagcacttggtttgtgattgtcctgcctctcgaccaggccccagcagctcctgcagcagggatgggctggccagagactctgccctgagtgtcccaaatgctgtacctctgtatctttccctaagttactcagccacatcatcacaaagtgacttagaatagctagaagcctggtcctcacttgtcatgtgatctcaggagtattccctgccctctctgggccttaataaccttctcctccacaggagggtataacttttccatcagaagataggcccagaggctaagaggtactttagtggttagagcactggctgctcctgcagaggaaccagattcagttctcagcacccacatggtggctcacaaccatccctacctccagtttcagggagatctaatcgcctcttttaacctctaagggtggtgaacatacatacatgcaagtaaaacacttatacacacaaaataaatacttttaaaaaaagatttcaaaagacaggctagccaatgttcgttcccactcagcacagccatggccactaatgcagacaacgttgggttccaacc

SEQ ID NO: 850 - DNA, 642 bp, Rattus norvegicus
  Genbank Accession No. AA943737
aaaaaaatcagtttattaatgtttaaaagttgataaagctatgtgcaaaatgacacaccaaagtcaggaacctattaaatactattttttttttaaaaaaaagacatttcttggtttaattgcactgaaaacaatactaaaaagacagtaatatatttttattctctgtatcatttacatccagggtcaatacctaaggacaactgaagaaaagaatttctgatgttccctgtcagttaaagtaatgcttttttgggtacaaagggaggcattttcttaagaactacacattcaatggtgttaacacaggttaggaagaaattcaataaaatgacctcaaagaagcaagtacattcgaaaatcagaaactgctctttaaacaaaatacaaccagttggttgacacagatcacacaacactctgaaataaccaataaaagtgccaaagatgctcgtaggggttagagaaagacatcaagcaacagctcttgttttacacaagtaaccctcagatttcacctcattttttttctttacccatatctcctaagatcctggtcaatataattacaaatagagtagacttcgttacttccattacaaacacatgtccaatgtggttgtaatggaaataaggaacaca

SEQ ID NO: 851 - DNA, 566 bp, Rattus norvegicus
  Genbank Accession No. AA943740
cagtgcattctctgctcatgctttattgctaacaatatatacatacaggtgcagtttcagactctcaaaacagttccttttccaagaacacaaatttcttcacaactcccaaagatgcatagattaagaagctgccgtttgtagtgcttcaaacattcagtgaagctcttcaacatcacctcatacactggtggcccaatagaatacaagggcaagtgaacagtgacacctatgcttgaagggcagaaaacgcagcactctcaagtagattactgttcttaatctttctcattaaaaggatgcttaagtttaagtaaggttaatgcccggactagtaatgttgtttacgaactgataacaccctaacagaatacttgtctgatccttgagatagggtgtcagtgatgaggactggccccagagtccaagtgttcttcaagagctatgtcctaagcacaaaagaacatttaaattaaggatacagcacaccattcccaaagatgtcaaaatgtttggaaaatcagcagtaatcatattgctgaatgatatcttgacttcagtgacca

SEQ ID NO: 852 - DNA, 480 bp, Rattus norvegicus
  Genbank Accession No. AA943800
aaaggacgtttaatgtttgctggcttacagtttcagtccattatcatcaaggtggggaacatggcagcatccagacatggtactggagaaggagctgagagttctaaatcttttttgaaggcagacaagaggggactctctcccaaggcagccaggaggagggactctcctcacaggtcagagcttgagcataggacctcaaagcccatctccacagtgactcacttcctctaacaagccatacctcctaatagtgcccttggatctctgaagttatgctccatacttcctgccccagctccagcggtcagctctttatcaatcaaaaagccacattccagcttgaaccaatcagtagcatgacagcgcccaatcaatctcttagggttgccctttggcactgaggactgcttgaccttcaccatggcagcttgccttttaatatgatagtctcagaaaatctttctggggtggtgggaa

SEQ ID NO: 853 - DNA, 572 bp, Rattus norvegicus
  Genbank Accession No. AA943835
tttttttttttttttttttttcaattaatgtatagttatttttttaacaaatattttcaccattttagtaatagatacatttaatacatttttattaaacttttcctcagagttaaaagtttcaatttttggctattaagatctaagtacaactatgttaaaaacagaagcattaaaaagaaaacagtaacaacaaaaaaacaaatccaaaacccaatccaaccccccaaatgaaagagagaacccccagaatgcaagaggcagtgattataataacgatgtagatttactagattctgaacaaacactttcaaagtatgagataatacttttgcaaacttaagccctctcgctttggccacctcccaagcagcaaatacaaattatgggccacattattactgcactctttgttgttaagagcctctccccccaccccatctgctcccatcataggagaaacaagtatgaacaggaaagcattctcttaactgagggtgttaaccctcagctaactgtaatcctctttctgaggacaggtgagagcaaatcttgggttcggcctcaacagc

SEQ ID NO: 854 - DNA, 484 bp, Rattus norvegicus
  Genbank Accession No. AA943842
gtaatgtttgctgttagtcgtactgctagtgctatcggttgaataaataggctgatagtttcgatgatgattagtatgggaattagtgagatgggggttccttgcggtaagaagtgggctaaagaattttttagtttgtgtcggaagcctaaaattacggctcctgctcatagggggatggctatgcttaggtttatagatagctgagtggtaggggtaaatgtatggggaagaagccctaaaaggttggttgagccaataaatataattagggatacaattattagggctcaggttcgtccttttggtgtgtggattaacattatttgtttgatgataagtttgattagtcagtgttgaaatgagtgctaccggttgctgattaggcgttttgatgatgggaatagaattgatgggaacatagtaatggttacaacaattggtagacctattattgtgggggtaatgaaagaggcaaatagat

SEQ ID NO: 855 - DNA, 615 bp, Rattus norvegicus
  Genbank Accession No. AA943886
gccaagagttcaaaatggtcaacataaaaaaaaaagacatcttgataataaatactgctcttggggctgtaataaataaaaagtttattaacaaggaatgcacttttccagccacaagtgtattcaaaaataaccaaaaaaaaaaaatatgtatggccatagttcacagttaagcagccaaacaaaagctgctctgattgtagcctttcaacagcgagggagcttcctcccttctccctccccttcaggaagtttattcacagttccaagtcttccaactgaaaacactctccacagagagaacttcagagtcaatgcgtctgtctgcaaaattgtccgataaactttgtaaagacaggtatctcaaggaaaactgtacttggctccacacttaagattgcccaaagtcaactgtccaccttaggctggtctggttccagcagtccagcaggccacagacgactcgtattcgtaccagcacctgtctgatttctctaacatgctccgttatccctccactggcttccctgttgatctcacagtggaaaagagcccccacgaggtccgctctaaaagaggtttttcagttacatctctgcaagagcatgttcaggg

SEQ ID NO: 856 - DNA, 610 bp, Rattus norvegicus
  Genbank Accession No. AA943891
ttgcggccgactagagtttttttttttttttttttttttttcatagccacaaaatggaattttattcattcatattgaccatctaagggcctaggggagggcaatctatacctagaactcatactcggaattgggcagggcactggattagggccagcactctggcagtcctaggcctaggttagcagcagctggggcttggccttctgccccaatccccttcctgactgagctctatacaggactatttagaaaagaagggcaagcaaagtgctttaaaagaaagcaaaatatcctattcctgctacaagggacacacacaaggaggtggtggcagctggatgctataggtaagactgcagtcttcatccctgtgactttagtttccaaaggtccacactctaaggagtggaaggtacttcagactccctatagaggtatgctacggccatgctgagctgccctggcagcaaccctgggggtttgtgaaaagacatgcaagacactgggctagggccacagccaggagggaaggcccagtgcccaggcttctgagcttggcctttgaacattgggattccaagagggaagatgatgtccttatcttcca

SEQ ID NO: 857 - DNA, 459 bp, Rattus norvegicus
  Genbank Accession No. AA943963
cagccttgtgctcagactgtattcacacagacagacacatggcagcttacattggtcatagacacatggcagctcacattggctttaaacatggaaacgccagggccgtatggtcccatactgtccttactagcatcaggacagccatcacagtctgggaaaggctaaggctagggtctggggcttaggcacagccttaccctactctcttcacacaatgatatacactcacacccgcctcccgcaggcacacacaggaaggttggattattgctgggcacatgtctacttttatgagggattctggaatgttggagggctaattctaacccctcttatggcctggatatgacccagaataaggaccaatgtgctctgggagctggaaggcaaaaagcaacccatctggggcagtggtgtgataggttcccgtcagctcaatttgcagtcacacctcgt

SEQ ID NO: 858 - DNA, 633 bp, Rattus norvegicus
  Genbank Accession No. AA943990
aattattggttttgtacaaaagtggtatattatttttcctttaaaaccacaggggttagaatgcaaacaacaaatgagaagcctttttaaaaataacattatttttcctgtatagaaagaaaacaaaatttccattgccattgcaagggtattgggaagtaggaataacgtcattcattttctctaaagggaacaaatggccctgccttttccacatcgcctgtgttcagatgaactgtgttgttacctagtggcctaggaattcactattttagaaagaccagcctgggattctgggcacatggcttaaacacaaagaaatagaggattaaagaccttttcccatagataagtgggtcagacacttccctgagccagcaggagggacaggtgcagcagtgtccccaccatagcagagacctgcagagcctccacgtccacttctgcttccattcccttcctttaagattggggaaagtataaaaagccaaactacagacctgtgagaaaagtacaactcaggtttgcaagtaccagtagggagaggaggaagaataaggctggctaccgagactaccacacagtgacacagtctgtgtactttagaaaggactacttggttaagcatttggg

SEQ ID NO: 859 - DNA, 554 bp, Rattus norvegicus
  Genbank Accession No. AA944011
aggggcaggagctgaccttctgtaagaagactgggctgcaggtgataggggtcatagagaacatgagcggcttcgcctgcccgcactgcgctgagtgcaccaatgtcttctccagcggcggtggggaggagctggcccggctggctggcgttccctttttaggttctgttcccctggatccccagcttaccaggagcttggaggaggggcgtgacttcatccaggaatttcccaaaagcaccgcatattccgcactcacatccatagctcataaagttctgcaccagatgcctgctctgtgctcctgacagcctcgcagccaggtcaacaggttgctctaacagccacaccacacaggagctggccctttctcaccccgactgaccctgagtgcccacacatgctgtgctgtgagccttttgtgacacagtgtggtttacagttacatctggtgactttacagaactccactgttaaacatatcacccatcttgtgaggaacccagcatccaaacaaaccctgtcctcagtgagatagctcttgactccctaca

SEQ ID NO: 860 - DNA, 524 bp, Rattus norvegicus
  Genbank Accession No. AA944061
tctcgaaatgttgtactattttcaattagctgctgaactatttcctctcctttaatgcccttgtctttcagaccctttatatcatcttgtagtaagtttctgggactttccatcaacaactatatttcgattatcagtgcctgcttctttggtctctgatgtgggctcttccagcttcttcctgagctgaaagcttcctccactgctcacttcaaacgttgacacgtaactatggccaatggcgttatccacgtagaaccactgtttttcaaaagttacattttttctccgctggacttgcactgctttgaacacatcttctcgtttcagtaccacgaagtcgccgtcatggatgcagtggtcaccgagatgcggtggctgtgggctcggttgctccgcagctgacaactccatggacgccaggcagtcttcaacctccgttcttgctccagccgctagaagcccagcacattcacgagggacctgcgcctcctcaggaaccgcctagcattctgatgttggaa

SEQ ID NO: 861 - DNA, 343 bp, Rattus norvegicus
  Genbank Accession No. AA944079
gccggcttcgaggccaccatcaacaactttgaaaaaaacttctctgcccatcttcttgatttgctggcccgactaagtgttcacagtcactggtgctgtagacacttagtcgggccagcgtcatctccaggctagatttcaatggtttctatgcggaacgcctggaacgtctgtctgcagaaaggagtcagaaagctgccccccaagtgcctgtcccaaggggacccccagcaccagcatccagggtggccattcctgctcaatgagcttacttgttaaatatcatatttctggaacctgggtgttatacgttattactgcttaaatatggtatgagtttcaa

SEQ ID NO: 862 - DNA, 448 bp, Rattus norvegicus
  Genbank Accession No. AA944155
caaataaataggaattctctttaaataaccatctccttgttttgcatccagaccaggaacaaacgagagcaactcttagtgcatccagggggcgaagcgcatggagaggcgggcttggggtataggtcatgtggttggaggaatcccagaccaaaaggcccaatggggcagacatgcattctctatcgctcctgcagagaaggcccttgtgaagggaaaaggagagtgaataatccccagaaagaccagcggagggatggaggggcaggggggcggaggggcagaggggcttcctctctgccacagtggctttgcttctgatgccagccactggaagctccaggtaaaatccctggaagcaacagaaagaacaagcgaggccgggtgagtgtgactgtctgctgggacagcggccttccagggccaggcacacgcggggggggggggg

SEQ ID NO: 863 - DNA, 604 bp, Rattus norvegicus
  Genbank Accession No. AA944157
aaccaatgaatattatccaaaattagagatgtaattgtaatttacttgtacaacatgaaattatgctaatgggaaattaccaaatactcattagtgtgttttcacattgctatatgaacatgtgctctcaactgctaatgataaacgttataactgattcgatcactatgaaaacccattttgcaaatggctgttcctgtttagaaaaattcatatagctataaaaatggactaaacccactttaatcctaacctacaaatagactattaacagcaaatataactggtagcctctcaacactgtaacaactggtgcagcgataatgtacacaatgcaaatagaaaagaaaacagtaaaacccgagggaagtcgattcttttagcaataaggactattactctgatgctttggaaaagtgaacactcatacttcaaagtctgagtggtaaggctgaccgtctctccctctcacatgtggaaggcaattccctcgctgattttgaagcatgtgcacaaccactgtacaacagtcacttcaaggttaaccagttgtcttttgtcctacagagtccaaaaaatatattaaccctttcctttttagaat

SEQ ID NO: 864 - DNA, 686 bp, Rattus norvegicus
  Genbank Accession No. AA944158
agacacaaataataagttccatttttattgtatgggaaatatggaccagacaactttaaaagatgaatgcagtgtttctcaaagatatccaatcttaagcatgactggaggaatcgcaaacagatttaggctcagtagaaaagaagaacgtatactttggagctggggatgtagctaaatggttgagcaatatgtgaagccctgggtttgaattttaacactgaaggataaaaaaagaagaaaaaaaaagccccatgttttaaaacccctaccaatcaggcaatgtgggaaccatgccagttacagagcccctggacagggcaccagactacctaacaatgagacatttgactgggagtaagacgttatctacagaacacagtttatttaaagtccaaaacacaaaaccacttccttttaaaaaacaaaaaatgtattgtttttactgcacgaatacctggggcttctcacaaatgcagattatcaaccttcaggctcaatggttcagatacacgaatttactacatcagaggagatatatataaaaaacacgtctttcaacgtcacctatttggggcttttctctgtaagcgcaatttgtcctcgaccaagaatccatcataatgaagtcaaaacctgacctaagcaggctttgaaatagaaccttttcaactaacaagaaaggg

SEQ ID NO: 865 - DNA, 587 bp, Rattus norvegicus
  Genbank Accession No. AA944165
agccacaagcacatttattatcctctggaacacaagggcctccttcatagcagcggcacacagaaaagaatcaatctcaggagggagccacactgcttccggaagcaggcccgtggggtggtagtgtcatgggtggcaggaacaaggcctttagcttgcctgacaggctggcaatctcaggatcctgggcttcgtaagacttgaccaggcgggcaaacttaaggagaccttccccgtcgcagctgaagccataggctttaataacctcctgctggatctgtgtggctacaggcagcacgaattgcagcatcttgcccatatcgttgcacgcattgtctctagcctcgtccatacgcacggcgttctctggggccgagaacgcttggatcacctccgccaagaccaccttggcctgctctgcgctcagagccgcaggctgagccgaggcggacgccataggacgccactcggtgcttgaatagtgtgaacactgagatccggaggagcctgcagccagccgcctcccccacggctgcggactagtggaggcagaaaggaagctgtattgcacgaggcggaagttcccg

SEQ ID NO: 866 - DNA, 372 bp, Rattus norvegicus
  Genbank Accession No. AA944209
tttttttgaaagatggcgccttcgagcctggaagtccgatgttttaatgtatttatttatttatttatttggttaccttcctgttccaagcttccactgactgttgtccccccccccagggttttattatcatgttctgtctttttttttctcttccctcctcctgacttggggacctttttggggagggctgcaaggcttgcttggggtgttggggctccggtgggacagctgctatagctaccttctgtggggagccccttgcctacttgctggagtggctctaggctctgctgactgtgtacctaagacagaaaggcagttccggtgtggtgtgccttccggattctctctggggttgtgctttgagca

SEQ ID NO: 867 - DNA, 593 bp, Rattus norvegicus
  Genbank Accession No. AA944212
  misc_feature (1)..(593): n = a or c or g or t
ctaaaatgcacctcactaaatagaataagcttgcggccgcaatgtttttttttttttttttttttttagtttcaagaatcttttattttagctttatagttctaattatgccattgtgctgttagttactgcagttaatctcttactgtgcctaatttataaattaaatcttaacataagtatgtgcagaaaagccaaatacaaaggggttcaatactgccttgggtttcaagcatccactaggggttcagataaggtctctctagattagtgggtgtcaactgaagccagccttttacttcataggtgagaacatagacatcctccagtctgggtcatctggcacttgaccattataactccttgttataactgaatcactgcttctcttccccacgacattctgaggaattgaagctccttcggctggtggcggccatacttgactgagcttgcaatctcattagtctcccagggaccacgatgtggctactaggtggagacagcgctgctgacggggctcctganggatggtctttaaatgtagcaatgactcaaagtcttgtgagtgactgcagaaccgctggaaatct

SEQ ID NO: 868 - DNA, 457 bp, Rattus norvegicus
  Genbank Accession No. AA944233
ttcttaatcactcaaatatatgtgtaaacatttatattaaggaaacacaaatgtaaaggagggtaccagtcgggcagcattagtgggacacagatctccaagagcatctctggctgctcattttcatccctaagaaacctgaaagacactcgcttaaggaccccctgagggaccattctcattcttgtatgcagtggtggccattagtgtctccctctgagccctgtctgacaaactgccctgtaaccttgtatttatttgccggacagaagacagggaagagagaacgaagaggagccgtgtttcctaatacagtgtagggtggccacgttgacacggttacagcaacacacgactgtcacaggatggtggatttcaattgacctttgtgtttttccacacttttaatttctcaacaatgaacatgcattatctatagtctgaagagatataaagc

SEQ ID NO: 869 - DNA, 508 bp, Rattus norvegicus
  Genbank Accession No. AA944244
acaaacatacaatttcttaaatatagactgtaaaactccatttgcaaaagtctgctattggaaggagtgcacaccagcaggaaggattcttaaactttttatttctatgagtttttctgtcagttttgctagttagtggtaaatacgggacccgccattttacagacctgtctgaagcttctggctgtattcacattgctctttgaagcagccctgcttgtctcacaattcatcagaatctgagcttcaacctacaggcagtgagatcaccagcccgtctggactctgctttgaacggttttcaggaagtgtggtttctggatgggtactgcacttcatggatttgtttgaattgcccatgcagctgtgtttgttaaagtgcatacttcttttaaaaaataagaggaataatctttactctttaaccaaggtacttaaaaaaatgaactttttggtctctcagcagatatttcccaaattgattctatcgctacaaattttagtgttc

SEQ ID NO: 870 - DNA, 511 bp, Rattus norvegicus
  Genbank Accession No. AA944269
aaagagcacatgtgcatgagtttaaaaacagaagtgaaatgtaaggagttagaaagaaatacaaaagaaatctgagacacgaaacaaaaaaaatacattctcgagaattgaaataaaaaggtatctcacttactacaaaatcgttattttaatgtattaagcagtcttttgattcagatgcagcacgagactgagttattcattatcaggtcagaccgaaactcacagactaaaggaaggaccacagcatgacccaatggtcgcaggaagggatgatgtgagtggaggtggagcaatggccatgaggtatcaccataaataaactcactagctcatcagcatccagcagtgagcagatccaccacttcagctggcctccttggacgacttgcaatgaggttcttcacattcacagagcagaactcatagttccaaaagcggtttctcactgtcctgtttttcctcagcttcatcttcagatcctgcttcagactcgggaggggagtaaaac

SEQ ID NO: 871 - DNA, 525 bp, Rattus norvegicus
  Genbank Accession No. AA944347
gaacgtgcacagcagccacctgctatttattccccgtaaggaatcagacccaaaagtgtcctgtgaactctgaacttgaagatggtaaacttgggaataagacaaggaaagcaactgctgaaagaccagactaaatacagctggtggaagtcatcaccaacagatgctacacgctgcatcaggaccaacagactgaaaagtcctggatgccaaaccatggatttcaccgtcagtggcaccagtgaagccactggaacgaggaggtggcttcagcagacaggactaaaggattctgcccacctccacccatctcagcagtacaacaggcagggactgggctttatctgttcccaccaaaggccatggcaccttgacagacgttcctgtttttatgtgtgatctgaagatgggggtttgaaaccaaaataaggcccaagtcctattacactttgagcttgaccctcgtgccgaattcctggcctcaagggccaaattccctatagtgagtcgtattaaattcgtaat

SEQ ID NO: 872 - DNA, 592 bp, Rattus norvegicus
  Genbank Accession No. AA944348
agaaaaaatactcaagcaaagtctacaatcatcggtcaattaggaatgatgtacaagaacatgagacagtaaaataaaaatgcaggtacaaactatgtctcaaacactctatttggcaatattttaacaaaccaaaattttaaaggaacaaaggagttgcagagtccttcgcagatacagaataaaacaaatgatgaagtgcttaagcaaaaggaaatagtaaagcacactgcttttcctctgaaaacagacccccattttctacatcttagcatcttagatggctgtcccagagtgcctcacctgcagtgctgtccctcgtccctcaggctccctcaggctctgggactgctccttatctacctcttcaacccccaccatttcagcctcccattcttttaagaccctgtgggtggtctttcattttttaagcaaatgagaaatgatctatgcatcatggaacgtttcccattttggaactaaaggattaattttatattgtctattctttaaaaacttagagtaaaaactgctggtattcctgacactgtaggaagcgagaactccaagtgaggagcggtttctgcagtcc

SEQ ID NO: 873 - DNA, 474 bp, Rattus norvegicus
  Genbank Accession No. AA944352
cccatcccaggcatagcccacagaaagctggtaaatgggctgcggcacccttggggtgagggctactgctgcaaggcatgcacttgcctcccactccacattggaatgtcagggggctgcactgcaggtgggtgcacccagtaaaaagcatccagccagctaacatcaaggacttgggccagcagtagcacccacccttccaatactgtactgttctcttgacttggggtttctctaatgtcttcattgatcctataaaatacaggggcagaagcaatgctggggccactggtagaaatctgaactggaggtttaactgtttggtgtttggctggaccatcctaagtcatttactagtttgagctaaggatgtaaacttaaaactaagaagggacactgctttgaatgataaggtacagctcagcatgacttgaagtccctcaaccccaaaaggaactgagacaggaggcatga

SEQ ID NO: 874 - DNA, 583 bp, Rattus norvegicus
  Genbank Accession No. AA944355
cagaacattttactggcaacactgactgtatcaaacagacattcctgggaatggtggattctcttcctatccccagagaagcataacaggaaacagacacagaacagaggggggtactgtcttaccacgggatcagcacagcctcatgggggtgaatgcctgcgccgggggagaggtgcaaggtgcccttgactgtactccccaggggttggtctgttacgcaataggtatttacaggagggttagacaaaatagttacctactaaaggtatccaaaagcggcctgagaaagtctggttaaaatgcataaccttgtattgctactaatgggagtagtcagttttatatcttttaaaaataataaaaagattctgttaaaaaatatattttttccagaaagatgttgatttgaactctaaaaagcagtgtggagtcgtcatttttcccttttggatgaagagcctcttctccatgttcgctccctttctggcttcaggtctatcctgtcccctctgtgaagccaggccgtgcagctggctctccccactggaagtccggcctggagcaggcacagaacacacta

SEQ ID NO: 875 - DNA, 539 bp, Rattus norvegicus
  Genbank Accession No. AA944380
ttaagtgcctactatgtgacagacacccataaaacaactaaaaatagcgacattttaatgggtaaaattagactaccctgctcgtgctttttttttccagttctgaaagacttatagtgttcaaggtgaaaaattggctactggaaaccaggtaaggccctcacaatcacggtgtacgaaatatattcacacctgtcagataccactcgctaatgctgctgttctgagcataagctcatgcaaaaacctcgtgtatgttcttttgggtttcggtgacttcacaatttgctggaagaacatctatgaagaaaggtcttctcacaagatggtatcaggtcatggagatcaaattcggtctcgaaggaaggacttttttcaaaaataattaaggcagccagcacagccaattttgaggtcattcccttgatgaggtacttcgagccagtctcaaggtctgtgtattcaaagcaatgcaaaacaaaatggtaaccagaatgtgtgaagtgactctggtagtagacttggggacagaggaaata

SEQ ID NO: 876 - DNA, 542 bp, Rattus norvegicus
  Genbank Accession No. AA944397
cagcctcatcatcactgacttccttgtcacgttccttctccacaaagagagtaatggggtagccaataaactgagaatgtttcttcacaatttcttttattctcctttcctccaaatactcagtttggtcttcttttagatgcaagataacctttgttccacgacccattggttcacctgtgtctgtcctcacagtgaaggatcctccagctgaggactcccaggcgtactgctcgtcatcattatgcttggtgatgacagtcactttctcagcaaccaaatacgcagagtaaaaaccaacaccaaactggccaatcatagagatatctgcaccagcctgcaaagcctccatgaaggctttggtgcctgacttggcaatagtgccaaggttattgatcaagtcagccttggtcattccaatgccagtatccacaatagtgagggttcggtcttgcttgttgggaatgagattaatgtgcagctccttccccgagtccagtttactagggtcggtcaagctctcgtatctgatcttatccaga

SEQ ID NO: 877 - DNA, 534 bp, Rattus norvegicus
  Genbank Accession No. AA944401
ggggatacaaaaggcacctctccctgtacctgaggactcatcaatcaacagatgagccccaggtgggtggagcccttgctggaggaacaaagcaaggataggggaaaggcagtggaggaactgggggctctgggcacccagaatccccgaggtctcatcttgacacctgggcagtgaggtctttcctcactgggtgcagcttcgtacctggacagtgggcagctcagcaggggccaccattgcccttcctaataagccactaaagccctcttcaggctccactctgcagggggatgggataggccaggctgtggtgatgtcttctctaatgcctagactggtagtgtagattctgaagggctcctgtgggcttctctggggaagggagcaggggaattccatggaagcagccttacaccaggtcaattaggtcgcatcaggtcagctcgtccggggccccaggtctcagtaaagtcatagtcggtagcaagatgggaagaaggcagaaccagtcaggatcccagtggagggttt

SEQ ID NO: 878 - DNA, 636 bp, Rattus norvegicus
  Genbank Accession No. AA944413
  misc_feature (1)..(636): n = a or c or g or t
ggaataagcttgaggccgcaatgttttttttttttttttttttttttgctgataagaattctttttatgttattcgaataaaaaatacattcatacagaaatataacaatctcgcaaaaaacaatttcaaataaaatcttgtaaaacaaaattttacaaaaatcttacaaagattctttagataacagggtgcttcaaaaaaaaaagaaataaagaaatttcactaatagaaattttttttttaaatttcaagcaaaagtttctgcttgattgaggctcagctgtcacctgaacagaatgtactcgcttattattaaaattacaggcattgacacatacggcacccagccccacccagtccaacaacatctatgtgtttcataagtgagacaagccagcacaagtcctccttctcttctgtttaccttcttacttaatggaattgttgtggataagcacacagcagggccaaaaaaaggagttttccaaaacccagcaaatcaagtgctaggattttgaattgccaaacaaaagtgcattttccccttaagcaaaacgaaaccagttccgtagagaaatgtattcgtcaggccagatacgacaaaacaacacaacaacaacaacaaganaaaaaca

SEQ ID NO: 879 - DNA, 568 bp, Rattus norvegicus
  Genbank Accession No. AA944419
gaataagcttgaagccgcaatgtttttttttttttttttttttttttttttttttttgcccacctgtgccctttccagggcaggtttattggcacagtttgtgaaacatcttcccatcagcctgagtcctcacctcccttcacgaggtggctgggtctggtcctagctctgtacgaagcagctgcctttgacctgatgtggcctcaaagcccacatgggatagtctctgttaaagggcccaaaggcaagtctgtctagttccagggagcaggggaaggtgaccagagttggatatctgtgtgtgcctcaggcagagccctggttggtgatgaatgggcaaggtgtgcaagccccatgggcacccctgctccagagcccactgctgtggctgaaacccacgtggggacagtaaatctgagatcctgagaaagtagccttaggctaaagtgtgtggggtcagacagcatcagcccagggtgacagacatgatgtgcatggggttatgcctccctacttcagggctctgtgaccctgggtccccaaggctgagggaatccacctgggagtg

SEQ ID NO: 880 - DNA, 608 bp, Rattus norvegicus
  Genbank Accession No. AA944426
tttcttcacagcttgaactgaacacaatattgcccggtttaaaaaacaaaaaacaacaacaacaaaaaaaacaagacaaaaacagaaaaacaaaaaaaagaaaaaaaccaaaaccccgaaacattccgcaaagtccacagcctcacgcctacctgcccttgccctcaactctaggctgggtctcctgataagctctgtccctccctccctcaaggctggcgccaaggggtgagagaagagagtctcaaagctgggcaggtcccagcaaaaagcaacaagatcgccctggggggccagatgagaacagagaaaggaacgaacccagactgaactgcccacgttgactgatgtgtcccagaggctagagtcagaagcaagggcgcggatcatgctctccgctggggggtggggcaggcagggcgagggcagaggcgggcagaaagcgatgccaagtcgccatggaggggcaggaggtgcccgctgcgtgctctgcgcggcggcccacagaagtgtttattgcaggttggttcttgtgagcatggtggggctcgtctctcctctccccacccttttattggcccggcatgtttaggacaaaatcaaagttt

SEQ ID NO: 881 - DNA, 583 bp, Rattus norvegicus
  Genbank Accession No. AA944449
gaagatttggtttcgtcatttacgagtgtaacatagttaaaaatagagcactctgcttgttctcggagaaggggtaaggctgaccacagctctgggtgacactgctcatgtttcagtcactgacaaagttcaggagactctggacgctcacagcaaggagtcgtttcaaatccctgggactgaggacacatgacaaacactgccaagccccccaggcctggtgtggaccccgaacacgtactgaccaaaagtgaccagccatggcttacaagggcaggacagcagcagtccccaggaggcacaggggacacagagaccctgactctgggcccagaagatgacaggctaccaaagtaagtcacaaacacacaagatgaatggtcacagggccgagggtactgagctctgccccaggcaatgcagaactggatttaatgccatggaacttgctgggtctgttttaatgcagagcaagtcaggacctccctgcccctgaggaagagcctggttagctcctgaaaccaaagatgcccttgatgtagcctgtgaggccgctcttggtcttctgctccaatttgtcctc

SEQ ID NO: 882 - DNA, 570 bp, Rattus norvegicus
  Genbank Accession No. AA944481
aagggatataagcttgcggccgcaatgttttttttttttttttttttttgttctgaggttgtttttattgtaagaatgttgtgagctgtgccttggaaccacagttggcacctgttcatccacagcacccacaagagcaccattgagtgtatccagggctcctgggaaccctatctccagtcggtcaatatgaccgagtccgccattaagggcccagctagttggactgaaatggtccctctgcatctccaacttctctggtaggcgagaagtgagagtcaatgccccttgagcccacgttttctgggtctgggccatttgtttcctgttgctctgactgtttcagacaacagtgcttgcagaccccaacacggaaaaggggtcctccagtcactccagttatgggcttcttctctgtccacgagactccagatagccctacttagagctcctgctctcagcagaaaacagccatatcttaaggtcacaaccaaagtcactgtcttcttaggcctggaaccaggctccagtgaggaggctaggaagctgctgtaacctccatgggctgga

SEQ ID NO: 883 - DNA, 684 bp, Rattus norvegicus
  Genbank Accession No. AA944485
aaagccatttgagacagttcagttgtagtgttttcttaagaaaatacaaaggaaattaactctatcagcaaacacaattcagggagagaggaaaagtgggattccagagcaaaaggcaagtgcagcccagttccggctcccacactctcctatttgctataccagtaactgcagaattcaccatgacagaggagccagaatggcagctcgggaacattggcagaggtgcggaaactaacaaaagattttcaattgtccttgattattttgttccaggatgaataaaatacactgtaatgacaagtacagaagatatagcaggaagagaactgaacgtaccacacagcagtattaaacactcctcagtggaagtgcgcccttaaaacaacagggcagtaatcagtacctgaactactaggctgcagcaaccccacccatccccaaataaatagtgtggaggcgaagtaacgtggtagcacttgattcaccaggaagatggtcttttcacccacataagacaaatactgccacggctatgggagccctggcagggactaagatgattgtaaaatcacagatatttctagtttaccacaggtatgttgaactctgcacatttacagcatttcttattctaaccttttccactgttaatctctcagtctccagtgccaaccaagatgg

SEQ ID NO: 884 - DNA, 617 bp, Rattus norvegicus
  Genbank Accession No. AA944536
gaaaccagaacacttatttcatgagtgctgaaatcttcaacatgaactggatgctgcaacaatttcactcttgggtctaggtttttccttcacaggagccatgtctaaacctaggatagacaatccaggagcctcattcccccaggcccagcactgttccgcctcctggtcttggcactctgttaaagactcacttgtgcttggcagggcagccacactcgccgccactacaggtcgacttcggagggtggtaggacttagcgtaatggaagcaggacaacgtgtcttagttctgaagctttccaaaggatgacgttccttttgttgccttgcttctgcaagagccaccgtactcaagtctgaaaattctattattcagattcggcctcattaataaaaatttaaaatataaaactacaatatacctgtgagttacatatttaaaatgggtattttttctcaaaatacacgcttcaacgaatgtgaaatggattttcattcacctctgttggtaatacctggttgtttgtaccttgcttctcaaaaggagtcaaagaacgaggaagtgataaaaacagaagctttccagctcacagaacgggatttctacctttggc

SEQ ID NO: 885 - DNA, 665 bp, Rattus norvegicus
  Genbank Accession No. AA944542
aatgtatcccagcctggcctggagctcataaccctagtgccacagccttcttaatgcatctcagaaatgtggtcactaggcgttttattctcagtgctggtgataggatctcgcacaagcctggcacgtgctgtacctctatcgaatggctcatgtttcgttcccattggacagtagggttccgtccggaacgtctcggtagaataacttagacaaagaatttagtttttttttccctttcaaagtatttgtaacctattgcccagtagcaaggagccctctgatacacagtagaggggagggtcaccgtatcccccaggaggacactctcctctgagggtcctcccctgaactgaatgacctgaggcccagagagggttgaactcgccctggccttacagaggtcggaagagcatctggaatccttagctggatccagccacttgctacagtatccggaggcaggcgtaaacctcggtacttttccttcagcaagtgggagcctgggataataaaagttggagtgtgaggtccatgactttgagaaggcaggatcctccatgacggtatgccaatagaacggtaccctgagcagcagcgggacgctgcctggaagctgtctgggcgttggagttcccgaagcaccttgggctgtgttacttgga

SEQ ID NO: 886 - DNA, 599 bp, Rattus norvegicus
  Genbank Accession No. AA944572
tgcataaaggtcgatgaaaaaccattactagttctagtaaaactgaacatttcaatccaaaagtatagtaagtgtacgtattaaataccactttctaaagtacagctttaaaacagctaacatgctttttcaatttcagtacaatggatccaagaccaagaatacagttacaggcgacaaggctagattacaaattatcatagtcatcatcatcatcatcatcgtcatcatcttcttcttcacgttttcttttgagtgcgtttgccgactcattggctgtattttgtgacaccatattagtagtaataagaatgtttttggacccaattaatgatggattaataagaacattctgaactgctggtgttgcaggaatggaagcttttacagcaggggactgagaagcaggcatctgtactgtaaacctctgccctgtgagggacattggagtgcctactttagttgacacagacatggcttgtggagttggtgtgcctagtgtgggagtactaggtctactagaaactgaaccaacacttaaccttggaaccgttattcttcctgcaggaatatgtgcctttttttgtaaagacttaagc

SEQ ID NO: 887 - DNA, 441 bp, Rattus norvegicus
  Genbank Accession No. AA944727
cttaatatccactgcatcgatgtctgcgccacgctccaggagcagcagaacagcttcctggcacccggtgttcacggccacgtgcagggcagtgagcccttcataattgcgagcctccaggtccacagagcccggggttgcgctgtctagcagggcctgcaggcagctggggcttcggtgctcgcatgccaggtggactgcagtctgaccgtggcgatccagggccatggggctggcaccagctgtcaccaggagccggactatatctggtaatgtggtgatcacagccaggtggagcggggtctgtcgcatgttgttgtggacatcgacttccctgttcccaagcttgaaaaggctgagaattcggtagacggccgtcttgttattctggaccacggcaatgtggagaggcgtgtctccgtcctcatccacccgggtggc

SEQ ID NO: 888 - DNA, 428 bp, Rattus norvegicus
  Genbank Accession No. AA944752
gcactataaatattgtttattatgagtttctgtgttcagtacacaaaataacatttaaatatttaagtatttctgggatatatacaattcattctgattattgctaaaatggtcacattcaagccttgaagtgtgaggaaccagtgttctatgcatggacgctgtctaacgtgtaccacaggcctgtccctgcagggtcagtgactctggagtggacaaagtactgctcccatatccagcctacccaccagtggatggtgtgtgacagtcagcactcctcactgtcctcccagtgttaaaggcttcccagggaagcctcgctgacccaggcagggttctgggcctgcctgcatctgtcagcctaaaagcctagcggtcccactcgacagggctctgttcatcattgtcctcctctgagtcagcagaca

SEQ ID NO: 889 - DNA, 546 bp, Rattus norvegicus
  Genbank Accession No. AA944827
  misc_feature (1)..(546): n = a or c or g or t
ggcaggatgaaatgccagaattttgatatttattatctgagacaggtttaacatttggagacatatgttcaaacacatatccctagaaagaaaagcaagctgataggacagagaacagggtgtaggcaggaaacacgtgctcaattttgctgcgtgtcaggcaactgtagaaaattgggtgctttggagaataaagagcttgctgctagggtaaacacaaaatacaagtcaatttccacttctttatgagggccacaagataatcaattgtacatatatatgactacaaagtactaaataaaatattatatattttatttagtactttggccagatcagccccctggaaaggatcataggtttaagaaagaacaagaggccatcatcacttcctgacatggtcacagttttcttaattacttccactggttctgctttgttctttctgcanggagggcggcaagagcttttctatcagatcagtaatgtctggttcttatccaaatattccccctaataagaatgaaagttctcacggattggaca

SEQ ID NO: 890 - DNA, 522 bp, Rattus norvegicus
  Genbank Accession No. AA944833
aacttttcaaataagtttatttgaagcaaaataaactactgccaagaaactttatgaaagttccatctcaaaagggtcaaaaaggggaattaactgctatgaattctttgcattcagggcgtcaaagacgcagcctgtgcagcgtgatgacgaattcttggatgagaaagcatgtagacagaagtattcctatggcagaatatttacagcactactttcaatgaagtgcttcttccataaacatttgaaatgagatgaactgcagagattaaatgaaggcttcatattgtactttcgtatatgaaggaagacaagtgttaaaaacaaaaccaaaagaaccaaacaccatgacatcatgatctcccaaatggagattttcctaaggaagaaattcatagggtgggattcaaattaaaataaggagaaaagaatgtagttctaaccaatggtttctactctgaacatgcaaagaattcattaacattccaatgatagaatattacagagaaacttctgagatca

SEQ ID NO: 891 - DNA, 476 bp, Rattus norvegicus
  Genbank Accession No. AA944898
caaaatgatttactaaataaatcataactttacaaaaggcacgaggcagtacgtttgcgaccgttcttcgatatgtcagtctaaaaggtatatagcggaatcaatttgaaaaatacaaaaatataactacacgaagtgggaaaaaatagtacaactgcatttgctgatgatatgtcctcaggaaaaaggaagtgtaataaattaacaaactatgatcatcatcacctttacatacacacaaaaaggacacaggagacttattaaaggtttctatgatgtctggaatcttctactctaaaagctttagagatttgagtttcgaaaacaccattgcatgaacttccagaaaacatatcattcttcacatcagcttcagtatatcagcaagcacgtttgtcatatacaaggtaacagctgtgatgcctaagaaaatacatccccatttatagcttgattgtgctctgtgtattaaacac

SEQ ID NO: 892 - DNA, 516 bp, Rattus norvegicus
  Genbank Accession No. AA944906
acaacacttgagacggattttattggggtttctcacagtggttggagccactctgtcttccggacaatcacagcacagggtatcgtcgcgcagactgcccagggcagcctgaatcttattgcttaagatacacatagtcacgatgactgacagacggtggtgggcctcacgcaggaatgtgttagcggctgcaaatctgaccgtagcaccaagccttctgcctaacccctccaacctggaaacccaactcagtcaagtctccctggcccctgactcactatttcctgtgctctctctgagcatcaaggtggctgaaacagcagggccagactggctccgtcatcatggtgggtgcttcagtaaagcttcagcactcgggccagctcctcactctgccaaggggaagagactcgagagggtcccacctcaccaccagttaactaaagaggggttggttttgggaaaactcactcctccgacacacatcagtgaggtgtctggcattttaacaagaaa

SEQ ID NO: 893 - DNA, 467 bp, Rattus norvegicus
  Genbank Accession No. AA944935
agaatatagtctacatctggattaaaaaaaagttttaaataaacaagacatataacaacagtggagcccttcatcattctacgtacaacacagatagaatgtcagttggttccactttagataaatccactttctcacaataatgttattattttcgctggccgagtggcaagcttcatcctagctggcacgtcaccagtttacacacacggggtcgtgcgctcctccaggcagctgccactgccgcctacctccacgctgacctcgttgtctagatccggctcggacaggggtacatcgcgcagcagactgggcaccatcaccgtctggtccatgttgttcaccgcgccaatgaagcgattcatggcgttaaagagcgagtgcttctggttgtatgtgtcgcagatttgcatcatggtggccgagcgggcgcggaaacacaaggacactggtacaccgagatggac

SEQ ID NO: 894 - DNA, 420 bp, Rattus norvegicus
  Genbank Accession No. AA944965
aaataaagaagggtttccttggcctttattagcttcacatatattcattccaaaagtatatctgtcttccaggaagattatataatcagggtacattcatttcctcaaagtgaagaatgcatagatattcatgcatattttaagcacctcataaatcaagctcagctgaaaacatatggtattccaaaaactacctgctaagttgttctcaggagacattaccaaaagtaaaaacccaaaccaaaatgaaagcaaaccaaaatcacaagtctcccttcttcattcaggtttaggagaattttcattttcaaggcagatagatactacaaaattaactgctgtaattcacagctggatgtgagggggtactcccaggaagtattttggttttaaaaaatgaggtactccaggctgtttgtt

SEQ ID NO: 895 - DNA, 219 bp, Rattus norvegicus
  Genbank Accession No. AA944998
  misc_feature (1)..(219): n = a or c or g or t
ggtaacaaaagcaatatgtagaattatttatattcactagtaatataaactatgacagttttcttatatatttgtgaaatgctacagttttggagactgagaacatgttttgtgttcattgtgaatcaaagtcctataacaaaaggcagagtanaagctttgaaagatttgggaaagtggtagatagaggcagatagagaagtaattacctgtaaatat

SEQ ID NO: 896 - DNA, 444 bp, Rattus norvegicus
  Genbank Accession No. AA945031
  misc_feature (1)..(444): n = a or c or g or t
gaggatgcctcatctttaatggctgacaggggagaggggagatacaggaggtaggcagggccctcacagggacctcctgtccctgaggtcgtgaggcttgtcacctttgtctattcctgcctaaaccccagagctgtccctgtccactttcatgtatgctaaggacctctccctggcagtcccagctgcccagcccagtgtgtgtgaagtaccctgcatctgcctttatgaaccagttgttggacaggtgtgtcatctgcctgcaatcccagcactttctctatagaggcaagagggtaaggagttcaaggccagcctcagctacgtggcaaattcaaaggccgcctttggttaccccagatcttgcctaatcagccgcactgccctcagcccggnggttggggaggggagaaccacttgttgattttctttcacactcttttc

SEQ ID NO: 897 - DNA, 456 bp, Rattus norvegicus
  Genbank Accession No. AA945052
cctccacttataaacaaacacacgtttgcatggttggatattagaaaattaaacctttaattacataagctgttttcaagaatcacgtacagagatttcccagagacgctggagttggcagtcggccaccgcagtagattgagcccaccatttcagcaaaggcgctgctgtcctcagaggtagaacatgggacccgcggtcgtggcacatggatgtcagctctgctggctagtggactcacccagggccagcccaagcagtgcttaggcacgcagctctggggagctggtccgggcgtgctggcagctctagcccttctatgtaggagagggacctctgtgaggccggctcatttgccttcattccatttccccatccaggaatcatgttctaaatatccaggtcgacacatcttatgaagttggttggtctttatctgatattccaatcgccagg

SEQ ID NO: 898 - DNA, 664 bp, Rattus norvegicus
  Genbank Accession No. AA945076
aaaagctacttaattttaatactccacaagaaaattttaaaaagacttgacgctcttgacgttgggcatggtggcatatgtctttaattccagcagttggaagaaacagaggcaggcagaactctatgaattcaaggccagcttggtatacatagtgagttgcaggacaggcaggactacatagcaagaccctgcttcaaaaaaacaagaataccagtgaagaagcattaatgcactatttgttttatggatcaattggagaacaaaatgtggagatgttggcatcaccatgaaagagcaatagtgttagcagtcgtgttcagacctccttgactaactcaggtagacagaggtgaggcgaaagatgaagcctacagatatgttggtctcagctagagagactctactgataatggccttgggcctcgacaatggattttctgaaaatgctgaggtagaaactgtttagtctgttctatctgaatggttaaaggtgtttatcattccagaaaccacttctgctgctaattatctcctcggtgcatgtgaacaagtgttaaaaggtgacttgtgtctgctgaaacatctctgtttactgaactttcatctggaaatgagaaatgcgaataagaaataagaggtaaatttaatttaagtaaattta

SEQ ID NO: 899 - DNA, 648 bp, Rattus norvegicus
  Genbank Accession No. AA945090
aggcaagcaaaaggacattttatagtttagagatagaacttagcaatgtacaacaaaatgtctctgaacctaataaattccagtagctttttaaaaagaccagaatctaagaactaaaactgaatctattcaaaataagtcttaatggctttgtataaaaatagaaatgaaaatacacttttgtatgaatgggcttttatttttaactgagggcctttcaacccccaacatctcagtaatgcatgaaggaagtaactgggggattctagagcctcctgggctccctacgaattgcccagttccgtccaccaccccatatgaattttttagagtaaacataataaatttgcatgaaaatgaaggactagcagttgctgccttgagtacttcctaaaaagtaagattgctgatgctgttatttcctatgtatgatacgtgtatctgggcaagttgactgaatactcctaaaccctggcaaaatgctatcctgtggtttaatatcatacaatgacctgatgaaagtaacacttccccctcccaacagccaaacctttgacatctgtgacaaccagtgaagaaagactacctagggctccagtcaaatcctggaggttacaggagtacagaagctatatctgctgatacaag

SEQ ID NO: 900 - DNA, 705 bp, Rattus norvegicus
  Genbank Accession No. AA945123
ctggacaagaattttaaagctttattcaccatggaccccacaaaatatatacttgacactgaatgtgactataaatgagaagtgagaaaataaaaatgattcaaggggaattaggaagtcaacacttactttaaaatgggaatgaagagacagagttcaaaaataaaataactttgcatggtcccaagtggactagacacattcctttcaaacacagtgagtgccacaaaacagccagacatattcagacatgcgatatatagctagaaatccaccttcaaagaaatagggtgttaaaaaatgaaaagtctctagaaaaatcacaaattaccaccatccgtttcaattctatcgggtgctattttctcaacacggcaaatccaaaccccatgtttctctgggcatttccggcatttcaaagcccagcgcacactgtaagagccactgtcttaaggaaatctaaacagaagacaggttaataaacagtgaggtcagtgtcttttacttcggcatgctacctccaatctcaccagaggatatcttttgttccccctcactttagcctgccaggggatgacgttgcccaaacacattttcaatgttttctttttaacagttaatataattccaggatgcaagtccatttctttctagaaggttcctaggacacccattgaaaagtcaaaagcaatgaaaggaaaaggg

SEQ ID NO: 901 - DNA, 664 bp, Rattus norvegicus
  Genbank Accession No. AA945143
gcaagcaatgcgcagacaaaaactaaatttattaattaaagattcatttgaataaattttgtacagaagaatagtatttattgcatctatagtataaaagaactgctcaccaagctttataaagtatgaagcaataaggaactaattacttaaagtgtttctatggaggtaagtgtcagggtaaattgagttataaccagaatacatcatatgtatgatgatgctaacattttaccaagttatttttatcataatgcttaatctgcttaatcatacatcatcatgatatgcgaaatcataattttttccaggattggaccacaacatcacgtctctgaactacaaatataaatatgttacaccaatcacatatttgtaaaaatttataaaataaaagttgactgggaatcctgtagcctggactgatgttcagaagaactcaatctgattcatcgctgctgaagtaggagctgtcgctgtactcagctgtgtaaaggaacttgtgaatgatcggattcatctttggtatccagtgtcggggaaccaggtacgatgagaggttaaataaatccacgaacaccttgtacctgtcgctcacagttgagcgcagataataatagcctgaggatcccccagtgccagccttgctgcctagcatcctgtg

SEQ ID NO: 902 - DNA, 720 bp, Rattus norvegicus
  Genbank Accession No. AA945152
aggatcctcatcaatagatagaaacgtataggaatagtcaaactacatctacgaagtgtcagtatcatgctgcggcttcaaatccgaaatgatgttttgatgtgaagtggaattttagttgtcgtagtagacagacaattaggaaagttgagccaataattacgtggaggccatgaaatcccgttgctatgaagaatgttgagccgtaaattccgtctgagatagaaaatgatgtttcgaaatactctgaggcttgtaagatcgtgaaatataatcctaagagaatggtgattagtagggcttggtttatatggtttcggttgccttctattaggctgtgatgggctcatgtaattgagactcctgatgctaagaggactgatgtatttagaaggggtacttctaggggatttaaaggggtaattcctgttgggggtcagcaaccgcctaggtcgtgggtaggaactaggctggaatgataaaatgctcagaaaaatccggcaaagaagaatacttcggagacaataaacaggattattccgtatcggaggcctttttgtacaataggggtgtggtggccttggtatgttccttcacggatgatatctcgtcatcattgatatatagttaggatgtttgtcaggaggcctaatgataggagaattgtggagttgtaatggaatcatattactaagccggatgtgagtagaagagctgata

SEQ ID NO: 903 - DNA, 552 bp, Rattus norvegicus
  Genbank Accession No. AA945169
gaatgaaataaaggtggtttaataagaacgtttcacggcatcttcccgagttgctaacacggtttatagagcaagaacactgtttcagtacaaatgggaagctactgctttggcaagatcctggtcctcctgggctgggtccctcagttctgggggttactgacgacagcagtggtgctgtaggagtacgggctgagcagggctgcgatggtgtagtggcgatgaccagagtcattggctgtgaaaaccacctctgcgtattcatggaatggggaaatgccaagagccttccagtacgatttggtgtccagttctaccctgtacaccccttccgtgaacttctcatctgtggtgagcccgtgcagctctccagactcggcggtcttcccagaggcaaacggctcccagcttccgtctgcagtctttttgaacactttcacggccacatcaacagcagggctgcctcggacagcatccaggactttgaccatcagaggacacttggattctccagcacccccagggccagcttcagacgcaaatatcagtcca

SEQ ID NO: 904 - DNA, 461 bp, Rattus norvegicus
  Genbank Accession No. AA945171
caagaacaaacacctttattgtgggttccaggggagggaggtacgtggtggcactttaaccctgagtccagtccctgcagagcagtctgggacacaggctgtgggtcttgtttaggaggtggtctctggagctctgcagccaggcctgagttcggggacccaggtctttcaggtgatcttcatagtaggtctgcacgaagccctggatagctctggggccccagaaccaccgccatctgtccctggttctggtcaccagtggttccaccatctccatcaccctggctcttaccaggctccagcggctgttctcagggccaggagtgggggtcaagctttctgtaggcatggatgctacaaagcaggccaggaacagcacagagaggcagagtgatggcagggtctgctgcctgcatctcagcagggacatttctggggacttgggcctctgtgtctctgtc

SEQ ID NO: 905 - DNA, 643 bp, Rattus norvegicus
  Genbank Accession No. AA945172
atcagaaggaaatactgtaatttatttactgcattggatctggattttgaaagttttatgaacacttaaacaatctaccttaagaatcaaaaattagaaaatgtaacaaagtcattaattatattttcctttgtatattttggtggtggtggtgtttgtttttgttttttccgagacagggttcctgtgtagccatggctatcctggactcactctatagaccatgctggtctcaaagtcagaaatccagctgcctctgcctcccaagtgctgggatcaaagttgtgcgccgccatgtctggctccctttgtacgtttttatggacttaagattttccctgtcttgtaaaaatagtaaatatggcttgaaaaatacatactattacaagatgttttaataaaggacctatattaattcatatatcatttagatttccatgattcaagcatactaaaatattccaagaattaagattaaaaaaagaacaacatccgtttttgtctttaaaagattttcattcattcaaaaattttgaaggctaactatccaattcaagacagaaggaagaatttctgagtgtatgaactaagaactgtctttgctgaagcgaagtaagaactcaatcagagtccttgtgggtct

SEQ ID NO: 906 - DNA, 592 bp, Rattus norvegicus
  Genbank Accession No. AA945193
aaaagagtatctggtgccaggtaagctttaaagaacacagacttattttagcccacgattctggaagctggggttgaaagaagcccacactggacaggagagccatgtggcttcaatgctggatggaaacacagaactgcaggcaagcatttatgaagagttagttcttaaggcaggcagccctccaagagagtgctgtctcctgagaactgctcttctcagtccgtacatctgtgaggaaagtgtcccgagtgatcgagaagaagtaaatactatgaaagtcaagactgttgttctggtgacaggctctaggtcatcatccactgagtagacggcaaccttcacaggctgttctggagtgtacacaggcttgtcagtgtgaacaaagagagagctgttgtcatagacgattggcattatttctaattttgaaaaatgctttgacacgacttccgaatacacatttgagaaccagttttgttcttcagacaactcttgggcctgaattgttaagatagcagagttttggaatttattttctggtgataattcaacagtgcccgaagagtaattaacatttttattaggatag

SEQ ID NO: 907 - DNA, 405 bp, Rattus norvegicus
  Genbank Accession No. AA945268
caccctcgagtttatttgtgtaatgaaccttgaagaacattatagtaaatacgtgtgttttccaggatgccacagaatttcattggaaaacaatgaaactagattaacctgagaccccccccttccccttagaaaataaggactataggattagaccacaagcagactagtaaaggggatggggttgtggtacacctgattttagccagactttcccaagctaaatccagataaaactgcttctgtattagtaagttgggtgagtgtgtataatctatcattcaaaaagtttttttttaaagtcttatgcgtttgtttgcgtgctcgcatgggcgcacctgccgttgtgcgagctgcgtagacacatcgatgtggtcagaggacaatcttgggtgtcagttcttg

SEQ ID NO: 908 - DNA, 330 bp, Rattus norvegicus
  Genbank Accession No. AA945284
agatgtttctatagttgaattacaacgatgatttttcatgtcattagtcacagttaaatgctgtgtagaaataatgacaaattatatgtttattttaagtttactgtttttgactggttgtctagggttggcgttgaagccttcacctatttatggtgggtttggattgattgttagtggatgtattgggtgcttaatagttttagggtttgggggttcgtttttaggtttaatagtatttttaatttatttgggtgggatgttggttgtatttgggtatacaactgctatggctactgaggagtacccggagacttgagggtctaattg

SEQ ID NO: 909 - DNA, 664 bp, Rattus norvegicus
  Genbank Accession No. AA945320
agcttgcggacgccacactttttttttttttttttttttttttcatatttgatagcagcttttttattggttacaaaacctaagcccatatacaaaattaggaacacgtttagatgcctcttttgaaagaacattttagtctttttttaaactgagtttaaaaaaaaatagaaacaatgcaattttaaaacactgttttgaaaacctaaaagtgcagcaatacactcagtttccttatctacgaagtggtgcgattccaattcaaaccggtaaggtcacagcaaaccggatcaagcagatgcagggtctgcactactcgatgctaacgttactcaaaggttagtgtgcacttaggacgcaagaggaaataggaatcatcacagtagaggcccaattttaatctcaatgtgtgcaaatttgaaaaggtaactgtcagttaagtagggagagtcgagaagaaaataaactggaaaggggacaattcacaatatcaagaagatattttgactttaagggtttcaccaaagtgtgtgaccttaattcattctgactttgttactcctacttttagtgaacaactacacagtttcaaaatttagacaagtgtttgaacaggatgcagttaccacatgaagctttaactcaaaatctgggtaaagaaaaa

SEQ ID NO: 910 - DNA, 574 bp, Rattus norvegicus
  Genbank Accession No. AA945325
attatattacatgattttattcaattttccatgtcactagatgaatctactgtaaagaatttatcacaatttacaacaaaataccctagtttacattattgaagagataggagatgattttggctacagtgttaattttggtggaaaagcctaactgtttgtaatgcgtaagtaaccttgtatcaatcctaaggtgatgaatgacctttatcattttcctttatagcaccctgcatataaggcaagcgtgataaaagttcatcagaacaaatactttgtggcttttaaagtggaaaacatttattaacattgaagctctcatcatacaaggccatatataaagtcctagcattctgattatataagtatattttctacatagttacagtgttatataatttcgcttttcataatacattgcctcaatacattaggtctattaaacaagagcacttattttcaaatccaatacttgaacaatttcctctgcacatggatcagcagggctagttagcataagatgctctttatgaagaggtatgagatctcagtattaacaggtgctgaaatttac

SEQ ID NO: 911 - DNA, 495 bp, Rattus norvegicus
  Genbank Accession No. AA945453
accttttaaaaaacactttattacagaaagattttattactgtatgaaaatgaaaatggttttaaagtttataaatctttgtcaataaaaatgttatcattaagtattcacatgtgtttcccatataattttaaaaatatattctctcacctccacccctgcccgaggacatggcctctactcttttacttctgtgaaagactttggggttcaggccaggcttgatttggatctggggcaatccccttagctctgagcttaaaggtaagcgaccacaggggtgtgccaccatccccaagttaaatctaagcatctacttggatttccccatctccccactctggccctggccaggggttgaatctccatcctagaacttaccacacatatatttcccccttagctacattcccaccatactttggctcaagagggtctataatgaatttcacatctgctatgtggcacgccagtggaaaggtgggtgctcgtttt

SEQ ID NO: 912 - DNA, 640 bp, Rattus norvegicus
  Genbank Accession No. AA945569
aaagggcaataagcttgcggacgccacacttttttttttttttttttttttttttgtaaatgtcgtaactttattcaacatataaattttatgggtttttaattcctttccatttatcttgctgtcttggttcttcacgtgtggaggagtctttctgaggaaatctataggttcctatttttaagcatttccttgttcagagtcagaactgaaaggggcactgtattcttcaatggcgaattcatctgtctcataataatcgtagacttttactggggctggttttaagttctttactggaatgtcttgttccaccgcgaaggagaaacccatggtttgattggttagcttttcaatgtagattagaacgtggttggtgttcacttcagtcctctgaatgttagactggtcttggagctttttcacggatggcttcacaggtatgaagcctgacaccatcttcacatcaacaatgaccatgttggagttgggtcgttctccaatgtagcttacgttgatgtggatctggaactttctgtgatgttctgccttatcaaagtttaaggggagagtgttgaccttcagagtgaagggcgcttctccttctgcctccggaaggatgttgtactttagagatgtc

SEQ ID NO: 913 - DNA, 590 bp, Rattus norvegicus
  Genbank Accession No. AA945574
  misc_feature (1)..(590): n = a or c or g or t
aacgttctacaagcatttatttcatcgctgaccactaagttgcagcatgcaactcccgacagtgagctgccaccgcccttctcagagaggcaccaagcgctacggtgcaacgactcaggtttgcactacggtgcaacgactcagggtttgcagtcttacaaggtttctgttgccaacatcattgtttacggagcaagccttttaaagacttaaaagcagttattctctataaaaagtcattttgtatttcatgcacaaaactctaacgggtagatttatgttcataatagaagaacgtttattctagttctgtacttattaggaatacagtaagcttccccccaggttctcataaggaagtgagactgttgtcccccccggaacagggcagcagtgatgatccctagggttagaaaactgcttaccaaaagtctttccaaagatgttaagtaagaagttggctcattttccagtacaatttaaagaaatgtttgcagtatgtgcaggtcttataggttatattgtagccccttgtgataataaccaaaaggcctattcttcccacttaaaaaattctacctcanaagggg

SEQ ID NO: 914 - DNA, 616 bp, Rattus norvegicus
  Genbank Accession No. AA945578
cagtgacagaatcagtcagcaatcttttaaattttctttctagaaacttttacaaattccaactcagctatttttacagtaaaaaagatgattttttttttacaagaaagtgcattttttttttctggtaaaatcatagtaactcttcagatactgtaagcaagtatcaggctaggctcacaatccggccatttctactcaggatgtgggcaaaggagaggcagagcttggaaatagcttgatcccggaggaagggcaggtgggcttggatttcccaatcagattcaacattcctcgtgtgactatagacctatgtgagacaggaagccttccccatgaagaacacggcctcctcagtacaactttcttaagcgcaatcaatgtttatgtgtcaaaaaaggtatcctggggtagaggacgtagttcagttgattctgttgctttaacatgcttgaagccttgggtgtgctcttcaaacactacagcttagcagaggaggattcaaactctagcagtcgcccaatgtcatttgggagcgtcatccagctaccaccatcaaccaccaacacaatccctgagacataggaagccagagggctggctaggtacagcacgc

SEQ ID NO: 915 - DNA, 557 bp, Rattus norvegicus
  Genbank Accession No. AA945580
aaaattaaataaatgttttaatgttaggaaggaaagagacacgagctgttcgagctgttcggggtaatgctctgaattgcccttgtttgtggtgacacctcacaggaggggttctttgatcctagccacagttcgttcacagggccttgaggcttcatcatgacccagtctgtttcaacttcaggaacactgactcagacagttgtcaccttggggagagcacacagcatctcaaacagtaggttagccgcgaggagggctgtgtttccagagagatcatacggcggggaaacttccacaaggtcacagcccaccacattcaggccttgacagccccggatgatctccagagcctgactaggggtgagcccagcaatttctggtgtccctgtccctggggcataggcaggatccaaggcatctatggcaaagctgatgtaaagaggcacaccccccatctgctgcctgatctctgccatcagggggaccaatgacttcatccaacagtcttcagccaggaccacacggaagccctggctccgactgtatctgtaggg

SEQ ID NO: 916 - DNA, 505 bp, Rattus norvegicus
  Genbank Accession No. AA945591
  misc_feature (1)..(505): n = a or c or g or t
gtaataaaaattagtttattgaacaggttggggccagctgtggtcgtatacacctttaataccagcgctcaggaggcagaggcaagtggatctctgggagttccaggccagccagggatacatagtgggacggtctcaaaaattatttgaacaggtacttgagacatgtgagatgatgatgtggacagatatgactagcaccctcaggtcctccccagggtacagcaaaaataatcacaaaccaacattctttaatcagaaaggcacttgagggcccctacagagtcttacacaagagcagccctgcggattcccactcagccaccctcccttcccatccggctcagagttcatcgtgacctgtggagggatctgctccgggcttgatgaagattccttccatggccttccacgtgttgtgtgcattggcactangcatgccatgcacctcatgctgcccacggattgggttaccatactgttcaacagtaactgacaggaacac

SEQ ID NO: 917 - DNA, 556 bp, Rattus norvegicus
  Genbank Accession No. AA945596
cagtccccagaacttaaaaatcggaaacataaaactccctggccctccaggcagcaggcagatcagagcccgcccatcagagtgacgctgagtcggaatcagaattgtgtccacactgatggcacgtctgttagaatgcacgtttcttcaggagcaggacgtgttccagtttctgggaatttgagaagatctggcctctgtctctgcttacaggtatgccgtgggatcactggagtcacagttttcaatgtgtacatgcgactgtatgccagggtaaactttctgcaggggcagcaaggtgcccagcttcgctccctttctgatagagcccttatacttaattggcttaatgtagaaaattttgacgcagaaacctcttcccgacagtcggacgccatcattgatggcgtttttgtttctatagggtttctcctggcccactatcttccccgtgaatggcgcatacaccacagatccatctgagcacaggacgtccacacctggatgatgcctttgggttctttgagtaaagtactgtccacagccatagctgtca

SEQ ID NO: 918 - DNA, 615 bp, Rattus norvegicus
  Genbank Accession No. AA945601
aaaacaagtttatttattgaaagaatctgaaaatagtaataaggccttcattaacaattaacaaaattttaagatattaacaatatgaaacattaagaatttacgtgaaaattccatgtgtttgagatcagtctggtggcagctgcttctgtacttgtcaacactcgctttttagatgcatggactatgcttcagaccttgctctcctctggatcatagcagagcctgctgtgcgcagtcacagatgaacagcacaggtgaaccgtggggatgagccaccatggcttaacagcactcaagccagaccacttggggctgcacgggtgcccagtaggtcccaactttaacaggtagaagaaagctcagagtagtcggttctatagcagctgacaaaccttccctagaagcatgagacaaaagcctgacttcacctggaaagccagtcaaagaacaggcagtcctccctactcctgccgtaagaggtgagcacaaaactgaaagcggatacctagctgaggtgctggggccgaccactgaccccacaaaggctccagggccagtgtggcactcacgtgcgttacttgcactacatacatgtgttgcacacaggctcca

SEQ ID NO: 919 - DNA, 619 bp, Rattus norvegicus
  Genbank Accession No. AA945604
caccgaacaactcaaattttattctgtcttgattggtgtacattaggagcgggcagctggaaactagtgttggggcagaactcctctggactaacgggtcgtgggagacatggctggctttggcacacagactggataaaccatacactggctggaagatggcaggcaagacgataaaaaaagcacagacctaccaccacacagaaactatgtctgaattctgtagcgtgttagggagtaacatgcaaccccacctaggccacactgtgagactaaagcctatcttatttccccttcttagagacgtagagatgtggccttagtattcgggtcctaatagcgttccagagcaattaacacacggcagagagagaactgccaccgattcttacagcagcccaccggttaaagacataacgctaaatgacacattgcatctagctcatctcttcactagaccaacccacacggacccgttcattctaacccaacctatatacttagttcaacggaactcatgtctttacgatgttaagaagccttcttgttagtcttcccgtctccgtgagacaagggaacttgggtaaagacatctttccctttcatcacgctgatgagg

SEQ ID NO: 920 - DNA, 577 bp, Rattus norvegicus
  Genbank Accession No. AA945624
catgtatacactaaatattttaataaatgaataagggtctgaaggggaggaaaggaatggaaaggaatataaagtagaaaggaatataaagaaactgcagatagaagtcatttgaagatgattaacaggaaactgagtgaaacatgttcagaaaattatgctacaaaagttgcaagaaaaattttagagaaacattaaagaacagaaaactgagtgaataaccaggcagaactaatacagtgcaacaaacttattttcaaaatatctgatggagttgaatgaaactgaagacactcattggtgggcactgttaaatacatctcaggatacatcaccaccttctctttgccgtgctttaggtctcttactatgttgcttgtcagctgtacccagagcataaaatgttatccttggaagtaccaagagggtgtgcaatggatgggttcttccttccagatgctcttcagccgctggacccatgatgccagcatcacttttctttgttcttccgatgaaacttcaggaccaaaactgatctgtggggcaaggactttaaatccacagaagtgcaatgtac

SEQ ID NO: 921 - DNA, 437 bp, Rattus norvegicus
  Genbank Accession No. AA945636
cacaggttcagctctttattggacatgttaacaaaagcagtttagtcaaaaagaccaaagcccatgtcatcctcggattcttcagattcttccttctttgcttctactttcttctcctcagctggggcagcggcggcagatggagcaggaccaccagcaggcgcagccccagcggctggagctggcccaccagcccctacattgcagatgaggcttccaatgttgacattggccagagcctttgcaaacaagccaggccagaaaggttcaacattgacaccagctgctttaatgagagcattgatcttatcctccgtgaccgtcacctcgtcgtcgtgcaggatgagggcggagtagatgcaggcaagctcacagacagaagccatgttgtggactgccggcacggtgctagtcgccggatgaaatgagggcccctc

SEQ ID NO: 922 - DNA, 411 bp, Rattus norvegicus
  Genbank Accession No. AA945683
aaaggctttttttctttttaattaggaaccagggggtgtgctgcttatcctctgcaagtctaaagcaggtcgccaggcccaggatggagatggtgtcagtgggactgcagtgggctttgctgaattgcagagagcccaggagaaaagacaacggtggcaagagacgttggcaagaactcgtgttagccaactacagcctggagtgagctctcgccttccttccaattccgcttgagactggagtgtgccacagaagagaatgtgctggaagggcacgatgcagccgtacggtcagaccccggtccactcagcatcccttcacttgcctgccctccattcttcttgccgcttcgtgattaggtacttgaagaatcatacacagaccatgcgatggctgtggaggggatctgg

SEQ ID NO: 923 - DNA, 665 bp, Rattus norvegicus
  Genbank Accession No. AA945698
aataaccttgcggccgcttccaatttttttttattttttttttttttcatatttgaaagtttttatttatattttggtcctatacacgaacattcttaaatggaactcttctgtaagaatattttaaaaataaaaatttgccaattatcagatcgacacaaacccttaacaaaggttttctgtgtaatcctcattaatgcaaacctttataagtattacattcttactgtagatcttcagtctgttctgtaataataaggctataaaaattgtatgtggcacattcattacaaactacaaatacttctgctaaaaagaaagctgggcactacaggagctccaggctctggggcgggcgtgctggtttgcagttttctgtcacttactttcaaagagcacatagcaagggaggcacctcctttattaactcctccatttaaattctgttgtttgtaaaactggaccaattatcaccaactattattagcataattaaccagatgcctctttacaaagcatttcactggtgatatcagcaagtgcagaagaagagagatttctaagagttgggtttgttaaccttgccagatccttaacattatgggctgtggggctacttcagcttcgaatcagaagactgatgccgcacataaacgcctcgtgcc

SEQ ID NO: 924 - DNA, 676 bp, Rattus norvegicus
  Genbank Accession No. AA945699
ggccgcctccaatttttttttatttttttttttttttagtttataaaacaggatttattaattcccatttacagatatagaaattaaggcaagaaataagcatgcattcacaccagccagcaagagcaaagggttgctttagtgcatattctagccaaatataccttggatactaccttttggtactgttcctttggacaaatcagcatgttgtttttaaatgactaagggaagcacttttgggcacagcacagtccagtgttttacactcagccatacttcatacattaggtatctgtacccaataagctcttcactctggcatggaacactgctttgttttgcacactgtcctcttcaccctctgaatgttgctatgctagatgcatcttcttcaatacatgacttgaattctcactcagaaatactcagtagtgtatttaagttcaaacgactaagacaagtaatgtctagaatgaactcaaagcaaaccgtaggaagtcctgtacacacttctggtgaaaattagagaagagctaatgcaactttctattggagtgcatgacgtatggacatttgctttatccaatgttaacaaaagctggtaaaatgattgcccccacgaataagtcatagaaacatcacccatttgaagaacaataccattaattacaaa

SEQ ID NO: 925 - DNA, 520 bp, Rattus norvegicus
  Genbank Accession No. AA945704
caggtttagcatcagtctttaatgctgtcacactgcataatgacaagtcacacactttggtcttgtgttggtagtggcaacttacaatgagtcgaatggtcagagcaccaggctagctccaaagaacagatccattccctccccaggtctgactcatcacagccctggacaggcagtagttgacagggactgctttcatccaagtgcacaccagctttgcatggaattataaaaacatatttacatacgttccacggtgctcctttcatcagaagcaaaggcccttttatcaaaagggattatatctagggctgtgcaaaattcaaaaggactgtatccttttgagaaagttgagtccattacacacacacatacacacacacaaaaaaagtcacctgcacctctgagaagtgccaggtgtggccaagggctacctctggaccagcaagtactgtgactgtaaggcagccatctgatttcaagagagccacaggtccaggggatctcctggctgtccagg

SEQ ID NO: 926 - DNA, 594 bp, Rattus norvegicus
  Genbank Accession No. AA945708
aattcatttattaaattcacttactagtttattaaagtctttaaagagaggaataaagacatcgccatttattttgcaaagtatttctttaattgctgcaagaattttgtgagaaattcaatcactctgtactccagggaagatgagtgaaagtgaatgttaacttacaattttaatattctcataaaacctaaataaagattttaagtcgatacaacatgagttcttttaagtgaccagaacatcttgaatatgttttacagatgtttctatgagcaaattaaaacacaaagaaaattaaaatagattcacattaaaatatctaaacagtaagtgtaacactgtgagtactagtaaactctacatagtttgttatatttgaacaaacactaaactccaggatggacgacttattaacaaaaacatacataagtcacttctaaaaatgacaaatccaacttttaaatgctaaaaattcccccaagttagtttttaggcaccagagaagttttctttcaaaaatttcaggttttttttcccacaagcaaagtagaaatattaattgggacttcagctttagagaaatttagcttc

SEQ ID NO: 927 - DNA, 588 bp, Rattus norvegicus
  Genbank Accession No. AA945712
actaacattttctatttattcattaataaaaagtgcatagtacaagcccttaaccccaatccaagaactcagtaaaagattaacaccaaaggctagatggcatgggctgatttgtttggcatgattcaaacattgagaaatagtacatcatatgaccccttttcctttaacaaaataatcatgggacaagtaatgatacacaggattcttcactgagaaatgtaagactgttcctatcttctattgcaacaacaaaatttaaaccatttgtcattttccttcttcgagttgctgttttgtgttttaaagtgagctggtcaaacttaagtacaaaatcacagagagacaaactttcatttagaatgacagacttacacaatccctttaaagtctaagatattggtaattccataaatgctatcacagacgctaaatgaaaccatggggcagtgctgctcaatggctactctggagagcctctgtacattgtaaagcatgtgctctgaagcgtgggacagtgtttagatacatggtaaaatcatttgttataaacagccccgatgttaacctgtcccatatggaaaacag

SEQ ID NO: 928 - DNA, 591 bp, Rattus norvegicus
  Genbank Accession No. AA945751
ggtgatagagaaatacattttattaccaagttttaagaatatttacaaaagtgggatgtaacaaaaaatataaaatgtactaaacagtgtcattatacactactttgaaaattgtcacatgtttctaagaaacaattactttttatgcaaacacagcttggctttaagacaatgacaaaagttatgcaggttacacagtggagtattactcaactcccaactacgacagtgcctttacagtctctctttaaacagcatagggcttcaatgaaaacagagtgcaattaatgtcatggcttgtaaagtctgattacagaggtacagcaacccagcagtcactccagttagtttccacacacacagtaaagccacagtgggctagtgacacacactagctccatcttgtacatactggtcaagcaaactcagcagaaatgaaaaatccattcttacaagttttttaaaattactcttcacaactgctgtatgaaaacaaccacagagacagtttggaaagtcttctggaaatgcttacagatatacagtacattgccaatggctgggacggttgaagggacatgaaggcctcgg

SEQ ID NO: 929 - DNA, 600 bp, Rattus norvegicus
  Genbank Accession No. AA945763
aggatttacactatccagatttactttacagtaagaaagcagagagatgataaatctacagttattcaacaaagaagcacaaaagagcttaaacttgcagaggggtctgggaaaagctgctctagttgtcagatgagtgacaatagagagaatcctcaaactgcacccgactgctgggagggtaaagccccactggtctaaggcccaatatataaacctgaaagccctttagaaagcagagggggctgaagtgagagagcctctgcagggttccctattcggagattacatggaagctgctgcagccatggcaggaagagtgccaggctacctgtgcaaaggacatcagcacttggtgctttctatgtagtattggttttctgaccctgcaaaatgcaagttatgtatcatggaagcttgcaccaagattgcagacgagccaccgaaggttccagattccttgcatggagctccccacaggctgtgtgtgaactgtaaaggtgaagtttaagttacagtggagaccccaggatccagcagatgtcagaatgttgcatgtctactgaggaaagaaaaggcccaggcgttgggtggaactgg

SEQ ID NO: 930 - DNA, 427 bp, Rattus norvegicus
  Genbank Accession No. AA945765
aaaattttaaattatttattaaaataagcacaagttatgagagaatttgggtggtcgtggttgactaacgtatgtcacatgtgcaaatctgttttatgtgaccccacagcttatctgacagtggctgtgccttcatgtctgggggcagtgggcacagcatttctcagagcagggcagcagggcttcatctcggacacagcagtctgactgccctgggtttgtgcctctctccacaaaagacctgggagaaggcagtggcagacaaagatgcgaaggcaccggtctttaaagttggagacagtggggaggaggattaaaacccaagtgcatgggcatctgcctggggaagtccatgggctcacagtgcgagtttgaagttctatggttgctggaagaacatggttaaaaataaagcaaacgcattttt

SEQ ID NO: 931 - DNA, 500 bp, Rattus norvegicus
  Genbank Accession No. AA945769
aatcaaatactgcaggactgatttaatcagtataaaattgaaagatttagatttgtaataaaaatccaaatttgaggaagggcaaactttaaaacagcagccaagtcttagaggaagggcaggtgagtgcaggcacgctggactgtggggcggggaactgaccactgtcaaaccagtgtaagttgcttggtttctcatggaaaacattttatacacctaagtccatcagcgtccaaatgtctgttctgttggtaatatcacaacataatattacatttactccaaattctgtcccatgtgggaaagttagatgatttcaaatactttcttcagctccacaataagctgccagtcactcttctgcatttcgtctctgaaccagtctttgagtgcatcgatggactgccggctgatcttgctgacaagaatgtctgtagcttcgaagtgtctcccaaacatttttggagattcccaaggatacgttctattttgacacagac

SEQ ID NO: 932 - DNA, 438 bp, Rattus norvegicus
  Genbank Accession No. AA945784
ccagtttcaaagcaatttaatcttatttacacagttaaggaacgggtgatacattttcatgagttagaaactgatctttctgtaataaaatagattttaactcagtgtcattatcactgctgaggaaatcgtagcccttgtctgccttcaacagcattcactggagttattgctatgtactctcccttctgttaactcactgtcacttagatggtcctgttttccactcagtagtctacagagctttgaggttactatgacctatggaagagaaattagaaacatttttgttctgattctgataactgggggctggagcacaagtttgggtaagttatttaagatgtaattcaatttattcgtataacaataacctaagcaacaggctccatcactactaataaatagtcctaggtacttaattgggtcttagcatct

SEQ ID NO: 933 - DNA, 400 bp, Rattus norvegicus
  Genbank Accession No. AA945792
gcccagcaccccaaacagctgtagacgtgagccggtgtccacgcgtcagagagctcgccgaggaaaacgggtggctggtgtctgtaccaacgccagctgcgagttttgtccaacaggctcgctgttaggaaagactgaaacccgagctcatcaccctacttttacagcaattcaatggtatctgttactcaggatccaaatgtcttaaaagctgaaatcggggcaaagtgccgagggaccccaaggtggcttgtgacagatccagtcaagaggacagcaaaacaaacttgggcaccgttcatccaaggacacgtgttagttgtctaggaagggtgtggccgcattcttcggtgtgtgcgctggaagtcctgttcacaatatttacaacgagaagaaaact

SEQ ID NO: 934 - DNA, 468 bp, Rattus norvegicus
  Genbank Accession No. AA945826
catatttgaaaagcaatcctttattagaaccaatacaagagtatgaaaagagggaaaagagggtggaaggggagagaatgatgtctgaatcggatgtcagttatagaaagacatgtctgtttttttttttcaaaacatttacacttaaaatgcaaacatacatgtatatagatagatagaccacttatcctttaaagaaatcaaaagcaggcgagtttggctgaaatagaaccaagaaacacaaccaaaactcccccacaaaccaaaaagtccaccgagaattcaagacctcacttccacttagacacctggccacaaagtgtggtctgcttcccactcagaatggcacagcagagactgagaaaatccagcctcgaggacctctgaaagccctctccatgaggaggtgggaacatggccagcaggcaggggtaaggcaactgctggctactacttggcaggacatga

SEQ ID NO: 935 - DNA, 453 bp, Rattus norvegicus
  Genbank Accession No. AA945828
atccactttattaatgaggcgggcaagaggcccgggtgagggtgtgggggtttgctcctgtcccgctcagaggagggggtcacagaaaccaaaccaattcagaaaacttcagtccttgaagagaaggagctgggcccagttgccctgaccattgccagctgtagaggttttgcccactcaaggctcccagccccagagggcagacatgcatggggtggagcagcccctggaggccagtggagtgcgggtggaggcggcacggagccgaggagccgccccaggaagagggagcggcctgccgggagccagggagtagctggagtgggcagcaggagccaagttccaggccatggggaccctgcatcctgagcgcactgggtaagaagctgggacgtgatggatggcaagccagaggaggagaactctagccatcctgctctcttgctgttttac

SEQ ID NO: 936 - DNA, 570 bp, Rattus norvegicus
  Genbank Accession No. AA945875
aagatttatttatatattatatatacgtacactgttgctgtcttcagacacaccagaagagggcatcggatcccatcacaaatggttgtgagccaccatgtggttgctgggaatcgaacccaggatctctggaaggcagtcgggtgcccttaaccgctgagccatctctccagccccgacatttcatttcttcttacacgcacctcagcaggtcttttctctttgttgggagcagtggccatacctccattcctttatcatactgcctggattaccctgcctacctaaagcaccttctgaaggatgagatacaaagcctatgtcctatagccaaggggagcagaaggcaggattgtggtcagagggaggaactctgggaagagagaagcatgggggagtcaccacccagactcagaggggtcgggatgtgtgaatctgaggagaggtgagcagccacatggcagaacttaggatggtgtaaatgggataactgagttaggagaagctgggacaggcccagcatgaagcctaggcatccataaataaatgtaagtctgctgtcattatgca

SEQ ID NO: 937 - DNA, 598 bp, Rattus norvegicus
  Genbank Accession No. AA945898
ggggattaaaaagagttttaaatacaatagtatgaaaatataacttaaaaatataaaagtcagacagcatagggaagacttaaaaatctgtttgcccgttagacccataggtactttgtaggaaactaacacgtactcaaaaaacagtaacactgtcgcagcctgtgagacaggcttcagaaggaaagagttacaaaagccggtttttgagttaagaaaccattcctgttccaacctgggtcaaccagcgactgttaaccccaagcacgtcgcgtgtccacaaggcctgcagcctcggcaggagaacccaccacagttctgtgtgtgctctgttttcttccaccatgccacccggtcagacataggacagggggtctcacgaccccccaaagggacgacaacgaacgaacaaagctcttcgcttgcatatttggtcagtgtttgtagtgcaactgagcgggaactccagctgcccacagcccctcaggcaccggtcctcttccctcttctcagtcacagtagtctggggcgggcggagagcatgcagagacagcaggaggagtggaggtagaagaggaaggcagaggggaggggaagc

SEQ ID NO: 938 - DNA, 596 bp, Rattus norvegicus
  Genbank Accession No. AA945904
cttggtactaactttattagttatttttttcattgctgtgcccaaattcttgacaagaaggatttattccagtttacagtttgaggaacatagataggcaggcagtttttttatgccaatgtatgagatacaattttgaagccagagacatggctcagaaggtaagggcacttactgggcaaatctaaccacctgagtttaatacctgagtcccacagtgggaataaagaaccaactctgtaaagttgtcctcttacctccacacatacataccatggcacacatatgcccacacgcaaaaaacacacatatgtgcacaataataaataaaataataaaaagaaaagccctttaaaacaattttgaagcataaaggaaaaatgcccttatttatttaacttaaatttcttaccccttaagtattcacattaatacatcttatagtacatgtgaaatatgacaacatgtgagttatgcaaagtatactagattaaagagcaagtcaaatagcaaaggacctaacaattttggaaatgctactcaatcctctctttttctgctttattgatctgggcaaagtataaatgcctggaaac

SEQ ID NO: 939 - DNA, 671 bp, Rattus norvegicus
  Genbank Accession No. AA945915
ttccatttttttttattttttttttttttttttcgcaagcacctaactttatttcatacagataattccgccttgcaaaagaagaaatccaaatgtcatgaagcactcaacaccacatagaatttgcatgtgcacactgtatgaaagatccagaacttaacaggaaccatttactttttgcttctttagagtaaatttaattacaagattagaagacagaaaacgatcagttagtcttaatgataaacacttggtgaatcgacaaaagtaaaaggtctatactggatgcagaagtcaggcatggtggtgcatgccttgcacttggatgtctgcaaaagcagagcctgagagatcctcctagtatacatgcaagaacttgggcaggaggcgaggcagaagggtcagagttcaagaatagcattggcgacatagggagagaccagtgtaggttacatgagaccttgtctcaaaaaaacacaatacagaacaatacagaacaaaagaacccaaacaaaacatgagacaaaacataaacaaacaatcccccccaaaaaaagcaaaatggagatgaaagtaaaagtcagcacttctatttagtgatgatgtcacctttggtgattgacagctatgctcatactattgcgcaggactttcctgttcaaagaatgggg

SEQ ID NO: 940 - DNA, 477 bp, Rattus norvegicus
  Genbank Accession No. AA945938
aattttgcaattaaaaagttttaatgggaaagacaacttatatgtatagacctttaaagacagagggatggcagcttactttccttagctttagacagccttttcttcctggaatgagatttcagccaagctgtacctgtaactagcacggtttcccactgtgacttccattgggttggctagccagctatgtttagcgtgactatgaatctgtacttgaatgccactgatatgttagtgaaacatagggagaagttttaagtggctattgctagtcaggggatcacaaaaaatggcaagcttctctgttttcaggttttatgcttatgtatacactccatttccaatttatcagtgatggcagaggcttaatgcttctctcatactggaggctagcaatttacataccatttcaagtgacatttgtgtgccccaaattgtttcatatgatgtggaaaaggagtaacgaaagatctt

SEQ ID NO: 941 - DNA, 332 bp, Rattus norvegicus
  Genbank Accession No. AA945970
ttccattttttttttttttttttttttttttgaagtgcagatgggcaagtctttattgaagtcagagcaggggaaatgaggctgaaccctccagctacccgtagtggatccaactgttagacggattaaggcagtaaagcagaatcagcaggcagggacaaggactggaatgggacagagccatcagaaggtgatgctgtcttcgtacaatgacagcagcagcaggatggtccagccgcccagcagacccacgttgtggagcaggaaaagaagccagggccgctggtcccgcacattcatcatggctgggagcatgtcacagagcgccacgt

SEQ ID NO: 942 - DNA, 595 bp, Rattus norvegicus
  Genbank Accession No. AA946031
atgaagaacattgtttaaggctgaaggatgaagaaaaaaacaaaatagtaaaccatgcaagtggacataagaactgctgctggaagcaagcagaggaatggttcgccctcagctcgcctcagctcgtcagtccctggaaacaccaagagagagagaggcacacaggggaattagagaggtccctgccagagaggaaacattctgctgaaacactcaccagcacttacagtggccaaaactcttcaacttaaaacgtgaaagctttaaaagcatttaccaatcagaaggtacatcaacgaatgagtaagatatagaaacagctatgagaatactttagtgcaaaggtaattttaagatccttacgaaaatacattacaaagaatttgttaactaaacacagagagaatctgcccctccccacagggattatatttgtccccagctgggttcttaaaaggtctgtaagaacacacacactaagggctactgaggaccggggctccaggcctctgacacacggtgagaggtgggtgaacggtcatgagggtgtggaggcatagacagtcctcagcggagctggacgccctctgtctgg

SEQ ID NO: 943 - DNA, 630 bp, Rattus norvegicus
  Genbank Accession No. AA946034
  misc_feature (1)..(630): n = a or c or g or t
gaatgccaagcggtctgtactttcttttattatcaccatagtctttgcatcaagatacacagcagtgatagcaggtttctttttaaagcttagtattaaatattaaatatcttccccattttaattttacattactctgccaagaaagaaaaaaaaaaggatttaaactcaagttacttgaagcctggacatacttccatgattagccgggctacatcaaggcgtggctttgtttgtcctacaaagatgggaccaggttatacttgtttctgaaaagtgtgctacaaaaatggatggcctgtcatccgccaggttacaaagtaaggaggagggtaagggagggatattttcttcaagaaaaagcaacacttaatttctgaagaatcccagttcataattttttccccaaaatggctgaaggaatgggtaaaatctcaacatgagctcccacgtcctgtctgtgaaggaccagcagttgccttgctgaggtgactgctangaatgcacatgggaagtgtacggcccggaggctgtgccagtgggctgaagggtcactggtgcgattctctaagaggtttcttctagaagcagacaactcagactcttcgtcgtacttcagcaaagaagtta

SEQ ID NO: 944 - DNA, 454 bp, Rattus norvegicus
  Genbank Accession No. AA946040
aacctttccagtgagtttttattagtagttgcatcatgattcagggtcccagggtagggaccatcatatactgaggtcccccttttctatcggggagaaggtcaaagagcagaggagaggtgggcggagccaggtcagatcttcccaggaaatgtgccttctgctatgcggtcatcccaggctgagacccatgagacggggcagagggacttgtacactcgccggtaccactcgcacacggagacgtcaccgccctttgccgtcattgccttctcacagcggtggaagtccaggtagttctgccagcagttcttagtctggttctggtttgggaagcggctgtcaaagggggcggttttgtagttcttgattttagtcttgatgtcttcggccatcctgactcctaaagactgtcccggagcagcgttacttcaatgtgaccctttgcaaagac

SEQ ID NO: 945 - DNA, 629 bp, Rattus norvegicus
  Genbank Accession No. AA946046
gagaaagtagtaaagatttttatttgtcaatacaagataacacaaataaattaatttttacaacaatcttagactccagggtttctctatgaggttagctcattatgtaaacagactactatctaaaatgatcgagcaattatatgagtgttcaaaaccaacagaccatatccttccccctttcctcggtaatgtgtgttacagaacagatgaggttaacttggtggaaaatggtctcagtgttatcagactacagtggcaccaagttcatgtgaacctgtacctgtcatcttcttctctaacagagctgaagtggttgtcacacctgcaatcccagcactgggaggcagagatgggtacatcttctgactgagtttcaggctagccacggctacaaagtgagacatctcaaacaaaacacacaattaaaacagcataatatccaggaactaggggtgacacgcagtggtagagcacttgcctagcatgagccctgtctgggttaatcttcagtgatggaattggagtgggaaccatttgccagtatgaaaccaacatactgaattagaggttaaagtgcgaaagagaagaggctgcactcaaagcaagcagacctgtggatctctgta

SEQ ID NO: 946 - DNA, 493 bp, Rattus norvegicus
  Genbank Accession No. AA946120
agcatattaagactttattttcatcgcccagaacacagtcagaagtcacacaactttcattttcttttacaggtttccaaatactttcaatgaaaagcagctgagtatgacgtcatgtaacttacaacgctccataaactcatccttcagtattcattattcttgatatttccactcacgataatccaagtttcaaagtcttgtataaaacaaatcatatctacatggacgggtatattcctggtatattcctgtagagacagcaacactctgtggattaagatttgaacaataaaacctggaccacatcttagaagaccatggtcttaagcagcttaataattttcatgaactctacttgagtcagactcataattttatggaaaaaattgaaagcaagctgccatgagagttccgcttatccacaagcaatacgcggcattgtttagtcaatcaggaagatacttaaaagtttcacattactccagaaacc

SEQ ID NO: 947 - DNA, 416 bp, Rattus norvegicus
  Genbank Accession No. AA946167
  misc_feature (1)..(416): n = a or c or g or t
gatcaataaacaaaagtatttattcagcacccatgtgccaagcacagtgctaggcactgtggtggatacaaaaattaagacatagtccctgcccttaaggagcttacattctcatgagggaaacaaaactaacatacatgtagcagctaagaacagtacaagacaatatatgatttggtataagaattttagtacagatttgaagcttcgtaaggatttaaagaagacagtgaagtagaccttagttttaagattttagtgtcagggtcttgaaagactgaagaaacttaaattgacgtccctgctanggagaagtangagaagggctcagagaaagacacaaaatatgcatttgataagggctaagaaatgactgcagacttcggagcaaagtggctcaacgatacaagcaaggt

SEQ ID NO: 948 - DNA, 428 bp, Rattus norvegicus
  Genbank Accession No. AA946221
  misc_feature (1)..(428): n = a or c or g or t
cagcgtggtaatacatttattagttcagagctagaaagagcaagagtccaatagctttttgagtaaagactgtcttatggctgaggtctggtctgccctcctgactctactcaatttgccctgctattaaggcacttgagaaaggggaagcagggatgtctcaaaccaaacagcctcacggtcctgaaggcagccagcaatgtcccctcctggtcccctcagccactgctcagcatggagagttggcagggcaggagctccacaggacagaaaagtggcccctcaaatgctggtgtcaggcagacctcatgggggctgctcctangagcgttgctttggatcaaggtgtgcagggatccatgtcgaggaagacactggatataaggctttacggcctgaaggccacagctccagtctgcccctctcta

SEQ ID NO: 949 - DNA, 476 bp, Rattus norvegicus
  Genbank Accession No. AA946323
gtggaggcaaagcaatactttattacatcctatatggcacagcttgaatccacagctggatctaaagaacttgtctagcaaactgcagtatttataacaaatttaactacttattttactgtataaataaaaatatcctcagtgaaaactacaataattggagtagaaacaataatcagtactacagagctgtgtgggtgaagcgcatttcaacttgaattgtgtcagtgcaggttcagtggcaggcgttcgcagcagcttcctgatttgtagtgtggagtaagagctttttaaagtcttgccagagccacaagtacatgctctatgtactgctcttgacaaatagtaggcttcctgtgaagttttagttaaatagaattatttaccagaagaaaccatggttgatgaacaatgagctattacgagatatttaagagttatctagacattaaatgcattttcacagttttacatgt

SEQ ID NO: 950 - DNA, 586 bp, Rattus norvegicus
  Genbank Accession No. AA946349
aaataaagagaagtactattttaatttcacatcttggctacgttccaacataggcaatgccacaacaagtcccgagctcccacgctaagccaggctcagctcccctctcatcctcctagctcagcccttccccagaccctccattcccaaccaaacaccacaactggcaggtgagttccgcacaaaacctccataaaatcccgactggagcctgcagcgagccagagggtcagcagtggccctcatcgggtggaaaggaagctgatgtttggagcatgctcttggtgcaacccttggcacagacatgctcacgcctttcccccatgcatttctcaggacctgggtggggcctctgcacggggacaggactatgggagggagatggctgaagagcatggggccgtacccaggtcggcgtggtgtaaggcatacagggtaagggaggccatggcagcaaggaaagcattatggaaagaattcccagccagcaggacagacgtggtgcctgatggtccagtttctgagactgagggtgtccagtttaaagcctattgtgagcatatcggacagaagtcagtttctatca

SEQ ID NO: 951 - DNA, 527 bp, Rattus norvegicus
  Genbank Accession No. AA946379
gtgaatatagtcatttatttgtctttacagtgacgatggaagaatgtacaggtatcttctttcaataaagtataaaaatctgtttatatacagtgaagtataataatctttaattgggaaacgtatttggtactcctgatctgtttatattaaaactgtgggggaaacgaatatctcggtaagcgctacatttccagtcgatcgcacctggcacggaaagcgtcattgcatcttaggtcctgcttggtattataaaagactaatttgaagtcctaggattcaaaataaacatcatttggaataatagatatatacatcaaaaatacatctagaaaggcattggttagtgctattaaaaagctgtgtgctcaggtactcttctccttacaggcgaaacccggtggaaatgtttgaattccgtttctagcaatttgctcttggggaaggtcagtcgaaagttacctggtcatattcttactcctcatctccactgtccatgtcaatgtctacttcctccgtgtccacgg

SEQ ID NO: 952 - DNA, 532 bp, Rattus norvegicus
  Genbank Accession No. AA946421
tgcggtcgcttccagttttttttttttttttttttttttaaatgatttcatctttttattctgtgacctaccatggaacagtgtgtaacaaaagaacagcgattagattagcacagagtgtatcagactagtgtccaggaaacagcaactgtccctttggccagctccactttctcagcagatctcctaaattcacccacccatccagggacaccggtgcctagagtccacaaggacacagtatgccaaccatgacttctgactgatttaaattgcacaaagatagagctttaaacgtggtaatttttaaatttagacttatcttgaaaactctaagtaaaactacaaaagggagtgcatagcgagctagcattgcgtgggacacttagaaagcggggcgtgtatctccctccgtacagaccaaggggatccacacacatgaaatgcattttacggcgtgctacatcattcacttaagtacattgttttggcatttaaacaaatatcaaattaagctttaagccctcgtgcc

SEQ ID NO: 953 - DNA, 594 bp, Rattus norvegicus
  Genbank Accession No. AA946428
  misc_feature (1)..(594): n = a or c or g or t
agatgtctggacagcaaagtctttattggtaggtagtttatgaacagcttacgcttatttcatttacaaatgaaatttgggaataattaaaaaaataagttaaagactccaatctacatacacacatccattaactattttctcctaggtcttagactagaacacaaagcaataagagctgtaaccttactttgaatagtgaggaggatcataatcataacttggcctttatctgggtttaccacgaaagcagttagcaaacagtgccgcacagttatgttttagtcaaaaatgaggttcagacacaatatggtcccatacggtcctatctctttgtgacatcataagcaccttatattttttaatatttgttcaatggaactccccggggtcatacttctcaaaatccatcccaacaagtggtgcatggctgcaaatgatgatgcttggagaggaatttagctgtctactcagtctgcaaatcacaatgtggtggccttagtagttctaatgacttacgtgccaggaaagggtcccccttccccatttgcttaaaaagatctagctgtgccagtgccanaagttacttacttt

SEQ ID NO: 954 - DNA, 652 bp, Rattus norvegicus
  Genbank Accession No. AA946434
gcaatgaagtgtttattaaatggttaaatagagtgcaaataaactttcaagttgtcaatgcaatttacataaccttatggttttttcatataatttaaaatatatagaaaagtataaaagttgtacccaaaagcccacaaaccagtacccaaaatagctagttattaacatttttttttgccacttccccagcagagccaatgaatttaaatgtagctcgttacctttggattagagagttcattagaatcagtgttaagcctaaagctcacgagaacactcagaaccaagagaggtgaaaaattctacagtgtagtcagggccaactttgaacttgtgatcctcctgcctctgcccccagagtgccggaactataggaaggtaccagcacaatcaacctagactgctttttaaagaaagatcactttcttggtctttaaataaaaagagttattgacaaaccatatgaaaaagggaatccttcatggagatggtaatcaaatacaacattcaggcccctcctctgtctacccataatcaatatggctgccatcaagcaatatctattgtagtatctgagttcccatctcctctggcaatcgtaggcacgcacttcaccttcagtgggtagaattcgtggtgctatgaaagg

SEQ ID NO: 955 - DNA, 572 bp, Rattus norvegicus
  Genbank Accession No. AA946444
gagacaaggtttctcagtagccttggctgtccttaaactcactctgtagaacatactgactctttaaggggaaagaagacattatagggtgaggacagtaacacacacacagatattacaacttgagaattatctaagggactaactgcacttctgcctgatctgaaagtccacaatgaaggatgtttatgaaggaggtaagacaaaggatactgggaactatacgaacagaatggttaaaaaactggttagagaaaatcataaagacaggtgtagaatatacagatgaacaatctattggtaaaaggatttctgagttactgttgcaagatatataactatgtaatactttttgatagcatgtttataatccagatactcagaatctgaagcaagagtcttacttgaagcaaggagttccaagaatggcctggctggatactattgtaaaaattaaaaataattatgtgcatacacacaatcttaagtatccttaaggccatgaaaaaccataatcctaccctttaaattaaaaagagagggagagagagaaaacaaacaaacaaacaaac

SEQ ID NO: 956 - DNA, 492 bp, Rattus norvegicus
  Genbank Accession No. AA946448
gctgagagaattatttttaattataattttctgtataaaaacgtccatcagacagaagtcaaagggtgaggtggttatcaggaacagggcgggtggctccagcagccctctgaccctctctcgtgcagtccttgcttagagtcccaggcgatccacaggtccagggtgaacaatgagggtcagaggtggaaggctcagcaggagagtagaggagcatcagcagaggtcgagagaaggccagagtccagggtcaggctgtcctggtcaaagttgagtttcttggctggaggagtttctcctagcccttcgacatccaccaggtcactgttggcgtcggagtcgttcagagcactgagtgtcacatcagccttctgtttctttatgggaggacccccagcttcagggacactggagctgctgggcggaggggcgtttggaggtgagaggacaccggatgtcatcttcttgggacctttcttgggtgactcagct

SEQ ID NO: 957 - DNA, 414 bp, Rattus norvegicus
  Genbank Accession No. AA946451
gagagaaaatttattcccatggcctacctaagagcagccttaagtaggcagggccagcagtgagctgggtgggagcacaagttctgcctggtgtcaagtccagtgcttacaggacaccatcacaccaccttgttgatgatgacaccaagctcttcaatctcacactggacttcatcacccttcttgagaaagacaggaggcttcctaaacatgccgacacctggaggagtcccagtcaggagaatgtcccctgggtacagagtgacaaactgggagacccaggctatcagatcttcagtcttgaacaccatctggttggtgaagtgggtccacaaatcctatcctgaacttcagagactactggtagtggtgtgtaggaaatttcctttggcaagcactcgacttcaatgagcc

SEQ ID NO: 958 - DNA, 716 bp, Rattus norvegicus
  Genbank Accession No. AA946467
aaaaccttatttaataaaaggtcttaagatacagaacattcaaaagtaaataagttacatgggtacattacaatcacatccgcaagattctctttagtgtattaattttttttataaaaagcacacaaaaaataaaattttcggtctggtctatcacaactgtacacaaagaggtaatatttatatatatgtacactatttaatatgtaacagtcttttttaaaaagagtgccacaggcaacaaacacatgaaaggcagtgtctgaccattttgtttcaaaataaaaggaatatacttactttatgctattaaaatatctgtacaataattacagtcaaggctgtttctgtgctgtcctctccaacaaggcctttaatttaagagacaaatgaagaagagctctaacagctgcaaattttttttttgaggaaacaaacacagccaaatgtgggttagacacaactgttttttttataaaaatatgcatacttcctgtaaaaacctaagggtttaggctttgccagtctagtaataaataacaacccagaaaagtgagccccaataaaaacacttaaacagctgaggctggagtatgtgttgtactcttcccctccatctttaacatctggcacatgagaagaaagaggttaggtgactgaagcagttaaatataggcaatccctttagacatcatcggcacagggccctgtgccaa

SEQ ID NO: 959 - DNA, 557 bp, Rattus norvegicus
  Genbank Accession No. AA946476
agataacagtgacgtgtttactctgaaatgctgagcggcaagcgagatagatttaagggaatttgagaagccaggaaatgttctttcaagggttaggtccgtgcaaacaccaagtattctgccactaagctacatccacaaccgtctaggggagttttatttaagaggcaaatgtggaataagccttgaacatgggatcgaattaatgatgaaattccatggtctcaaaaagctacatggaaggttctggaagccaaccctggtggtctccaaccctggtggaacccccagaccatttgtacggatctctgagacacactttgtgcaggggctcaaaggtgactcaaaatgcagctgctgaaagtctagctcaccagcagccagacggcagcaccaagcctggagcttggtgatgcaagcctcagaagactccggaggctttgtcatgtgtggctttagaagccaggcatctgttgtgtgtgggacacttgcccagatttgatatcacggctgtgctcaagggctcgatgaaattttgttggctgcgtagaacaaag

SEQ ID NO: 960 - DNA, 518 bp, Rattus norvegicus
  Genbank Accession No. AA946486
ctttagaaatgacatttgtattaaaaatcttaaaatgaagagacagtgactaaatgagtggaattaaaagttacaacttgttagaattcttttggtacatcacaatcaaattttgctctttgcttctggaggaaacaccctgtaacaaataacaagacactttgaaaacaacagaaaaggggagataaaacctgaaatttgaacacaacgaaggggaaaaaaacattcaagacttatgggcttaacattaaaaaaaaaagctaaaattaatgaaacaaatggaataacaggtcctatttgtcctggctctttcaggaagatacttaaagtggttttggggaaagcagaacagcagattctgggatacggtgggaattcacaggttggcaccggctggaacagctgagtttgaaggcactctgcagacacaggggtgctgggggccctgaatcacatttacaaagtctttgtattgtatttttaaaagctagtcagcaaaatctgtcactgccaaccac

SEQ ID NO: 961 - DNA, 654 bp, Rattus norvegicus
  Genbank Accession No. AA946503
aactggggacatgtgtttattcagcagaaagggggagcccgttggtggggcagcgttaacacaggtggatggggagagctgatcaaataagagggatcagatgcttggtggaatcatggctggtggggcagccaggtgattctctggcaacaggaaagatggagcggcagacagacaggtgggacctgaaccatcaggccactgcacatcccagtcagccacgctcaccgtctgttcagttgtcaatgcattggtcggtgggaacagagaaaacgatgttgttatccttgaggcccagagacttggcaaagctgacgaatcgctccttcagttcatcggacagccccttggttcttccgtacagggtgactttgaagtactgtttgttttcagaggtcttctggaaaaataccatggcaaactggtcgtagtcagtgtcggccacttgcacatcgtagctctgtatctgagggtagctgtgaatattccccagggtgaactggccaggcctggagcttggaacgaatgttctgatccagtagcgacagccctggcccctgacgaggatggaagtgacgttgtagctattgtcttcctgtaactcatagatggtgctgtacatggtaaagcggctttgtctttctttctggaccg

SEQ ID NO: 962 - DNA, 682 bp, Rattus norvegicus
  Genbank Accession No. AA946509
atttagaatctttttttttctttttcttttttttaagcaatttccccactcccatgttggccagtgctgattacatgagaaccggccgcctatcgctggatacagatgcaccaatgagggttaaaaactttccgagcgaaaagtagaacagaaagaaaagaatctcctagcatttccccaagggttcactctcccgccacacacactctccaaaggaccgctacagatccaactctgcaagagaagacagagcagtgtcaatcggggaagccgtgaggaccagacggtgtccagtgtcgacaggcagaagacagcgctgcccggccctgtgtcccggggccagcactcacctatgtcagcttcttggctttgttgtagagggagtctactactttactcatgttctgaattgtttccagagcagcttcataagttttatctactgggggttcatcgaaaatgatcaggacaccctccccctggtccaaaatcccatgaaacttcttgtcaagaatcatctgtgataattttctttccacgtcggccttggagagtttgatgaggctagatatgtgttcgatctgtactcgggagaaaggttcaatgacccggatcagattctgttccagtaagttatcgtacaacttggccaaatgtgtgctgatgattgggtcgtcccgga

SEQ ID NO: 963 - DNA, 591 bp, Rattus norvegicus
  Genbank Accession No. AA946530
cgataaactccacagttttagtgtttgtgaaaaacaagctgctccttattttgttctcagtcagactcttatttttcccaatagtcatcatgtatttctgacaacagctggcccagtcttcaatggctgattctgaagtacacagggaagaactgcacttctaagtttcaaaaaatgagctgaattacggttttagtcttctgagaggtataagcatgtaaaaacacgatccatgtctcccacggacagtaaaaaacaatctacaaggcattggattaaaatctctacttggaggaaaataggtaattctggggaaaaccaaaaaacattattgtacagattttcattttgtttttgactattgaagctttatctcttctaaaggggagataagacagaacagtttactcttaaccaaatctctagcacttttagatttttgttccttcatgaatgacagggtctggtcttccactaactgagagctggaatgaccaataacaaaacaaaatccaaaatcaaaacaaggggccagcaaggatatatatgcaaagaaatggtggagagaagatagattcacaggagaaaatc

SEQ ID NO: 964 - DNA, 545 bp, Rattus norvegicus
  Genbank Accession No. AA946531
ccttttaaatgcttcttttatttcattggttgtacattgggtgagtgaactgaatattacaaccaaaacatagaattgatacaaattagagtcctgcttacaccgtgagataacgaatgagggaattctttaagaagtgttacagaaagatttagtagaaatgtgaccagtggcatatggctgaaagaatatttctgtgaagtgctgttatatcctgaaaaccaagagtgaaatggagttcccatacgagtggagttagtttcctaacttcagtaagctgttgaactgatatcttcctgtcttggatattggtgattttgtttttgtaattaaacaaagcatttaagatttatccatcatagtcagacttctgaatataaacaaacttttggcaaataatatttatacagaaaaatagttttagatcctctcaaatcccagaattattctagaaaattacattataaataaataaaaagcaaaatctgttgtacatatatttgtacatctatgcatttgccttgcttcctccttattggaaatgg

SEQ ID NO: 965 - DNA, 435 bp, Rattus norvegicus
  Genbank Accession No. AA955042
  misc_feature (1)..(435): n = a or c or g or t
tttttttttttttttttagatgtgtcatagatttattgaaaatgattgttgtagaaaccccaagccccaacatggatcaggaactggatggcagaggagaggggtggaagcaggctcaagacttccttattctttgaagagttgaaccaaccgagaccaagggtagctagaggagaagactggcctcagtcagggagccataatgacagcactggggccaggctgggcacaagaagtattgctgcatggtacacagtcccagatgtcataaaggaagcatagaacttcaccacttcctcattgggattgccctgggttgagtcaaaccacatctggatgcactggccactccctctgctatagttgctgaccttgtangagtgactccagagaccctcacaaaggctggctggtgtcgggaaatagtactgaaat

SEQ ID NO: 966 - DNA, 437 bp, Rattus norvegicus
  Genbank Accession No. AA955071
  misc_feature (1)..(437): n = a or c or g or t
tttttttttttttttttagcagtgccagtatcgtatttattattttcttttccatttgtttgctttccatggcaagtgaaaaaataatttaaaccaattatatgtacagaggcttggctactcttcccaagaactgccagaaagatctcagccccttaagtagcaaagaagggtcacctttaacaaccatacaaaactccacctagaaaagtctcatgtgtagaaaggttgtagttattacaagcatcacattttggggacaggaagggaagtcagagtgggagacgggggacagtgtgcagggtanggcgacacacacaccagcccaggggtcactctgggtgaggaagctacagccgaggagtttcaggtgatctgcagaggggtctccaacatctccatgangaaggtgtcaatgggggtatccccaatgagct

SEQ ID NO: 967 - DNA, 486 bp, Rattus norvegicus
  Genbank Accession No. AA955104
  misc_feature (1)..(486): n = a or c or g or t
tttttttttttttttttccagtttgaaagtgttttatttcagcatactcaggagaattaaccatgtatctttaagcagatagccccttcttagattatttttcttatactatctttagtggggaaaaaacagtatttttagtgtagaaatgatactgattctttgttaaaaaaagaaaatgtgaagactatactttttactatctgtggaactcagaagtccaaaagcacagaacacagttttcagaagagcaagttcacccatttatggtattatttccatattagaatataattaggtcatgtgtagttagagtacacaagaaactgatcttcagtaaagcacacgcaccatggaaactgtatgaaaggagaacacacttggactaagtaagaaccgtgcaaagttccaatttaagaatatgtgataaatattggttaaggactttaaacgcatgctctgttcanatacagctttttctttttc

SEQ ID NO: 968 - DNA, 556 bp, Rattus norvegicus
  Genbank Accession No. AA955162
  misc_feature (1)..(556): n = a or c or g or t
tttttttttttttttttcatattttaacaaactttcctttattaggttactgactgatatgagtcatcataaaacagaacagaacggggatttcagaactatacatgccacaaggctttacggtgatggtgccgggacggcagggaggtgtggtgagtcctggggcggcggagtatgggggacacaggagagccttgctgttcgccagcatccgtgagggtacggccgggtggagatcaagctgggatctatgcggctgaatgtgatccgctccaaaaccagaacgagtaagatttctgtctgacaaaaggcccccctcccaaaaaaggagaatgacctcaaaacgcanagggaatgacttagattctttatctagtctcggcaccacctctgtgccttaaaaattatactctactggaagatgtttatttattttttaaaaaaggtaccctacagcagctgcttaaaatgattcttacaaatatatctatgtaaatatattaaacattttcaacaaataaagtcatctactgtacctgtgcagaaatgaacagaa

SEQ ID NO: 969 - DNA, 498 bp, Rattus norvegicus
  Genbank Accession No. AA955164
tttttttttttttttttgaacatctggtttattggggaagctggtcatgaaaactgcaattgtcttggctgcaacttacaaaatagtgttctgatatttaaaataagctagtttccattcagtgagtataaatggtaagaaaaaataataacagcccttccaatatgtattcagagaaactcattcccaaatttcccccttgtatgtattatacagatatgttaagtctgtttaccgaggaagaccaggtttgtaattacatttaggtttctgttacagttcaaatctattctagctgtctgtcagtagagctcagttaaggctgagaggggcattgatatgtcttctcccgggatgtctgaatggtaaccctcataggccttcctacccgacctcatcacatccatcggtcgggaggaataaggcctagtccaccctcccatctagtctacgctggttctaaacatacacgcaacactgtacagatttgttaatatg

SEQ ID NO: 970 - DNA, 571 bp, Rattus norvegicus
  Genbank Accession No. AA955181
tttttttttttttttttgaatttttcagtagaattttattttgaaaataatacttcaccttgaagattgatctaaaacactttaaggtatgaaaattttatacaacttatctattacaaattaatcagaattcttcaattagatacactgtgttagctcacctacataaaaaatattgcacatttgtctccagatgttactgatgactaaactgtatagaactccaaactacttattctctgaaatggcaactttataaatattgtaactaaatgcactgtaaacagccattttggtaaacatgcatttattcacagatttatttcctttagataaatgcataactgctcaaaattaagatgctatgtcgaggtacaagaatgcacaaacaaatctatttctgtcttcattttgagggaacactgatcttggcaaaagcctggcattattttaaatgaactattgctggtaagaaagcataatactttgtcttctgtgttctgcacttgcacttctcttttttaagaaaaaatttgaaaagtgttgtttccagagattcagctatcactgt

SEQ ID NO: 971 - DNA, 165 bp, Rattus norvegicus
  Genbank Accession No. AA955211
tttttttttttttttttaacaacttaaataatttttattacaaaagaaagaccaaaacattcccaaaattctcccatgggttcccccctccatgcaaataaataaggtgaaggagacagactggaggagggggtggaagtgtggatcagcagaaaaaggagctta

SEQ ID NO: 972 - DNA, 395 bp, Rattus norvegicus
  Genbank Accession No. AA955240
tttttttttttttttttccgacagagaccctttactgagagcgtcttaaaacatccagtccttgatttgaacaagtttcaattcagctgctggctgacttaggtaaggcttcttggtgacaagaatacttcccatctataatatcaaaataggttcttgacttgtgtatgagcatcttcagggcctctgtcccatcttcttcagggttcgattaagctcttcaaacttgtggatctgccggatgaagaaatccccatagcgtcgggcaactttggtgtctgcgatgtggatcatgtccttatcaatgtagaagtccacctccgaggccgactggaattcgccatctagggcagaaatgccactggtccacaccaggttcttcatcttgtgcttga

SEQ ID NO: 973 - DNA, 361 bp, Rattus norvegicus
  Genbank Accession No. AA955282
  misc_feature (1)..(361): n = a or c or g or t
tttttttttttttttttggtgttttcaaaattttgtttattttgggaagttctaagtatcaacagggatcttgtctttattctcctcccttcttttctggtgcctccctgaacttccctcggcgcctccctcctctttgatgtgccgtaaattgtccagatctgtcacggtctatccttccgttcagtgtcttctcacatagacttgccgagtttccatttggatttgttttttcacttgtcacctacggaggcctttttcatccaaaattgtctgatttactgtanggaagatctgttggaatgtcgtcctggttaactgttgtgcggtcccagatgcctttgcagtataaaatctctgt

SEQ ID NO: 974 - DNA, 582 bp, Rattus norvegicus
  Genbank Accession No. AA955287
tttttttttttttttttggtgataacagatcaactttaattctagcacctgaagctatacaagggtccactttataaacgtcatggggctgttgtacacattcagtaaagtgagcactgtgcaataccactgagagtctcaagaccaggaaaacactttgaattgcttaaacacaatccacagagttaaaaacaaaaccagaagccatccacagttacactaattgtcaagtagaggttttacatgtaatacttgctataacagtcaatatctagcggggacattgaacgtgacttcacagtctcgtcctgttgcgttctgttgggaagggtttctgattactggccaccagtggatagaacaaggaccaagccagcaagcaaaagccatggtcgccgtggcttccacgttctctttgtcagctaacggtgaacagtgagacttaaatactcatctttacatatacacaaggtgcgctgtgaaagcatattcgcttacaaacatataaaaatacttgttaactagtttgataagaaaataacgtataaaagtatatagcacaaacattaatcatctctgact

SEQ ID NO: 975 - DNA, 506 bp, Rattus norvegicus
  Genbank Accession No. AA955305
tttttttttttttttttaaaagggaaaaaagtacataattctttttattaaaaatgggtaatatcttctcatgactgcacataggctccatctcacctgctatcgacgtaagggaatgcctttggcttctctatcagccagcccctcttcttaaaacgtggggctaccctcacagcaaatacatgtcaatccatttggtttctcttttaaaaatatgtaaacaaataaggaacaggaaacttgcttacagaggagtccagacacagacggatagaagaaaagggccagaacgcatcactcaggcaggtctctggcccccttgctgtcccatctgctgtccggggctcagtcactgtccgactcttccctgcacttggctcggatggcctggccattctgcaggggcatttcttcatagtcactcccgtaaatcacatcatcatcagagtcgttgagcatggaaaatgcaggattgtctttcagctgggactcatacagagcattct

SEQ ID NO: 976 - DNA, 157 bp, Rattus norvegicus
  Genbank Accession No. AA955358
tttttttttatttttttcatttagacagttttctttaattaacgatgaagacactacagttctaagtaccagacagaattgggagtaaaacaattgaacacaagcatgacactacaaagaaagcttggaatagtgaaacacttcgaaaggaaaaccc

SEQ ID NO: 977 - DNA, 251 bp, Rattus norvegicus
  Genbank Accession No. AA955369
tttttttttttttttttgctagtttatggatttatttttatttatttgcatacgtctatgtaagcatataccacgtgctggggggggaggggtctggaaggccagaagagatcgtcaatcccctggaggtggactcaaaggtagttgtgagctgccaaaaagagtgctgagaatccaactcgaatcctctggaagagcagccagtcctctcaaacaccgagccccctctccagcactcaaaactgttattt

SEQ ID NO: 978 - DNA, 324 bp, Rattus norvegicus
  Genbank Accession No. AA955389
tttttttttttttttttaatgtcttattttctgtttattattgctatttagtcacagaaaagattaacactttacaagaaatgtcctttatcatatgccatatagatataattttatatgaagagggactgtggggaaacaggatagctttacgaggaaataaagaaacagcaataaaaggattcttccatataaagattttgaaccaaattatttgttttcagaatacaaaaccttaattgctgtttttctctttccttccaacaattaaggttttgtattctgaaaacaaaaccttaattgttggaaggaaacctcgtgccg

SEQ ID NO: 979 - DNA, 408 bp, Rattus norvegicus
  Genbank Accession No. AA955443
tttttttttttttttttattttcctggtgcaaagatttattgctgaatctgtagttagctaagggaaggagagcttgcctctaccagcaacactgtctctggtctgcaggcttaagcaaaggtggcaggagaagtggctgggagatgtggggcattgtctctaatggtttaggcatggtttttcagtcctccctcccaagctatagggcctgaatcagaagggacgacgtggtcacatggaattgcctgtaaccttacacgggatattctttacccatggttgatcaataggggctggactctgctctgagccacccctcagtgtggcttcattattggtcatccctatgtcaataacactgtccttcgatacagcataccttaaccagcaagccctgcgtattgtgt

SEQ ID NO: 980 - DNA, 452 bp, Rattus norvegicus
  Genbank Accession No. AA955447
tttttttttttttttttactttgaaatagttttattggctcataagacctttgcatataaaaaaaatacccaaatcactatgcagtattaaatcacaattacattttctcttaccaattgtaactacccagaatatacattttttaaaagaaaaaaaagcctactgaacagaattttgaaatgacattatacttaaatactatgacaaaatagataattccttataacattaattgcacaaagctgccaggtattttcataagcataatcattgcacagagtgcaaatgaacacaatttcaatggtacacatttagctgaagtaaccacctccatctatggaacccttagtttctggcacaaaatgttggtctattttaactttccccaggcaaccaactccaagatccagtgacttttggccttcctcaagatacaagcatcctactcatg

SEQ ID NO: 981 - DNA, 411 bp, Rattus norvegicus
  Genbank Accession No. AA955477
tttttttttttttttttaacgttaaaaatgtgtttattaatatctgaatataaaacccagcagcactgttgtggctgacaagatctaaggtttcccagccagtgagaaaggccaggatctaggatcatctaggaaggagactgggtgccaggcacttgttaggtcaccaatcaaccactcagcacctggatgttaccctgcgcaggatagggcagagctggctaagtctgggctccgccaaggaaaaccctctctgctccactcagggcactggtcatctcttccttgacgtcatcccagtggtctttgtcttcctccagcactcgggctgtatggagtggggtctgtgggacctccatcgattgattgatccaaggatggttcataaactgcatgatggtcagcctctcg

SEQ ID NO: 982 - DNA, 460 bp, Rattus norvegicus
  Genbank Accession No. AA955495
cggccgctggagccatacctgaaggaggctatgggagtacggagcccaaagcagagacgcgagccccgacagaggtcttaatgaagctggtattgatgcaacaaagattttaagacaatggaagagcggaaagcaaagaggaagagtcccaagtccttcagtgcccactctactcaggttgttaatgccaaaaaaaaataccatcccagctagcaaaagcacagggttttcaaatcccgcgtcgcagtcaacttcccagaggccaaagttaaaaagggtgacgaaagaaaagaacaaacctccaggaggagaagggaagggtgcccaggccacacccatccagcactccttcctcaccgacgtctctgatgtccaggagatggagcgcgggctccttagtctgctgaatgatttccactcaggaaagctgcaggcgtttggaaatgaatgttccatagaa

SEQ ID NO: 983 - DNA, 423 bp, Rattus norvegicus
  Genbank Accession No. AA955506
tttttttttttttttttagttttttaaatcattttttattatctcatgttttacatgcaactatgtgttcatgtgcacgcctgatttccgtggagagcccagaaactagagctcgccagccataagtcaccacgtgtgacctgggaattaacctgggtcctctggaagaacagccctggaagatggctcttatctgctgagtcatcgctccagtcccaagactgtttccaaaaaccaaagcacaacaaaagatgcaagaaaaatttccccgactacctttctgtaatcttcagacttcccatttaatttttatttaaacataaatttaaaaacttgtggtgtaagccttagatccagcagtaaggcagatctctgtgagttcaaggctggtctacatactaagttccgggaatgccagggctt

SEQ ID NO: 984 - DNA, 378 bp, Rattus norvegicus
  Genbank Accession No. AA955523
tttttttttttttttttcttgtttgcagctttattaagtccctttactttctaaaacatgattacaagaaaagaatacttcatttacgtgtaacactgtcttcatggacgtaccgtggtcacggagtagaaatacaacatgagtatacaggaaaggagaggagagaccggtgtttggccctggtggccccctcacagagacacagaaagcagcagtggcagaaacagacaggggcttttctgaggagtgtgtgctttggggtcatagctgatgcttccagaaccttaaataaactcccttgctggctacaaggctggaactcggggctcagctcagagcacagccttatgaatgtaccctaggctgtgcctcgtgccg

SEQ ID NO: 985 - DNA, 429 bp, Rattus norvegicus
  Genbank Accession No. AA955536
tttttttttttttttttgtctattccatgtttattctctgggattctcaacaggacttgctttcccgggaagaactggtgtggttccccgtgggaagaggagccgaccaccatgtctaagacactcagaagtacacggagttctcactgttgctgtccctttggtcatcaaatttgcggatctgggccttgaggtgcctcagtttacccttcaggtagtcacagcgagcttgcttatccaggaaaccaggatccacccgcttcttctcaaactctcttctgacatgagctgccatgcgaacctccttctggcttcgcggcgggggcagtgacagcagcagagcctccagttgctggagcttagcctgcatggcccccacctgccgctggagctccaagaactcttcgtactggtcctgaaacactgcgg

SEQ ID NO: 986 - DNA, 495 bp, Rattus norvegicus
  Genbank Accession No. AA955540
tttttttttttttttttactagaaatcatccagtcatttatttttgtttataccagagatataatgaacatattaaaaagaaaaaatgtttttataccaacatgtttttattgtttgtttctagactcctccatttagaaaataggaaccacggtttcattaagctgtggctccttttcctttaacctaagcttagtttaaggaaaacttccctcgtacaattatgtaactaactttaatcaatacatagtaattatgcaagcctcaatacagtagctaactttttgaaaatgacttaacacaaactattaacaactaccttctttgaaaatttctctatgcaagtatcagaacagatttacttctcttttaattttcatttcctattttttgggtatgccttagaaaagtaaaattacatataaacattgtcaactactttatttgtaaagtcaagataatggattatctcctctaagtaattaaattttgcaa

SEQ ID NO: 987 - DNA, 445 bp, Rattus norvegicus
  Genbank Accession No. AA955552
tttttttttttttttttaccactctacttacaacttttatttaaacctttcgatttccatccatgcctaaaaatatagaagcaaagaagaaatcctgaaatgagaactaaattgcattttctcctgtctaaagaggaaagaaaggagaaacgaaaacactgagagcgccacagtaacaacactgcctgacagcggccggcacagaactcgtcctatcagacaagacagcggaatgaagatggtctgtggacacagctgtctgatgaagccgcctttaatcgagttttccattctgaaggctgtccttggctttctcttgtctgatgagagagatgactttcatgcatccttttgtgattttgatcatccacatgatgttcatcacatctaaaacaatacaagaagagatccagacaaaatggactacagatccaagccttatgta

SEQ ID NO: 988 - DNA, 387 bp, Rattus norvegicus
  Genbank Accession No. AA955564
tttttttttttttttttgagatttcaatacaatctatattatctcatatatatttcttcctgactttatttgcttgcttctgtcacgcatttaaaatatcacagagaccaaaatagagcggctttctggtggaacgcatggcagtcacacgacaaaatacaaaactagggggctctgtcttctcatacatcatacaatattcaagtattttttttatgtacaaagagctactctatctgaaaaaaaataaaaaataaatgagacaagatagtttatgcatcctaggaagaatggggcagttgggtagattcctgtcccgtccccagggaccactagcttcctgccactgaacttccccatggcctcacccatcatatctgcaggtaa

SEQ ID NO: 989 - DNA, 619 bp, Rattus norvegicus
  Genbank Accession No. AA955630
  misc_feature (1)..(619): n = a or c or g or t
tttttttttttttttttccttgttcacaaaagactttattatctagtgatgcatactgagaacatacagaaatctgcatggtccacttcccatgcagtagaacaatcttctcattacagtaagtgagtgtcaactgtttatgcaatagacaacactttaaagtcacattttaaaagaaaagcttcatttacaaaagaaataaaaggtaaagaagcaattaccgcttttaaaaagcagctgctttgttcaagagtggaaggtttatgcctgtattgaaagacaacatgatcacaaataatgcaaacaatgaacaaatgaaaaacacgtttaccataaagcagtacacttccaaaatgacatacaaatagttaaaaatctcattatgttgtctatcttttaaatatgaggactttgggaagtaggcctcaacattttaattagtaaatgaaaactatgcagtttctatgtcactaagaactgtatttaacanaatgtataaagtctatagcaagttgatttaaaaaaaagtaaagttaataggaaacagtacactgaaggcgctctacccatcaagcgcatacgcttcgaattttaaatgtgatgaacagaacagaaactg

SEQ ID NO: 990 - DNA, 285 bp, Rattus norvegicus
  Genbank Accession No. AA955684
tttttttttttttttttagaagaaaagatgcctttttattttacacggaaaccttccctatcatccccccaaaacccccatttcaagcaataaaactggaggcaggcagaagttcaaggtggcctgcttaggaatcctccagcacttccgtccacttaagagtcaatgtgaccctgttctataaaaccagaaggagcccagccacacccagttgtagctataagcaaaaccctgcaactagaagcaggccctgctgatcagaactgtaaactggtcacgtcactt

SEQ ID NO: 991 - DNA, 379 bp, Rattus norvegicus
  Genbank Accession No. AA955691
tttttttttttttttttggtggcaagaaaaccttttattcaaccgaggttcaaagagttctctttcattatttttaaggaatgaacgcgttttgatgaccagactttcgaaaacaaatctttgccaagtagtttatttctaaaacttcatttatggcaagtaactatctacagctatgtcataccataaacatgttaaacaaaaggctactcaacactgaaagccttctatgaccagtaagtctttaacaagtgcaaaaaagggatcaaaaccatgccattgacaagtaacttaccccaggactcctggacggcttgccagttttagtctttggaggtccccgaaaaacattttaatgttaccatgttactgctgctga

SEQ ID NO: 992 - DNA, 348 bp, Rattus norvegicus
  Genbank Accession No. AA955729
tttttttttttttttttgaaagtcagacatgacttgtcagcctttattagtcaagagtgaagccgggacctagagtttcctttaaaagacaaacagtcaaccaacccaaccttgtttacagcaaatgatgactgatttcaagtgagttttaattaaacgtttaagactacagatcaagaattgtttgttttccagtcatatgttcgtttgagattaaaatacaagtgtaaaacaggttaaagttagattcaccccaatgatttattccacaagtccaattgatagaatttcaagcacgatgtctagaactcaggaccaagggacaaccatagaatcattttacctttg

SEQ ID NO: 993 - DNA, 536 bp, Rattus norvegicus
  Genbank Accession No. AA955760
  misc_feature (1)..(536): n = a or c or g or t
ttttttttttaaccttttcattattttttggcacagctttgtgttcttccttccctgttcagtcattagagcctgttctggatggaaaccaaccatgtaccatgtagctgatggcttgcttcatccttccccagctgagcattctaggtagaaaccatattcctgtgatacaaccatgcgtatgactttgtatttgtttgtgttttaaacttctggatggagattangggagggggggaaataatcctgtggccagggacaggtgatttccaagtagactcgaacaagtcaagttcacacagtttggagcccatcataggaaagggtgctgcaatcccacacattcactgctgctccattagaatggttttgttttctacattttgtgtttactttcggagatctaaaacacagacagagccatcagatgcactggcacccactttgtctcctcgagcattccagcacacctcaaatatgccgcctgttcctcggtagctgtggacgagacttccactctgagtattccagatatg

SEQ ID NO: 994 - DNA, 407 bp, Rattus norvegicus
  Genbank Accession No. AA955771
tttttttttttttttttagcttcagccaccatctcatcatactcctgccggtgacgtaaagcttcttccacagacttcgcatgaagattcgatggtcggtcctcaagaatcacggcagtggtagaaagtggctcaaactcaaaattcttacgtcttgaagactgaggcggtactttacaggtcctccctgtccgcgcttcatactcctgctgaataattttggaggttttctgaagattttctctgggagggactttaccaaataatttccatccaggagcactatggacaactgatttgagttcctttgtcctttttgggaaaaggtttctggcgaagaaatccgcgaagccaccgctccgtcgagcccgaaccgtggtgcccccggggccctgctctgccgctgg

SEQ ID NO: 995 - DNA, 471 bp, Rattus norvegicus
  Genbank Accession No. AA955819
tttttttttttttttttagatgtttacagtgattacatttatctaagcaacacacatacatgttcagttgtaagacggtaactaaatttctgtgacaaatatgctttttttaatagcaagaacattatagagttaatgcagagtcctaaagataatctagtagtcgctatgttttttttcgtaagtcttcactttagatgctgttatttctagcacagtaagcaggcagagtctttcaaatgctcgaacactggaatctttggttgctaccctatcagctagcttgcaaacaagaagccagccatttaaagaatgtttttacgtcaacaacttgcaaacccccacaggtttctaagcatggaggaagagaagcagcagagcagaagattggagcaacatttgtttctccccagatctagaccttttagttcatatgtacactagccagtggttgtggacaaccatttactt

SEQ ID NO: 996 - DNA, 457 bp, Rattus norvegicus
  Genbank Accession No. AA955871
tttttctttttttttttaagtcaagtactttcttaaagaaacaatagcaccacattggcgtagctggccaaacagtaaaggggaaagcaaaacacgctgcgtcctgtcttctgcgcatcctcccaagtgcacaaactgtaacagaaaccctggagccgtggcgtctgagacggtttcatctacagacataaccacgttttacattgacattcaaagaaggagaaggagtctcaagcggcatgggtcgatttttttttttttttaaagataggatttttcaaggaaatgatttcttctaactcttagggtgaataggtgtgtgtgtgtgtgtgtgtgtgtgggtatttaaaaaaggatttttttttaaccgcaggaaaatagattataatggagagatgcattaactttttcagtggagtagactcattttacaatgttttcgagcacttgatagtct

SEQ ID NO: 997 - DNA, 336 bp, Rattus norvegicus
  Genbank Accession No. AA955887
  misc_feature (1)..(336): n = a or c or g or t
tttttttttttttttttcatgattccatttattaaagaaaaacatttccttacagtatgtcttttcaactgcataattcactttaaatttctgaaaagagtaaaactaacttttaaaaaatgctgggcagttaaaatgccctggttcaaagttgagctgttttgttttgtgtttttaaataggcaagaatatattcaagagaaaggaagcattagaaaggggagtcacctgtgacaacctgtcatgttagccttgacacaattcaacctctgtacctacacagccacagaagagagagagaaaannnaaaaaaaaaaacctttgcgcctcgtgccg

SEQ ID NO: 998 - DNA, 208 bp, Rattus norvegicus
  Genbank Accession No. AA955914
tttttttttttttttttggcagattagtcctttaatagaaaaatcccctggaaaaagtcaaaagccacatgtgcaacagtagcaacaacacacatttcctcaatccagacagtccagtttcaattcctcgccttgggaagtggcctgtacacacctacaaccacagcgtgggctcgttcaaaagggtccaatgtcaactggtcctgaa

SEQ ID NO: 999 - DNA, 504 bp, Rattus norvegicus
  Genbank Accession No. AA955926
tttttttttttttttttggaaaaaaaaatcaacttttaatttaaccaatcaaactgcatccaggaatgtctaaactgaacaaaacaaaataaaattctccttttaaaggaaccaagagcttacaccagccccacactcctaaggtctataccaaaagtagcccattttggagatgcctctgtccttcacatcctcatccagaggaagggctggggatggtgaggaacctgtaccttcctcccatcacacaggagttcttaaaagtcacagtgggtgagcttctcccaccccacttcgtatccatgctgagacctccagagagaggcaggcaggacagccccaggaccctcagggcttgcagccaatgctctgccccagtccactaaggcagctgttcccagcgccagggtggagttgatatgtactggaggagaaaatctcaaacgtcccatcatgtcacatgttcatgcaagtcagagcagaagcaatcccaccctaacctaa

SEQ ID NO: 1000 - DNA, 445 bp, Rattus norvegicus
  Genbank Accession No. AA955927
tttttttttttttttttacactcagtttttattttggagacccagtcatgcatactaaaattacatatttttaccatttagaaaaatgcactagaaaaataaacttttggtcaacactgaagtaggtgaacccaccacgtgtgcacatactcaaagccaaactgaatttcagtttggagtaaggaatgtgaccagggactaaaatggtggcctagattggtcaggaaaatagcccagttcccacccatcagagagggtatcgaggtcttggccactgagaagtttcaagtattctacctgttgggttcctatgccgagaagctgaggcacgtccacaggaacccaaagtggctactactaactgcctgatgggaaaaggttgaaaacacacataggaccccaggtaactgaaaaccagtaaatttggtcacaaaccctcgtgccg

SEQ ID NO: 1001 - DNA, 227 bp, Rattus norvegicus
  Genbank Accession No. AA955962
tttttttttttttttttgggcttttacaaatctttatttacatttcaaaggaatctgattgtgtctgccctagatggccagcaacgacggccaccatgcacaggagcagctcaagggacacagattctttcattagccttcacgatccaggtcacagccacctcggcctgaccccctctgctgcagattcagagctggggcagctcgcttactcatctctctgggag

SEQ ID NO: 1002 - DNA, 527 bp, Rattus norvegicus
  Genbank Accession No. AA955976
  misc_feature (1)..(527): n = a or c or g or t
tttttttttttttttttatgttgtggccatatttaattcaacttcaagtgaactgggggttgggggtgggctacaaggctcttcctgcttcacagaatgggtccctaacagccagtcaccacacgtaccctggcatgggctggctggacacctcaggaagcagaggccagagctaggacctatataggaagtgcgctcaccacagagggtgacctgaggtggttctaaggaccaaggtggaggacaagggacagagcaggcaaaggcaggcctatgggatctgtgacaattctctccagaccccaccaaacccctaagccgctgctaagaaaagaatggctcactcccataaccactgagtacagaaggagaagccaaactcgtcataagagttatctttcaattgcttgaactcagtcagtgcaaagtgaggtaaggaaccctgtgtcaccagctgggaagtancgctcacacgagcctccgtctcttggagtcacgccccacgctgtcgtcttcctgggcatcca

SEQ ID NO: 1003 - DNA, 479 bp, Rattus norvegicus
  Genbank Accession No. AA955980
tttttttttttttttttgcaaagattcaaccatttaataacaaaagcttcccacccttactcctcgacagcatcctgagcacaggaagggcacagctatgtaggaggctgtagaaagctaaggaaaatgaggatgtcagatggattcctgggttaagactgggtcgggcacagtcccctttggccagacaatggcatgaaccacacaggaggctggggctggccacacaccaccaaaagcatgacagtgctggctgatgtgtctgtgtttcactagctgcttctgccaagtccaaatttcagtgagggacgactagagctcacacaggtcttgtcctcttggcctttttctcagacctcacagcgtcgtcatgggctttcctcttctctgcaagcttgttggcctctcggattttgcgccgcttgccaaacatgatcttttgataaaggtacttctctcgcttcttcatcatcatgatg

SEQ ID NO: 1004 - DNA, 559 bp, Rattus norvegicus
  Genbank Accession No. AA955983
tttttttttttttttttgcaagacaaataaaagtttttatttcacacatgacatcatattgttttcagagtggtgccgaggcctctacaagcatgaaagggaagaaaaacttagaagggccgcttcagtttcttggcaacatgaaagtccaggtattcgtccaggaatctgcttgctacccccatgacagcgaggacagtcagcaaggccaaaatgcccaggctcagccggaaaccaatgatccttttttcagcggcttctgcatagccccagaaatacttgtgacgggcgtatatgtacaggagacccagacaggttgcaaaaacttgattgaaataccatccagccatccacagcgatatgatgaatacggaataaaactccaaagagttttgctgtgcgcgaaatattctctcaaactccagagagcccgtgactgctggaggtgcgatcttgtactttaatcttactcgtccgacttgcaaagcaaaataactttgctgacaggcagagagaacggagactgcaaccagcaggcttgaatcccccgccatctttc

SEQ ID NO: 1005 - DNA, 473 bp, Rattus norvegicus
  Genbank Accession No. AA956164
tttttttttttttttttatctgtagagttgttctgctttattacagctctgcagatgaaggatgcttaaagacatctaatgaatgcagaaactgaagtcatatccttctccaagctctgagtaagtggaaccagttaccaaacagctgcttttattccagcatctacaggctgtgagaggacgagcagtaactgcagacgcagtactacacaccctttatttaatcacagtggtaatggtacagtttattcttcagattctccaggcttacggatgtcatcaatcttcagaatcatcctaaccatctgtgtggcaagagagatctgctgctttttaccaatcaaggtttctatgacatgctgatactgcatatcattactgcccttgtgcagacagtcaatccccagggcaaggttagactccttcacttgtctagctcggacttcagtcatggtctggatgggattcatgcc

SEQ ID NO: 1006 - DNA, 426 bp, Rattus norvegicus
  Genbank Accession No. AA956246
tttttttttttttttttaagaattcaaaattttttatttctaaaaacaaaacgtgttccaatgcaacaccagacacagaggaagaggaaggctggcgtgccgatgctgcagaaccaatgccgcccacatggccctgtcttcagaacgagctagcaccattgaccgaggaaccacgcagtcagttgtgatcacgcctgatatataaaacattttagaaagattatttaactatggaataacaatttttttctagaaacctctttaaaaatcgattggaatttggcatttgaaatagacgaaaatggtttaaaaatggacctaattctacagcttgtcaaaaggaatgagtcattagttatttattttcggagggggaaaaaagagagagtgtccaaattgagcttttggcctccttccaaccaccaa

SEQ ID NO: 1007 - DNA, 501 bp, Rattus norvegicus
  Genbank Accession No. AA956278
tttttttttttttttttgcatttataaaaactgcagatttattcagcgagggcccgtgtccaagaagctatggtgtagaagtcggaggacctatttttcctcttctcctccccctcacttcgtcttcctggagggcaaaaatggtctggaccctgaaatcctaacccaaataaaaaaaaccacaaaactgaggttccaaaaaagttaaagaatcttaattccttatagaaaagagagaggagccaaggcaaatggggaggtatcccaggggtgggggaaatgccccctacttggtgggatacccctcctcttacatagctgcctctgatgggacaaagcttggggtatagcatttaaaaactcccacaccccattttatcaaaaccaaagagaacaaaaaatttcccttccccccacaaaacccaaatatatatatatactttttcttaaaaaaaaaaattccaaggcattaaagcgttaaagtgaatccagaacaagaga

SEQ ID NO: 1008 - DNA, 400 bp, Rattus norvegicus
  Genbank Accession No. AA956311
  misc_feature (1)..(400): n = a or c or g or t
tttttttttttttttttgagttgcctctatttgctttatttggtgttttatacaagtgactaaaataaatagagtaacaaaggcagctacacagtccccaacacaccatcagcctccttggactgctgtctanggtacccagcccaacccttcctcttcccagggtaccactgaccaccacccaccctggccatgaagctgactaacaactggaggtggtggtcatattctgggcttagaagggacctangaaagtgtatatgaagggactctccatataaaagaagaactgtctatttaaaaaaatactcccccaaatataagaaagtctattttaaccccccaaaaagcttataaaaaataaagctaaaaataaccaaaggtccccatctacccctga

SEQ ID NO: 1009 - DNA, 426 bp, Rattus norvegicus
  Genbank Accession No. AA956431
tttttttttttttttttaaccaaaaccatctttatttttttagtctttaaaaaaacaagacaaaacaaaactcttcttttcccaaaataaccatgattagcttagaaaaatggatgtatatcttcaaagtgtttccctttaacggaaacttcattttatagaatctaaacattaaaggtttgaaaaacacaaagccagaatccagcataagtcaaggaaatccactcatacttcaggcccttctcctccaggaaccagcattgttatattatttccatttagtagaatttgatctaattttgtaattcttcttccttctggtgtaatttcaaactctgtgacatcttccaacaccatattgacaaagtcatcaaatcctaaaagtgtacccacgatttctttatcactcttcatcacaatgtgaat

SEQ ID NO: 1010 - DNA, 439 bp, Rattus norvegicus
  Genbank Accession No. AA956437
ttttttttttgatgagtttgaatccattgctcctcgaagaggtcatgacaacacaggggttacagaccgagtagttaaccagttgctgacacagttagatggagtagaaggcttacagggtaaatcactgtttgtacaaaaacacagtataaaagaagttactaaatcatcgtgctaaaagtgttttccccctcaggagtttatgtgttggctgctactagtcgccctgatttgattgaccccgccttgttacggcccggccgactggataaatgtgtatactgccctcctccagatcaggtgtctcgtcttgagattttaactgtcctcagcaagtctctacctctggcggatgacgtggaccttcagcacgtggcctctgtcactgagtccttcactggagcggatctgaaagctctgctgtacaatgcacagctgg

SEQ ID NO: 1011 - DNA, 279 bp, Rattus norvegicus
  Genbank Accession No. AA956456
tttttttttttttttttacattttatgatatatgtttattgttcaaagggctacatacactgagactttgaaagccaagagcagaaatccctccttccccgccctgctcagtcccctgggtctgcctacccacccccacctcaggttcctaagcaagggctgctcaggcctgaaatgctaggcttggggtgggacgtggggaatgggtgagaagcaggggctatgggttggggactcaggtggatggcacagggtgtagtgtgtgtgtgtttgttgggg

SEQ ID NO: 1012 - DNA, 379 bp, Rattus norvegicus
  Genbank Accession No. AA956476
tttttttttttttttttgtggggtggggggtgggaagggcaaggcagtcattaaagacaatacctctcaaaggggcgagggtacagtgagaacacatgcagcacacgtgatcctcactgacagacaggggcagagacctctccagaggtcctgtgataaaacaaaaaggcctggcctccatctcccagggtgatgcccgaatcctttgtggaaaagacagctctcacatcagaacccgaagaacctccccctctagggtcccaaatttacttggtgacccagcctagcctggtgacacatttgcatagttaccttatgactagattagagagagagagagagagagacagagacaccatgcttctgaaagtgaccctca

SEQ ID NO: 1013 - DNA, 254 bp, Rattus norvegicus
  Genbank Accession No. AA956502
tttttttttttttttttaaaattttaacaactgggaaaactttaattccttttaactttaaacaaaatacaaaaaaaaaggcaaacccaaagagtaaagcccattagggaaaggaacggggcccaaaaccaaattgggccaaccgaaacgtaagtttccaaacttaatttaagggaaaacatgcagtatataaaacagggatggaaacagcaccagacccaccacacaaagaggcaacggtttttcaagcccaa

SEQ ID NO: 1014 - DNA, 402 bp, Rattus norvegicus
  Genbank Accession No. AA956530
tttttttttttttttttggtagcggacataaacgtttattgtcacagatggagtgcattctgacaggcttttcaaaggaaggaatacagattccaactcaccgccacatttccacaagtctgaaaggcggtgaacataaacataaaggcaactcctaaaattacgatgttgaaaagctttttagattccggagacattttggctccgcttgctcggaggtcaggagcggcccaagataatcacctccagtcgaacccccttacagtcctgagggaagaaacgagatgagagaaccacgcagccagactgccgatttccagtcctgagatgggaatcgcaggcttatgggaaaactctccccaccggcacagtccggacactccagggacgcgaccgagtgca

SEQ ID NO: 1015 - DNA, 496 bp, Rattus norvegicus
  Genbank Accession No. AA956555
tttgctttgttttgtttgaggcagagtgttacactgtagtctaggctagcttcacactcacaatgtagaccaggctggtttcacactcagagcaatcctcctgtcccagcctcatgaactctaggctcacaggtggcgccactatgtctgacctttttaaatgccgttccttgatatcactgtcccaccacggaacaaagtgatttccacgtacaccaaggctcaaatttctttgcacttaattctctgctcagcgaaggtagtctgtattgttatacaaatgagtttggacatgcatggtataatatgatgcatgcttctgtgtgaagacagaaatgacctttttgtacttatgggttaggttggcatttaagaaaccttgacatgacagccagctaaatggacaagagcccagtccgtgcacggatgaccacagctacatcttcacgctgtcctttgtttgctggcactctactgaacctgcagaagccatgtt

SEQ ID NO: 1016 - DNA, 349 bp, Rattus norvegicus
  Genbank Accession No. AA956668
tttttttttttttttttctaactcaacaattatttaatagttttcagaatataaactgcatagcatttttgaataaaaaataatataactttaagtccatgctttaggacactttgttaaacaagaagcaatctgtctttgatgaccaccacataagggtggcacacttcacagtgtcatctgcaaatagatatggagacagatgtacagcacaatgtatacagacaacatttaaatagaatacaacacatgatttcaagtattcaaacactgctttctggccaagtaaaactgccccggcctcaagggaagcaaacctaagactactgtgctgtgtgagaggaggacg

SEQ ID NO: 1017 - DNA, 207 bp, Rattus norvegicus
  Genbank Accession No. AA956693
tttttttttttttttttcactcacccattttttttattggattacttgactttgccaacttttttgttccctgtacagtttggacagtggaccccgttagatgaatgccggtcaagttcgccctgaaacgtgacgactaaaatttcatgcgatctgagtattccccggctatgggggctctgttcacaaagaccttgcttctgatga

SEQ ID NO: 1018 - DNA, 409 bp, Rattus norvegicus
  Genbank Accession No. AA956735
cggccgcaaaggtttttttttgtgtactgtaaaaaaaaaatttagctgtatcaaactagtgcatgaatagattctctcctgagtatctgtcacatacatagccccttagcccgttgtatattattcttgtggtttgtggcccgaaaaactcctacttgaaatacgctttaaaaaaatcgatgggggatgcttcgtgtgaacgtgggcgtttagctgcttctcctctcttaagtattcttttcctgatcactatgcattttggacatttttgagtattccaaatgatttagaaaagttcgttttccatgattgcatcttactgtacagattgctgcttctgctctctttgcgatataggaatacgaggatacacattgatttctttgtgcctgttttatgtgcacacatt

SEQ ID NO: 1019 - DNA, 493 bp, Rattus norvegicus
  Genbank Accession No. AA956769
tttttttttttttttttgtgtttaaaatagataatttatcatatgtacattgtaaaattacaagccaaacaatgtttatagagtatggtaaggggccaccggagtacacatacatcaggaagcatcgttaatagcagtggaaatcaaggtgactctcttacttctattaagtctaacatttttgtacattgtttaggtccacagagcaacttcccccatggacttatgtcccaaggtcccctgacagccacccaaggccatcatgcttctcatccaaggctgagatggccaaagcacttgtcaagagttggttcctcctggacatagtttccccagtgtggcttgtcctttcacttctatgctgagggaatggcgaaaggctctgctctctctggaatgggagctgaccgagctcggcacacttttctcacttacgtgatgtacccactggaacagtactcgagtcttaagaaaagagagaacgatgtcttcc

SEQ ID NO: 1020 - DNA, 486 bp, Rattus norvegicus
  Genbank Accession No. AA956785
cggccgctgcagccgcagcagccttcggccagtatcagcctcaacagctgcagacagaccgaatgcagtagaccagccgtctgatccaagtcaaaggggtttctctttccctcccagtttcccagtttttagtagctgatgagagagttaacgttcacctgatggctttgaagggacaaggcaaaggtagtgtgagacagaggtgttccttttctcggtactgctgcagatggaaaggggaggaacaggagggcgagaaacagtttttgaagtcaatcccaaagagcctgagttacacagaatagccactaggacacgatggcaggggtacccatgggacttcacttttgtatggggatttttatttttttttgctcttttttatagtatcagggaagcaaactgccttttccaagttagaaaacgctacgtgaatctagctgaaccagggaatacggagtgcacaatatgtagcttgaattacgt

SEQ ID NO: 1021 - DNA, 515 bp, Rattus norvegicus
  Genbank Accession No. AA956794
tttttttttttttttttctggaacttgagcacagacgcaacggaactgacaaatttatttaatgctgagaaacagcaaccctgaggcacaggcagtggtgatggcctggtctcctgaccttcagctactacggcctacagtcagaagggattcctgagcagtcactgtgaaaccggcgggtcacagacctgcacacacgaccctcacaacggagtcgctgacctgcctgctatgcagacagcaggcagggtggctctcagcatgtgagtacagagcaataaaatgtgcctccgtgagaactgaaaacattaatataaaaagtcaaacagaactaagttctggaaactacttataaaaattgaattattacaactaaagcagccaatcaaaatgcctgctgaggttttctggtagaacaacaaaaattagttggtgcccatattgggtaagttactaccactgaccaaactaaaaccccaaactggaaattgaaaagtgcatactgaaattaaatc

SEQ ID NO: 1022 - DNA, 542 bp, Rattus norvegicus
  Genbank Accession No. AA956907
tttttttttttttttttccaattatgtaagtattttatttatcaccaaagaaataaaacacagcagcaagttctgtgttggcttcaataagaccaaatggttactttttttttttttaaaacacagctacacactccaaaattgaagtcaacacagtcatcactacaaattacttgttgaaataatctatcctgaagaaaattaggaaaaagaatttaaacaattcctccaaaccacacatttataaatattgtcatatttaaaatgcttgaaaggcatgaattagtggaaaagcagttttcttttggcaacagaaaaaaagaaacccacaacagtttaccaaatgctctagggacccaaagctgtactgttctggacctgcacttgagcagcatcgtcatgatgatgactaaaaaatgcttttatactcacctctctcaagtaagtctatagaaaaccccattacagccagtgtttgtaatgtctaccacactgatcagaagctataaactgcctaaatatatttaacagtaaatacctaa

SEQ ID NO: 1023 - DNA, 401 bp, Rattus norvegicus
  Genbank Accession No. AA956992
tttttttttttttttttaatttaaataacggaagaagacatccttggcacagcagagggaaacagggtttggggttatgtgagaggtggctgcagtgtggccagatgggagataaaggcaaataatgactgagtcacagtgggctctccacacctccagtcaggcttagagtcatggctgtggaattaagagccctattagaagtcaccaagtggtgacggctccctgaatcccagagactgtctagccaaggagtgttctgacttctgttacattagtctctcccaaggaaaagggagagggaggatgaggatggatggctcacacacctgaagccccaacctgggataccaatggcctggaggacaaagaacacatcctggacgaagaacctcgtgccg

SEQ ID NO: 1024 - DNA, 474 bp, Rattus norvegicus
  Genbank Accession No. AA957010
tttttttttttttttttgggtagacaagacatttattcacctacaggaggaaccattgcagtgggtggctaccgcatcaacaataaattcacaagtgatcaaaactacaaacttttacactgtgcgatacatgtgggaatatgacagtgtgcgatacatgtggggatggtaactccatgtcacaaatgtcacacgttgctcctaaattcctagttttacttcttaaaatatacaacagattactagagaaacaaaatgtaagtcccaccaatttgttttttgaccttatatctctcagaaagtttttagatgttaacattttggaatgattttgaagctgtagaaacacaggacaaactgtcttctgtatgtgaggagcagaattgagagaccctcttccctgctgctcttgtgtagtaacccacattctaacacaattcgtacagttccctcgcttttcttcctgtgctgtca

SEQ ID NO: 1025 - DNA, 215 bp, Rattus norvegicus
  Genbank Accession No. AA957037
tttttttttttttttttcaaaatctaaacctttattgtttggcaatcacaaggtgacaacccctacttgcccaccactgtcttctcacaagctctgtggtcctgtgtgtgtcctgagaactgacagttgtcctttaactagccatggtgaggagtgccccagcaggggattttacaaccagctgctatagaaatgggaacagtgcacagacattt

SEQ ID NO: 1026 - DNA, 414 bp, Rattus norvegicus
  Genbank Accession No. AA957044
  misc_feature (1)..(414): n = a or c or g or t
tttttttttttttttttgccacaacaaagcaatgactcatttattgatggagggtctgcaggggagagcggggtggggtgcatacggaggggctctctcaccccaggcaataggcctctctttcctctccagcacttctctggtacgaactaactaatgcacaagggcacgagcacacagggacctatgggagccagagtgaaggtgctgggtcagcagtggggagctgggagatcagaggtaaggcaaagtgagagggcttggaggctgggtaaaaggttaagtcaagatctanagaaatgtctgagtgtgtcagaggtggagaactattcaggagtgctggggaagggatatgggatgaaagaaaggcttttcaagatttaaggatgtggagtgtgtgcctcgtgccgaatt

SEQ ID NO: 1027 - DNA, 263 bp, Rattus norvegicus
  Genbank Accession No. AA957160
ttttgttttttttttttaaattgtaatactgaatttttattgaagcacactaaatcaatccaattacaaaggtacatgtgtcacaccaagaaaacattttcagttatactaacagcctcaaatgctttccatttatcaaaacatccatttttcaaagacagttttaatgccacaggaaagaaaggttcatgatgttaagtgagaaaaacaagatacagtaccatatatgcagtatgatctcaactgtgaaatatttatacatt

SEQ ID NO: 1028 - DNA, 463 bp, Rattus norvegicus
  Genbank Accession No. AA957319
tttttttttttttttttgaaaaagttttctctgtgtaactctggccatctggaacttacttgtggtccaggctggcttgaacttagagatctgcctgactcttgagtgctgggattaaaggcaaacaccacaacacgcagtgcaaacaatattttcaaaagatattaaggaaatctcctttgataagcatcataaatattacataccatagctgcaccaacagcaattccagcaaagcccatctccgatatgggagtatctatgatcctcttgtcaccatatttcttccacaggcctctgctaaccttgtatgcaccatcatactgggcaacttcttccccaagcagaaaaaccttttcatctctttctagttcttcatccataccttgattaatggcttcacgaactgtcaactgcaccgccgcgggcgccgagcggtggaaacgcctcttcagcagcccgg

SEQ ID NO: 1029 - DNA, 265 bp, Rattus norvegicus
  Genbank Accession No. AA957335
tttttttttttttttttaaaaaggtttctgtaaatattttattttccatattttagaatcagaaagaagcatgtggtaataaaaataatagagaattattttcttcagatagtcccgctctgctgcgaaccgccagcccctccagtccagccccttccagccagctctcaccaggcctcgcggctctctcatgagcagccgctgacccggtatcagtcccactatgtacagatatattacaaggcaaaaagaaagcctcgtgccg

SEQ ID NO: 1030 - DNA, 400 bp, Rattus norvegicus
  Genbank Accession No. AA957422
tttttttttttttttttgagcgtgatctctggcagctttattggggggtaatcccttcccattgtttagtgagcacagaggatcagggaaggaaagaggaatgaagcaaaggaggatgggagaagagaaatgtcagtgagtaagtctttggtggatatggggacattgatttagagcctagcatggttctgggaataaggtcagctagttccagaagcacggaggtagcacagccacgtcaatcatgagggcgaggagagaattaaaagcggaaaaggaatgcagctgagaacacgtgttgtaaagctattggggtggtttctcatgtttcagagtctcatatgtctcctggttccgggtgttcaggcccgtgtagacagcaaccgatttctcacggctg

SEQ ID NO: 1031 - DNA, 476 bp, Rattus norvegicus
  Genbank Accession No. AA957423
tttttttttttttttttaaaggttgaaaacatttattcaacagggaaaaatttccttctgggagcagtggctccctcttgctttcaacgttcttgttttcaacgtgctgagcatccctgccgagtagaactggttctgcttcagtagacatacggtatgattcggtaaggcacgcgcttgcagtattcctgccaggcacggccatactttcgcaggcactgctgctcatctcgggcctcgcggtgcaccagcagtgcagtgaagtagatcaggtagaagtagggcagcaggtgggacagcccacagggcaaggaccaagccagagccatgatgaggtctcccaggtagttggggtgtcgaaccataccccaccacccagacaccaacagctgcctccccgtggcagtaaggatggtctcaagaccagccacactggggtcagaaggattctttctgaatgtatttttctgggaatt

SEQ ID NO: 1032 - DNA, 337 bp, Rattus norvegicus
  Genbank Accession No. AA957452
tttttttttttttttttcacgttctgctcattctgtcgttttattatccaattgtccgttacagtcccagtcgctttacagaaccaaccgtttccaccgctgacactattgtaaaccacatcggcgagttatacagaaagctctgcgtttcaaaaaactagacgctttagtaacaatattacaaaggctttagcttcaaaaataaccgaaaatgaaaaaaataaacttttaaagaattagcatcataaaattaatttattccaagtaaaaatacaaaataatattatgacgttgaccagatatgaaagtccctcccagaaacaactctagtaatgat

SEQ ID NO: 1033 - DNA, 435 bp, Rattus norvegicus
  Genbank Accession No. AA957500
tttttttttttttttttagagaagtgaatatatttaatatttatatatttatatatatatatatatagaacttctttagatggtctattaaggcgaagcacaagcacgtggactcctctcctggaggacctattccatctcttacagagtcccttgagctccatgacccggctgtgcccagaagagctggcagggtgtgttggttccacaggcactggcacaggcttatcaactccccagatggcaccaccgacacccctcctgccctggcctggccctgtgtgggtgacaatggcccatgctttccagagcctgcagggagctggacacactcctctctctcaacaaacggatcgggccaagggcacagtcgtcctgctccccacatggtggggacagtatgtcctggcccaggcagatcccactgcggtggtt

SEQ ID NO: 1034 - DNA, 522 bp, Rattus norvegicus
  Genbank Accession No. AA957585
tttttttttttttttttcctaggtaagcgctctaccactgagctaaatccccagccccactctttctctcttctgatttgggagtctttgacacaaagcggcaggcagtatttaaggtccaagtttactgaggaagacagagagtcttaggtttagagaaccacagagaacataggccagtgtcttttcaagtgtgggtgcagtgccctatggaggtttctcagtttgaacatccccacttagcttctcctttccctcccagctcccagcccctgagtaaatttctacttaggaagccacagaggaaaaataaaagcatagaaaataaagcgaattgtctattccacaaaaagcctttcccatctgctcagggcctagatgtgaaggcactggggagagggtgggtgggccatctgtgttaattgcctcatgtctttgggggaatgggagggagatggagagaaagtttggacacaggcctatatcctaagacagaggaggtaaagcgcccttcctccaacc

SEQ ID NO: 1035 - DNA, 390 bp, Rattus norvegicus
  Genbank Accession No. AA957612
tttttttttttttttttaaaaatgataatgaactttttattgtttcagtgaaaaaaaaatggtcagagttaaacagttcaaaggacagtttacttttttaaaactttaaaataccaattaaaaaaataaagctgattacagcttgatgttacgtgggcataccaaatgctgtatgttacagaacactgatgtgaagtttccggagagttttaccaggtacttgctctggccttccctcagctctagtccttgtgatctgttgaaaaaatttagacaagacacagggcagtgaagacgacaagagtgtgttaaatggtaaagtagggtaccctcaaaaggtgaacgtgggcagtgtccagagggaacactgtacaggtgaacaatttcaca

SEQ ID NO: 1036 - DNA, 507 bp, Rattus norvegicus
  Genbank Accession No. AA957624
tttttttttttttttttggtacacactgaaaataaggagaacgaagttgaagaggttaaggaagagggtccaaaagagatgactttggatgagtggaaagctattcaaaataaagaccgagcaaaagtagaatttaatatccgaaaaccaaatgaaggtgctgatggacaatggaaaaagggatttgttctgcataaatcaaaaagtgaagaggctcatgcggaagattcagttatggaccatcatttccggaagccagcaaatgatataacgtctcaactggagatcaattttggagacctaggccgcccaggacgtggtggcagaggaggacgtggtggacgtgggcgtggtggtcgtcctaatcgtggcagcaggactgataagtcaagtgcttctgctcctgatgtagatgacccagaggcattccccgctctggcctaactggatgccataatacaacactggttcctttgtggaccctcctgttcaaagcttttgcatgct

SEQ ID NO: 1037 - DNA, 424 bp, Rattus norvegicus
  Genbank Accession No. AA957643
  misc_feature (1)..(424): n = a or c or g or t
tttttttttttttttttaaagatgagtagtatttttctcagttacgttacagaaacaagtttttctccttgtaggaagattatagtctgataatgagcattattcttattaatcccattgaacttagggaatttattatatgtgaaggatgaaatacataactaaacttcttcaaaaggctcatggtataacctttgcattttgactatcagctagggcaaaatattacagtaatgtgtgtatgtggctcttcctaaaatgactgcagagagaagaaaagctgtagatttctagtgcagtacagaaggacttaaagcatgttattggtgtggttgtagaaactanaagctaatggggaggacctcacgttaccagagtcactgtcgtcagtgatcactaactatcctggtatatgaaagagctg

SEQ ID NO: 1038 - DNA, 186 bp, Rattus norvegicus
  Genbank Accession No. AA957676
tttttttttttttttttgtaattatatatactttttaatataaaacaatccttggaccaagccgaacggtagggagaaaggtctgaaatgacaactatgtacagccacacgggaagccacaagtggtcccccgtggggtgacatgtgaggcggatgatggacagcaggttacacaggtttcagcca

SEQ ID NO: 1039 - DNA, 463 bp, Rattus norvegicus
  Genbank Accession No. AA957736
  misc_feature (1)..(463): n = a or c or g or t
tttttttttttttttttcttgggatggctgctgcgagtttattagaaccccgagggtgggaaagcaacaagagggagtgcccaggacccaagcaagcactcagagctctgcaaacacgaaaatataaagcttggccacaaaggagctgactgtgccgtggcgataaagatccatcgtgacggtcaggagcaagtccctgggctcagggatgggcctggtgagggccaccaccccactgtggtggctcacctttcgggtggtgaaaaagccctcctcattgccagcggtgatggccagctgcatgctgtcnccagggacagcactggaagggcccatgcggaaaaccaccgcgggcacttggatgttggtggggaaagagaggtggtagtaggttattctcagaggcagcctgnggcactcctggttctcatggcaaggcaagcgctcacagcgggtgtctgca

SEQ ID NO: 1040 - DNA, 373 bp, Rattus norvegicus
  Genbank Accession No. AA957818
cggccgcggcccgggctcaggcctgagggccgtaccaggcgcaccgagccgttctgaggttcgggaactgcggtacctggacgtccccgccgtcgcccgcctcccttccgggctcctggtcgccgggtgggccttgcgggctttgttggtcgtagcactcgaagccctcgcgagcgcgccagccgtagttgcggccccgctccaccaggtccacctcctcgtacttgttctggcccacgtccccgcagaacaagcggccacggtgagtgccagacactgggtctccgcggtcgaaggagcagcgccacatgttacgcacgcctaaggcatagacctcgggccgcgctccgggatcgtccacgaacgggttgtc

SEQ ID NO: 1041 - DNA, 499 bp, Rattus norvegicus
  Genbank Accession No. AA957935
tttttttttttttttttaagataaaaacatttcttttaattggtcttggctttgatttgtaccgccaagccctggagacaccgatacaatttgatggtaaacaaacagaactgcggcagttagagagaacacagacccacttcccaggcaggcaactgtttcccaatccccctcatgctcccagaacactcacggttcctgaggatgggccgccatcgtgaaaacggtgcgaggttgattctatccctgccgcctggtgtactgctccacaccgctgggctgtatgacccacttggctctgttaccccatctttaaaacagagaagagggctgggctcagtgagtgaacttttaaaataggaagcgaggcgtttgctgccttgaccctaaccttcgtagacaggtgtcagctttgaacgtaaacccagcatgctgtaaccaggcacgttacactgcgcatgacctactgtgacgttagtaaggcgttacctccatcctt

SEQ ID NO: 1042 - DNA, 491 bp, Rattus norvegicus
  Genbank Accession No. AA957999
tttttttttttttttttaaattaaatagcatgatttaatttacttgctgcttaatcctcaatcctcttaagttaaaaaagaaagttataattaactattaacgttaatgaatttaaaccttccagaaacatgaatccaaaaggaaatgtccaacaggtgacacgagccgggtattctatggccttgctgtttcagttttgaacactaaacattaacggaaaagaaaatctctagggttttcagttttattcttctagagcacaactgtgtggccctgtcactaagcgcgctctcccagcaggtacacgatgaactcgtaggtggacaggacaatggcagtattggggatctgccggatgagctgagcaaaaagtcctcggtagaaggcgagatagccttcctcccggaataccaggcgtgctgtctgcatgaatgacgtgtacttgctgccttcttcccggagccgtgtcctgatgacctcgtgcgggtaa

SEQ ID NO: 1043 - DNA, 526 bp, Rattus norvegicus
  Genbank Accession No. AA958005
tttttttttttttttttctaataagactaaatttattcaataccctagagtaaagttttgattataagtatccaacagtataaaaagtacaaaacagatctgtagatttctaatatattaatacaaagtgcatgactacatacagtacatcctacaggcagagagtggagggggagaaggctgtggagaattgacccattcactgggcagtctgtgcatgtggtaccttgtactaggtaggttttttctaaaaggaagaaatacacgatgtaaaactgtaggatgacacaaactgtggcttttccttgttatgaaactctaaaagtctttaaaaatccagtttctaaaataatcatgagcaacagaatactaaggcagccacgtacacctcctctgtgaggtctcacgtggcactactctttttcctgaacttttgagaagaggcgattagacaacctcagttgggttccactgagaagccaaccgagtcattgagatccaagtgtggagctccactcagctatct

SEQ ID NO: 1044 - DNA, 451 bp, Rattus norvegicus
  Genbank Accession No. AA962998
  misc_feature (1)..(451): n = a or c or g or t
tttttttttaggctggaggacaattttattagagtttaaagaaaaactgcagggcaggaaagctgtaacctgtggccagcatccaaaaggaagatacagcaagttgtctgaaacctcgaagcccgttatcaagactgcagacaggcaggcatgctgcatgtgtacccacccacatgcatctcacgcacttaccggtatattttaattaccttcctctgtcttcctttgccaaagccaattactagatatgagacatactgtttgtggtgatggtggctgactttacaagttaattcatggattaagaggatatcaagataaaaatcaaagattctggacggnggggctggatcaagaatctaatcaggcatttttggttgaagggattaaatttatttgaattatgtgtaaatgttatgttctgattaaaaacaaaacctcgtgccgaatt

SEQ ID NO: 1045 - DNA, 355 bp, Rattus norvegicus
  Genbank Accession No. AA963000
tttttttttttttttttgtcactcggaaccagagggcacagccccgccaagtcttttatttatttaaacagtcacgaaaataaaagtgagatgtaattcttctttcagagccccaagaagggagtgcactgtgggaactcatctggctgggtcccaggctggagatcagagcccagccctgggggacatgagccttagccaggtgagaggcagcccgagctgtaggcaggcacgcagccaggcaccgcaatgctgaggtcacatagaaagtgttgggtcgagggtctaagccccaagcaccaaggtgtcttctgtgggcagacatgtccacaaccacaagttccagctccatatg

SEQ ID NO: 1046 - DNA, 459 bp, Rattus norvegicus
  Genbank Accession No. AA963102
tttttttttttttttttaaatatcaatgaaattgttttacggagtttattgacaactggttctggataaagttcaaaaaatgcaatttcttcaaagtaaaatagtgcttctgaggtcttttaaagtatttttttggtacaaaaaataagtgtttttctcaatgcttatttcaatactttgctgtaaattaagaagtgtttctcacatcgaatggttccgttaggcacattcaagtaaaatcataaaatatccaagttaaacaatgagacagccagacatgtggctttgataaaagtccgtccattctctggaatggaataaactgtcacttcccttaacccaaggctcgtggtttttggtgttaatatccattccctaacacacagataagcttcttttaaaaaaaaaaccaaagagaaagaaaagttcacttattctgcatccagaagaaccagcgag

SEQ ID NO: 1047 - DNA, 346 bp, Rattus norvegicus
  Genbank Accession No. AA963185
cggacgcaattgtttttttatttattattttttttcttttttgaatacaaatgctttatttaacagttgcaggtcattccatgggctaacgagtggatatccagaacccagcagcaaggtcagcgcaacctccgagcttctctttctgactccaacacggtgagcacatcaccctctcgagcagggcctttgacgtttcggatgatagagcggctggtgtcatccataaattccactcgcacctgcgtgcactgtccctgctatccggtcctgcccagcactttatctaccctatccagcttgatgggctgcgctcgactcgtgtccatgatggcggcctcttgcc

SEQ ID NO: 1048 - DNA, 430 bp, Rattus norvegicus
  Genbank Accession No. AA963257
tttttttttttttttttatcgtaacaggctgcatttagtggttgggtttttctcttttatgtacaagaaaaatgaattctattttttcggatttttcataatcttttgttgttttttaattacttttaaagcttgtccccccacccccaaaaagtgcatttttctttaatcagttgatttgttttcgttctgcctcccacactttttataaagattcttacatccggtcagtggaatgtctgttctgtgctctggacccccatgcaccaggcctggggccccaaattccaaggcacctcgttctgggcttggggtgggattcccctggccctctgtctcttggccttctgaaagagcttccctttaaaaccaaagaaacatttgtcagatggggacacaggaccctctaacccgccggcatgcactggaa

SEQ ID NO: 1049 - DNA, 175 bp, Rattus norvegicus
  Genbank Accession No. AA963286
tttttttttttttttttgcagctctgaggtaaacttttatttcttggctggcaggacctccatacccatgttcctcatggcactgtactctgcaaacagtggcagcccagtccataaagtgccacagcaagggggttggggagccacttcacattccaggctggaggagtgggga

SEQ ID NO: 1050 - DNA, 525 bp, Rattus norvegicus
  Genbank Accession No. AA963369
  misc_feature (1)..(525): n = a or c or g or t
tttttttttttttttttattttatcattaacgtttattgatgggatggataaatacagattgagaaacatccttgacagcaagatatcaaactgatagccagactataaaatgtatacaatatccttctttaaatttttttgcgtttttaaagttttttttacaaagagcccttatgataatggtcacttccattgtactgtcattcacctaacagcagtagagatcccaggagtagcacccaaaactcaggtgccccacagaggacagaagcaacagcagaataatatgctgagcagtacaaaanaaaaaatcagacaaaaaaacaaaacctcaccacacaattgtacctgagtgacataaaccggtaaaagtgtgactttgctttttcatttttctcttctttttgttctttggtctgataagaaaatgaacagttttgcgtgtggcaagtcaggtaataaagatcagtctccagttcagaaccctaaatcacacctacaaggctgctgcagcactgtttcct

SEQ ID NO: 1051 - DNA, 488 bp, Rattus norvegicus
  Genbank Accession No. AA963443
tttttttttttttttttgtaggtcaaggtgagtttattgtccaaatagcataacctaattgcattcaaaacctctttccaatccatcttcaaatccgagtccaaactagtcagaacaagttatggttgttgctgttttttttttttttaaagatcacttgacacttaacggctacgtcacatcagcattgtatggtcaatacaatgtgcttccccccagatttcctaaagaccttttctttcttattcacgccgatcctgctactttagcctttcctagtatcccaaccataaaccccacccacacctgttatagagtacaccgtgagagaacaatgttgacttgatatggcatcgcactcttaaagcaaatttaacaaaaagaaagaaaaaaaaaatccaagacaagagatcataactgatagatctgaggtaaagaaactctctttgaagaatgtgatcagaggaggaaagaaaacctggaaatga

SEQ ID NO: 1052 - DNA, 238 bp, Rattus norvegicus
  Genbank Accession No. AA963505
  misc_feature (1)..(238): n = a or c or g or t
tttttttttttttttttagggaccttggttactgctttattgctgtttggttgagtatagaaaatggaagcggctctggaagagcctgtgtacagagtagagaatatacaaagggacagaacgggaacgaaggaaggagacctctctccagcccagctaaagttgggctcaggataagggccacctanggcgcatgcaataaatatggtcctgggggggggaagggggggcaggaaga

SEQ ID NO: 1053 - DNA, 148 bp, Rattus norvegicus
  Genbank Accession No. AA963560
tttttttttttctttttatggttttgctgatttcttttaatgacaaggggagaataatcagcaacgagcacacggatcggttgcttattagtcagcatccaccgtgacagaattttctgtcgaatttgacattactcccatcctctgg

SEQ ID NO: 1054 - DNA, 169 bp, Rattus norvegicus
  Genbank Accession No. AA963590
tttttttttttggggttccccccttttatttaaaaaaagggcttcgttacaatttgcaaaggctgaggcagggccccccctttgcaaaaagtttaaaaaagccacaagcaggttcaatattttaaacccatggcaagtaatgcaaaaaatcatgaataaaacctaaaga

SEQ ID NO: 1055 - DNA, 409 bp, Rattus norvegicus
  Genbank Accession No. AA963661
  misc_feature (1)..(409): n = a or c or g or t
tttttttttttgaaacttcgtcgattccattgtgataagcgcacaagcagcactgttggtaaccggtactactttattaatgattttctgttacactgtacagtagtcctatggcaccccatccctttcacgccacccctcccccaccccgtgtgtgtaaactggtgacgtgccagctaggatgaagcttgccactcggccagcgaaaataataacattattgtgagaaagtggatttatctaaagtggaaccaactgacattctatctgtgttgtacgtanaatgatgaagggctccactgttgttatatgtcttgtttatttaaaacttttttttaatccagatgtagactatattctaaaaaataaaagctcagatgtgttaaccaaaccagcctcgtgccgaatt

SEQ ID NO: 1056 - DNA, 440 bp, Rattus norvegicus
  Genbank Accession No. AA963664
tttttttttttttttttaagtagaaaatatctgaaggtcaaacaattttttcctatccacaaaatgatgctacatcaacgtacatgttaaggagtaacatataagtaagcatatttaaggagataacagtgtctttacagttaccatctcgataggtatctgaattaactttctgcataatacaagtaggtcaaagtccagcagcaaaatattgcaacccagcaagtagattcagtttcagggtgttatactgtggaggagagtacacaaaggacaaacaatgataacttaatcatataaaacaagagacaaagctgaaatacagtctacttaagtagctcggtgaccaagaacgttaaatactgtgctaaaatgccatttaaaacataaaatctttaaaaccctttgtgcttaaattttttttcctgttaaactattta

SEQ ID NO: 1057 - DNA, 345 bp, Rattus norvegicus
  Genbank Accession No. AA963703
  misc_feature (1)..(345): n = a or c or g or t
tttttttttttttttttggattttgactcctgattttattattcaatttctttttctactaaaagtagtcttcggtggttgggaagcctggcctcccaacaccagagtcagtcggagctggtttttttgttgaaaggagtgggcgggtgggtgggggaccgggatgagggcagaaccccgctctgctggtagtcttgggtggagaagacgaactgcacttgacagagcctggggtgcggtgggagggggtgaggcangagtgacaagctggggaggggacccacctcagtcnccagctccattctcctctaatgtctctccactggtggcgttctctgcagtctt

SEQ ID NO: 1058 - DNA, 471 bp, Rattus norvegicus
  Genbank Accession No. AA963782
tttttttttttttatttgggatctttttttatttttatacacatgacaagattttacaccaatagtcagttaaatagtacaaatttacattcaggaggaatgttaaaaaaaaaaaattcaactaaaaaaaccacttcttcctgtgacccataatcccaacattttacagtgcaggggagagggaggcttgggggagcatccaaaacaagtctctcaaaagaaataactttaaaatgtcacattccctctccacacaggattcatagtgagagtataattacaattcatccttctctgtaggttcctgtgaaaacaaagaccagaggacattacaaactagcagccaactttaccttacagacagactcacatttaaatcatttctacggttttgttggtacttgattattggcaagataattcaaaactcactaacaagatcagtgcctaaatagaagtaatcaaaacttt

SEQ ID NO: 1059 - DNA, 402 bp, Rattus norvegicus
  Genbank Accession No. AA963815
  misc_feature (1)..(402): n = a or c or g or t
tttttttttttttttttggatagatgtttattgatactttttgcaagacaaaagaggcagtaagtagtggaacattaatagagtcagcagtaataaagtaggatattgtatggtggggacaggtgacagtgacaaggggttcaaacgatttatacatcattaagtgtgaggtgactgggtcaattccaaacaagttcatacaaagatccagaaaagtattaaaatgccagttcatcaaatcacagatgaaaaatgggtcaggtggtcagcacccctctagaaaattcagcataacaatgttaattatgataacacagttcactggggagcagaagaccagaactgggcaattcagttcgccatttactcttgcatcctgnggcctgctgtgagagacgactt

SEQ ID NO: 1060 - DNA, 534 bp, Rattus norvegicus
  Genbank Accession No. AA964033
  misc_feature (1)..(534): n = a or c or g or t
tttttttttttttttttaacagtaagcaatctacactttattattatcatcaagtcagaaagtctcttgttctaatgaaaggaaattcaatgaagttgacaatcaactgacatcatggaaacatccccaagcttatggtggaggaaagagtatttttactatgcagcctgagcaactctctccgggtttggtactacactataagactgatgtaaacagttcagctccatagtgagaagatttggcagtcctacttggtaacagtcaccactagttctccaagagaaccaacactttcagactacagattttgctcactagaagcaacacaaggaggcatacataaggctaaactttatagttaactactaacccttaactcttcaagttaaaactcccaactaaatcccgtcttttaaatcacttgaagtaatacatgaaaaggcttcatgtttaacaatctttaattcaaatgcaaaagttcagtacaagccatttgtanggcttgggttgttttcattttaaaaaaacctc

SEQ ID NO: 1061 - DNA, 447 bp, Rattus norvegicus
  Genbank Accession No. AA964068
tttttttttttttttttgatcttaaaagttgctttatttaaacaaaactgatgccaacttttctatctatatacaaacatgtttcagaaccagagccgcagacacacaaactgttcacacggaaactgtaatgcttgacatgttaagacaaagttttgttttctgctcataaagacattcacagattcaaaagtcattctgaaggctgaaaaacaccataccttcatcttccgggtggcttatgtaaattctaaagaatgggggatggaactttggagggtcaatacattgtgtttagtgtgtgacctatgatgggggctcacaaaatgttttgggctggagataaaattttgaataaaatataatctactgagaggacacttacgagacggaggcttaaatttttttcttttactctacttgcctatatcataaatataagaagat

SEQ ID NO: 1062 - DNA, 480 bp, Rattus norvegicus
  Genbank Accession No. AA964080
tttttttttttttttttccttctgtggtgtttgcctttattttttccaacagaaaacgtagggggtggggctgggaaaggacaggtaaaccaccatgtgcggagcctgcagctccaacatgaaactcaaacaagcctggaagaagccagcccttcaaaggacatccaaggcttaacagtcaactcagactgggaaccttccagaaactgagtaagtggccagtcagggatttcactggatcagacgccaagtggggcttcacgcaaaggcgcccggaggtctcctcacccaccttcctggactcagttcaggctgggactgctcactgcttgcctgcctgccgccctggcttcttctccggctggcctcggcctgcaccagggatgccaccccggccccggccaccaaacacacctctgccagcgccacccatgcctcggcctttctgctgcttctgctgctgcggtcctcctcgccctc

SEQ ID NO: 1063 - DNA, 293 bp, Rattus norvegicus
  Genbank Accession No. AA964114
tttttttttttttttttccggtagatggtacggcatataaacttttaattttaaaaaatgtacaataaaaatacattatcacacacgacacggaactaaacacatgagaagtgccacaaagaggccaggcagaagcagcaggagtcagacgtgtcctgtccgtgggcctcccaggaaggggccagggccaggtcaccagcctcactgagagttgctctccaagaccctactagtggtgcagttgttagtatatgcccacagcttgggggcacgggaactaagttagcactgca

SEQ ID NO: 1064 - DNA, 426 bp, Rattus norvegicus
  Genbank Accession No. AA964157
cggccgcaaaggttttaggaaagaacatggatgctattattgtagactccgagaagacaggtcgggattgtattcagtatatcaaggagcaacgtggagagcctgagaccttcttgcctcttgactacctggaggtgaaacctactgatgagaaactccgagaactgaagggggccaagctagtgattgatgtgattcgctatgagccatctcacatcaaaaaagctctgcagtatgcttgtggcaatgcccttgtttgtgacaatgtggaggatgcgcgacgaattgcctttggaggtcaccaacgccacaagacagtggcattggatggcaccctgttccagaagtcaggagttatctctggtggagccagtgatctcaaggcaaaggcacgacgctgggatgagaaagcagtacctcgtgccg

SEQ ID NO: 1065 - DNA, 276 bp, Rattus norvegicus
  Genbank Accession No. AA964212
tttttttttttttttttacaaaataaagtgtttattatgaaattagagatggaggcccctccctttcctcccttttccctcttccccagctgccttcccccctccccctccctttccttctggggcctgagaagcacacaagacaatgcccaaagctgggatgcccagggcaggctgtgagaacagagtcgggggcagttaaaaaactcaacccccccggacagtggaaagtcacagacagggatctctggagaaacacacagactgaggattgga

SEQ ID NO: 1066 - DNA, 516 bp, Rattus norvegicus
  Genbank Accession No. AA964214
cggccgcaaaggttttattgatactgacttttcaggacagaaggtaccctgtatcctctttatgactgacctaggataggatctaacgatctgtgctgtgtgcacattctcaccgagcacacactcagtgggcagcaggctgtgttcgagaacgcctgtgagtggttggccagctcattcaggtgaccagcctttgctggtttattttcataagaactaagagaaaactcaaatctcaattatgattgtgggaattgccccccctttttagataaaaataacttaattggcgtttgctaagttttcagttttatattaatacagtgatcttatatatgtttctgcattgccttaaaatgtctgtctctgatgggtttgggatttttttcccatctgacaattcacacatggatacagcgtgtcctgatctggtccaccgtgcttctttaattcttccgtttttactttatatcttgaagctactgttaggtcttactttctccttcttattgaacg

SEQ ID NO: 1067 - DNA, 495 bp, Rattus norvegicus
  Genbank Accession No. AA964259
tttttttttttttttttgcggaagactttttattttttatttattggcctgggacagcttcactgacgtttttgtatttgataatattatataggaagtccagatactagggggaaacccaggattctagacagagaccacctagacggaggccctggggagcagcgtgtttgacgaagttggggaatagccgggaagctggtgagataatgcaggtcaggccattgcaggttcaagagtgacgatgagcaagatagataggaagccgtgtagaggctttgagcagagcagattcatgacctgattttctatttcttttatctgaatgtgctgttgacttagttgtttatattgttcttccacactctggaggagttctcttatgctgttatcttgctgttctacaaaacttttaagtgacgttacctctgggtgctcccgagccccaggcgggttctgaaccaagctggtcagctgttcccctcgtgccgaatt

SEQ ID NO: 1068 - DNA, 531 bp, Rattus norvegicus
  Genbank Accession No. AA964263
tttttttttttttttttcaaggtaaataatattttaatgcagtattttaaaatatcaaaattaatgcaaaaatacaggataaacaatatgtcaagacggaatcaggattgctaaccggatcaactctttctgcgtctccaggtacggcgcagccaaatgaccccatctttgacaacgtatagactatctgaggcacgaccatgggatttggaaagttgggttcaacaccggcctctaccaggactttccttctctgttttctggttctcccatctgctttgtgtggaggctggggcattgccaagatggcctcctgacacatccctctggcctgctgcggttgctctgtcctttccctgggaggccgagtcttcggggccatagactcccggggctattaatatcttggccatccctgcctagagcagggtgtttaatgactagcagctgtggctccgccccttccccttcccccagagagataagagctgttcttgttcccacatgggggtagggaagcctcgtgccgaa

SEQ ID NO: 1069 - DNA, 458 bp, Rattus norvegicus
  Genbank Accession No. AA964302
tttttttttttttttttgaggtcaaagaagtcatctttttatttgtgtctgtgtgccctgcgtgggccgtgtatgtgagtcagtttaggggtccaggccagcccctgctagacgccactacagctcagagtggtgtgcggctgcctcagatatgagctgcaaggctgcccttggtgctggtagggcgctggcctgattgctgtgagctaggtgggatgatgcccaaactgccctggggacagtaggcaccgactacctgggaccatggctggtttgtgtgcatccagccattcatgtgtgcaggctgtggctcctggcacactgcacagctggaagatcacattgactgtccttgtgtcggctgccgaatcaggtgaagcactgagctgggggtacagggggtacagggcttgttgggctgcgtacttctgtctcacactcgtgcattcattccctgg

SEQ ID NO: 1070 - DNA, 438 bp, Rattus norvegicus
  Genbank Accession No. AA964336
tttttttttttttttttgatgctttaaatctaagtttattgtgacattaaaaaaatccagacaaaggcagacaaattcagctaacatggtccacactcctacagagcaatgaagattatagcatgctaaatccaattatgtggtaggaatgacatgtagaatcacagtaccgtccacccgtggctcacacagttcaattcatcagaactgtgctcagtagccaggtgtcgaattattgcacaagcttgcgggcccagcacgttccctccaggcagcgaggtctcctgcctcattctagcatcaggaccagaaagtcagtaccagattttacagtcacatttatggaatccataacaaacttaatttacttgtctaccaacctactctcgttagaggtccgcagatgcactaattggtaaccttcattattatactcac

SEQ ID NO: 1071 - DNA, 468 bp, Rattus norvegicus
  Genbank Accession No. AA964362
tttttttttttgtttttcaataattttattttttctaattttgtaattttaatttcccatagcaccttggcaatgttgaaaacaatacaaatacaaagatgctcatttaacagtttatgcatgagtatgtgtcacaccattgttacaggaggggagggcacgggacagttttgacaacagaacacatctaagctatggacaaaacagaagccagataactggttctgacacgccactccccgaacatttaagttacgtcactcaatggacacctgaatcattggaaaaacagtaacagaacattggtgtgggtatctctttacatttctagtcagtgttctgtgctatagaactgataacagaatacttggcccacagctcgcagacatcagagccgcacctttacgactgtgtaatgtgtaataagacacaacaaattgttagttttaaaaataagcattgttattt

SEQ ID NO: 1072 - DNA, 363 bp, Rattus norvegicus
  Genbank Accession No. AA964368
tttttttttttttttttcgtattaatcacaatttattgtaaagtcatgaaaggccagcaacagtcagtctggacaatacttgattgcacccagttgatgggatgtggacagcagcactgagttacacgatgagagcaacacttcattttccacctcctaggaaaatattggttagataaggcaaaggacgggcagctactgaacggtgatattaaccatgcaagaacaacacataggtgtgcaataaacatcattgctaaatcttgggttgaataggcaagggataaaatggatttcagccaagaatttgtaacaattaatgcaaaagattttaaagaatgtcttgtagctacctttacatta

SEQ ID NO: 1073 - DNA, 372 bp, Rattus norvegicus
  Genbank Accession No. AA964377
tttttttttttttatttcacatttttattagtagacagatgggcagaaaaagacaaaccactaaaggggaagccaacaaaatgcatcagataaacttctcataatttaaactgaaaagccatctacaattttagctaagaaaactattaaagtcagggtatccgctggtttcagttgaagttgcatctgaagcttttcagttgtaaatgtaaacctccttgagggctggggagagacccaattccccttccaatggacaggatcaaacagaagggaaccatggaaggaggaagcataagtctacttatggagggagggtcaggccttcccagttcccatctgccctttggttctttctgagctgtgatctga

SEQ ID NO: 1074 - DNA, 498 bp, Rattus norvegicus
  Genbank Accession No. AA964455
  misc_feature (1)..(498): n = a or c or g or t
tttttttttttttttttcggcttccattcatatttaatcacgttgaaatcagtctaacatcaagacatacatgtgagcacaaggagcttagccatggatagacgtgtctgtggacaggggcactgcaggaaccatcgcacttaagctcgtgtgagacccaggcagctctcgtcatgttcccttggcttaaggagaggtagatcatcagcaggaaggtanagaggacgctcttcaacagagtagccgaggacagggttctgtctgatacgaacatccgcagggtgctagcaggagcacacctgtcatacagcctgcccaaaacggccactagcatcttctcccaaaacatctcagggactggcaaggggcaagcgtgacagacactggatagatgtttctagaaagcagttcatttcacagaacctgcttaacgggacaggacgcccttctaacggacctctgcacacactagaacactagagcactgtccgcctcatc

SEQ ID NO: 1075 - DNA, 494 bp, Rattus norvegicus
  Genbank Accession No. AA964496
tttttttttttttttttgttactgcagcacttttatttctctttacacaatgacgtgttgctggggcctaatgttctcactgaacagtagaaaaccaaaatttgtcatttcttaaagaattgagtacaaaaaccttacataaattaaaaggatgaatacatttacaggtgtcgatgcaaacgttcccaactcaaggcaagtaacaacccatggaggtcaggagggaaaaaaccagaacagaaactgggtcctaaggctcggactttcccaccctgttagactggcaagaaaagaagtggtaactagttcaggaacccttgccagcctcgggaaatcctggaagtctgctgttggttaataccaagggaacagttaacttgaatacaaggtcaaaaatcagcaacaagttctacgatccagtgctgatatcagatacaagcttcaaggacaaatttcttttcaaaggcttattccagtttcatgaggctagcatg

SEQ ID NO: 1076 - DNA, 276 bp, Rattus norvegicus
  Genbank Accession No. AA964500
tttttttttttttttttgcatttaaacaacgtggtcgggacatttattggcattatgaaaagatttctttaaatggtataaataatcatgaactcaatctctccatctgttctatttcacgatgataaagcaaatacgggaataagtaacattcctgcttctacaccacagtttaacgcacaataagctaacattccccaaaggattatcaactgcgtcacactgtctctcaacagacagtcaattgtcagtccaaattctaagaaaatttcccgg

SEQ ID NO: 1077 - DNA, 367 bp, Rattus norvegicus
  Genbank Accession No. AA964514
tttttttttttttttttcaagatacaaattcattttattaatattaacttgtaagttatccagtcctgacagtgtgttaaaaatcaccttttaaaaagaccatgtagacattctgtattgccagaggccagggagtccacttggtgaggggagtcccggcacggccacctcattcattagtcaaagcagtcctgaggtgtatacctggggtcctcttcaggggtcttggctttcacaagcacttagttccatttgatctcggcattgccttatacacaggagctctatcacgtgttacttcagagtgagtacagggcctcgggtagcctcgagcgctttctggaatctggaattggccctcgtgccg

SEQ ID NO: 1078 - DNA, 480 bp, Rattus norvegicus
  Genbank Accession No. AA964535
tttttttttttttttttacgttcattcagagtttatttgcacagggtatttctggaatcatgcagaagaaatggatcaagacagtcatctccatggagagtggagaccaatggggaagaggtgaggtggatacttagggtttttaatcagatatccttttagctttttgagttctgtttttcttatgtattgactattaagaataacgatgattaattgaggggggaaagatcctaactgtggtggtaccatttcataggctggggtcccagactaagtaaaaaatcagtaggttgagcaccagcattcacctctctgcttcctgcctgccaacacaagagcggctgccccacactcctgtggccatacttctccacccttccctgtagcctcaaactgtaagccagaatgatcttgtctcagtttcttctttcctctcttttgtcaggagttgaaggctatttggttactcattatggc

SEQ ID NO: 1079 - DNA, 475 bp, Rattus norvegicus
  Genbank Accession No. AA964544
  misc_feature (1)..(475): n = a or c or g or t
cggccgcaaaggtttttctttttttctgtttgtcctggatactggacactgcctggaggaatgagacctgggagcaggaagcaaaggatgagctccgagagagggaagagagctgcctccagacacagcggccctctatgttcttcaggcgtcagcaatggaagacctcagatgacttgttttccagatgaaaacatctgtacaacacctgcaggacactggagaccagcagctgctaggacagaggcttcttaggactgacttgcctgaaggaccaacactgcccagcatccgctggtgtgtttggaaaggagctagtgggactctgtcgccacctgctagctcagagtggaactgcaacccagctgtctaaggcactgcaaactgttcccagtaaagaacagttggggtgaggggagctgtggaaaaatctgtanaaataaacgtttttactcctaacaccctcgtgccgaat

SEQ ID NO: 1080 - DNA, 458 bp, Rattus norvegicus
  Genbank Accession No. AA964563
tttttttttttttttttagaagaaactatccagtagtgtattaaacatcaataaactgaacccaacccaacccaaactccaaagccaggagaccctactaaagcctagcacttaagccatctgatttctactgggcagcaaggtgaaaaggggtttttattctttggctattgtacctaataaatgagtcactggcatcatgcacaataaatttattttgcataaaagaaaaagctcgccgttaatgaaaaattcagtagaaaagaatccttttgtttttaagttgggactcaaaagtagaacttgtttgttagtgaaacctcagtagaaagagaattgtttaagaaaacattcttgtcatgaaatcgctaacataaattctgtaatgaaggattaaccatgcaggtttattggcaaacagccagtttctgatggcttgtaatttttccctcgtgccg

SEQ ID NO: 1081 - DNA, 522 bp, Rattus norvegicus
  Genbank Accession No. AA964613
tttttttttttttttttaaacatgtaaaaattaaaagtttaattcaaaaagaaataaaactatttacttacaaaccacttacacgttctttcccctgatgcacattttaaaagtacaaatagaatatgaggatcaatataaagttgtttcacaacagagaaccaaagcactcattcaaaaagaaaactattacaggatacaatgaattacctctgtgcatatgtttattaatgcaaagctgtgctttactcttttttcctactgagaacttatttacaaggatgattgacaagacaaaatacatttaacatttggtagtgataaacagtaataaatgtaatagtggtacttcctatttctttatgtctctctcttcaccacatattatcattaatgaggcatccatatggacttcaggcttttctcctgcaaaaaggcttgaccattgggaccattaccatgaactttcccaaagagtcatctttattctatggaggagtttgttacagtaattttaacagt

SEQ ID NO: 1082 - DNA, 340 bp, Rattus norvegicus
  Genbank Accession No. AA964617
tttttttttttttttttgaaaaaaaaaattattttattggaactcatctgaacatcagatatacctggtgttggtcagcaagaaccgtttgtacatttgatatggatggtgccaaaaccaaaacagtgactgggcatgatgggaagagaagagggctgacaacaaaaacctgattttgaaaaggaaaataaaagccagtcagattcagtgaagatgcaaaccctggtacaacaaaatccttttacaaaatagaaatttattaccaaaacctggagggagactctgagaaaggctctaaagaagaggaagaggccagcaggaaggaggcgggagatgggga

SEQ ID NO: 1083 - DNA, 408 bp, Rattus norvegicus
  Genbank Accession No. AA964628
tttttttttttttttttaaataaaatgtcgttttaataaaatactgcacacatgtagttttcttatcaaagacaataggaacaaagtgcttggcgtgggtggaaacacaggcatcattcatagcaaaaaacaaagcattttgaataaatagctttaccattttttcttcttgaagacacactctgcaaaccagcccaggctggaggacaggcacagtcgggcttgggctagaggaaggagtcatttctgctccaggaatcaaaagtaacttcggagtgacctttggagagaggaatcctgactctccccttgccgttttgcccaagatctcagagtttaacttaaccctacaaaagcaccagcaaacaattgcccaccgtacaccacagggtccagcagcatggggtt

SEQ ID NO: 1084 - DNA, 394 bp, Rattus norvegicus
  Genbank Accession No. AA964630
tttttttttttttttttcatttctcatttttatttgacagaaaagttgctttttgctgtacagattttaaaaaaccaaaatgccttaagaaacaaagttgggggggggagggtcttacaaccttgttaagggggtgcaacagggccaaccaacttcagctccttcttcaaagtcgtgttgacttaccaagtccccaaaccatcagtcaccctagaattcggaggactagttccctggatcatcacaatcctagatgtcctgagctgtgcccttccctccctaaactaacattccctcccactccaccccccaaaacacatgaaccaggaaaaactcacagagatcaacatttcacaggaacaaaaaaaaggggatggggggagctctcccctca

SEQ ID NO: 1085 - DNA, 367 bp, Rattus norvegicus
  Genbank Accession No. AA964641
tttttttttttttttttaacagggactgagtgtttattacgtgccagacagagctaatcactttacatacattatctcatttaatacgcataaccgtaataggtagctgcttttattagcagctttacaacggaaggagcggagcgtatgttccccaggcattaatcctcatcagctagaaaatggtggaaccacgtttgggctctgctctcaggttctgtctccaaccatttggagactcagtgcccctacaacgaacaatccccagtggcccataatgaagggggctaatatgaggaccagcacctctaataatcaaggcatacagctgactacataaaggctaaccagagcccaggaacactgc

SEQ ID NO: 1086 - DNA, 439 bp, Rattus norvegicus
  Genbank Accession No. AA964653
tttttttttttttttttcatctattacaacaccaccactttatttgattgcgtgggagggctgatgggggagtaggatgtactgagtgactgtgatcactcatctactggagaaaatactatgtaacaaaagtaaattaggggcactactcctctgtcacagatgatttcctgggcttcagaacaaggtccttaatggataaagacagttcctgaagctccttccgagtagtattggtgacgtcatgttgttccttgtctaagtcatcgcttgacggatcctctccctgtccactcttcttattttgactgactaactgtttcacaaccaatccttgatattttaccaagagagtatgttgatcctctgggattttgttgtgaagaaaggcgatgatctgtgggacacatcttccaggtgcatggagcatgctgtgggt

SEQ ID NO: 1087 - DNA, 444 bp, Rattus norvegicus
  Genbank Accession No. AA964692
tttttttttttttttttgcgagttattcagactatcttttaatgaatccaacttcccagtgttaaaaaatcagggcaccaaaaggttaccaagcagccttattaaccagttgtatattaatacaagaaaatcacctcaaaacagcacacaaacaccacgacccccagagcacaatataaaacagtcctctaataaatataaatatttagtacataagaatgtgaagtcgcataagcaggtccttttagttagctaatgttcagctgcaaagtttacttattgcacactgcaccagtttccccaataaaacaggctttgctgttctcagtctttacaacagtaaagtcaaactttctgaaacccagtgtttgcagcgtttgagttaacctgctgttactgagcatgcacagcactaacatacaatttacaacagttccccaaagc

SEQ ID NO: 1088 - DNA, 437 bp, Rattus norvegicus
  Genbank Accession No. AA964752
  misc_feature (1)..(437): n = a or c or g or t
tttttttttttttttttagttttgtaaacagctaattttattccttgataccaattggttgttcatgatacatacttttctgcaagaaggcaatgaatgaaataaaggcatagaggggaaattggggaaaaaccacaatgtagtaggatgtcacttaattaaactcgtacttgattggctagttgttttagttacaatttcaagtcttatagatacagaattctactttttttccagaacaaacatatatgtccttaaagacagtgggggagacaacagatttttaactgctgagcttcttacttctaaggagaacagtcaacattgttacttcttgtccttcacagtctggaattcatgtgggtcattagcttctccaatttgattgctanggctatgtttcctttaatcttcaactttcctgacataaatgccat

SEQ ID NO: 1089 - DNA, 571 bp, Rattus norvegicus
  Genbank Accession No. AA964755
tttttttttttttttttaaatataaacttccatatgatttattgttgttccttgtacacaagaaacagtaatatacaagttacactgctttagaatgtaaaatggataaaatgtgtacaaaaaagcacgttcctagaacacagggcattggcaaatagtcaaacctgggaagtaaaaagcaaaaccaaaaacaaaaccaaagaaacaaactaaaacaaaacaagaaaaaccaacatttcttcaattcagtgtgcaacatataaaaaacagaaatactaactctacaggcagtatttcctgataaattatttaaatagcatatctacatagtctgagatctctattccaatggcaatgagaaaataatttataaaaataaaagcaatggtgtacaagatgatagaacaaaaccagaactttgaggagttgtatttaacatttcaaagctatttctgtattgggatcattctctgcaaaggatttttatgctatgtacaacactgactttttagacacgacagtagttttaagtttattgacacttaaactctttcttcttgattcaaaatcc

SEQ ID NO: 1090 - DNA, 486 bp, Rattus norvegicus
  Genbank Accession No. AA964756
tttttttttttaaagacaaaacaaatgcattaacacacatccaaatgccacagcaagcactcattaggttttataaaagagaaaactgcattgtggtgtcaaatgaaaaccaaaaccattttaagaaccactacagcttatggtgacatggatacatggacaactaagaagccagtgcatgttttcagctctgtggaaatgcatgagtaaggtgaagtcatggaaggtggagtggccacagtcacaccttcagacccttttccccactttatgttcttcttctgacttagtcagcaggtaaatgtacaaagaacttaatatcaaagaacacttccaaaagtcaaaaatagattcaaggtcatggctaaagttatcccagaggttaggggaggggggctctccaaagccatatgtcacaaaatgccaggcactaaatctagtcacatgtgcttgcagtaaaaaaaggaacactgatccctcgtgccg

SEQ ID NO: 1091 - DNA, 426 bp, Rattus norvegicus
  Genbank Accession No. AA964807
tttttttttttttttttcacaggacagtcttaactttattgaggttcttgatttaaaatggtttgcagtaaacagaacagcctgtaggggagcagcttcccaaatgttgcctgccctgtgacctacgggttgaagtccacttgacatatggattattccagatttctttttgtaattggtggtgaggaggtgatgcacggaagtagggagtatgaccaagagaaggcaaggtaaggctcagtctgcaaaacccaaactctagagggcctcaagttcaaccagttaaagcgtttcacagccactggtcaccccgctgtagctagtcaagaataaatcaaatactacagctttgccgcctcagcagatggtgagagagaactctaggccaagctttgagcctagagtgcactgggtgtcaacatcaca

SEQ ID NO: 1092 - DNA, 310 bp, Rattus norvegicus
  Genbank Accession No. AA964832
tttttttttccttttttagtttacaaaatgaattacggtcacttttaaacatcatgaaagaagaaatggatgtacacaccttgacacttttctagcattcttgaactaattcacaaatgcgagaaaataaaaaagaaaaacgggagaaatgaggaacataggtagttcggtgttaaaaaacatttgcaggaatgatgtgtattgttacagagagaagggacgcttccccttcctgttttgcgtgctatgagggtcatttttaaaacttttttttattataaacactattaaattcagaccgcttttttgg

SEQ ID NO: 1093 - DNA, 355 bp, Rattus norvegicus
  Genbank Accession No. AA964866
  misc_feature (1)..(355): n = a or c or g or t
tttttttttttttttttaatatacaatcttttatttctaggtttaaaaaaaaaaaagacttaaattatcaggacattatttacaagattaaccacctccatgtgcgtgaggtgttggggtgggccttgtacatgctaggcaaaccctgagcctagggtagtcacatttaagtcatcacactgggcatgaaggggacaccgagggcccctctttgtgccaggctgggatgcctgggacaactcattttccaaagtgaagccgaggaaccagtcttctgacggccagagcagctaacactgaagaaagaacctcaggcctgtanccgcgtgggctgccagtgatgggactgactgtc

SEQ ID NO: 1094 - DNA, 443 bp, Rattus norvegicus
  Genbank Accession No. AA964871
  misc_feature (1)..(443): n = a or c or g or t
tttttttttttttttttacgatttgggacatttattattcaattgcttctgaagagttattgccgcagttaggaaaggacttggagacgatggggacattagaggagacaaaacagatttcaaagaggcaagtaccattttccaagtataaaactggtaatattaaaaggaacacgtcagtatatccacatgactagctacctctaatacagaaacaagacagtacaatgtttgcagaagttactgtggcacctactaagccacatgatatcatgatactagacaccctacccaccctgtcaccggctaggtatggcatgcacacataaacacacaatgaaagtcttaagttgcactaaggttcctaatcatgaattaaaatggctgcagcaggtcnctctgaaaaacaccagcaccccatgccagcctcgtgccgaattctt

SEQ ID NO: 1095 - DNA, 361 bp, Rattus norvegicus
  Genbank Accession No. AA964944
tttttttttttttttttcttcttatctttgtcttctgccccagtagcagacacaggcttatactcaattcctgtcagtgacttgtactgtgccttcagctgaagaagttcttgtacggctgaatccacttgatccttagaggccttttcagctttaagtttccgaactacttctccttgacaagccactctgtcaaacagcagtttggcttccggtgtctctgatccaacaggcttggcattgctgacaggacttgaatgtgagttctgagatgctgggagttggccgggtacatactccttcgcagttttttctttatactcagctttcagggacaataagcattctacagcttcattta

SEQ ID NO: 1096 - DNA, 380 bp, Rattus norvegicus
  Genbank Accession No. AA965031
tttttttttttttttttaacttttttttcctccaagttttgacaccattgaacatgaccttcagaaatccattccccagtcatgaaaatgtactgtgctaactttcttttccatacaggaaacacttatagtcatcaaaaatagtgaataaaaaatgcctttgaaaacctggaaaaaaaactaaaaaagagaacaagaaaggtcacggcagggtcagctccccacaggcactggtggccactgtggccaggccctcggtggccacagcagcctgctccccgagcaaagggagcccacaatggagccctaaagtatgatggcatttcaggataagaggcaaaagaggcctcccctcccaggagaaagaaaagacacttgtt

SEQ ID NO: 1097 - DNA, 522 bp, Rattus norvegicus
  Genbank Accession No. AA965035
tttttttttttttttttatataaaggcgaattgattttatttctagcatctcaataataatgactgtggggactgagccggcctccaatcggctctcctccagtcagcacacactagagagcaaggagctccccctggcagtgactgcagcaattgaaagttatattttcatatctggtatagggatggaaacgtccaatatttttctttgtagtgagtaatgtggattcggcaaatgcattgtccggagagctttctgtacaggcaactggatccaaaatccgcagaaccttttcagccatcttctcagctggggtactgcagacttctgctgttgctggagtcctcttcggatggctgatgccaacgtttcccagcagatgagcgtgtaccgcctctgccaacctgtggtttgtgagtgctaggtctgccgtgctgtggggctgtgtgttaagggagtatgtctgttctctcccccactgttaggagaccaagagttcttccaaaacctcgtgccgaatt

SEQ ID NO: 1098 - DNA, 201 bp, Rattus norvegicus
  Genbank Accession No. AA965075
tttttttttttttttttgctgctgcagcctagacctttattaaaggtgacaggtcaagctatgctgaggaagagcagcttaggggtgggcatcgaggattggcactcacaggaggatgaatggctttctcctgttttctctggcctcacccctgctgccagtctcctttgatcctgttgctctggctgctccggctgtgac

SEQ ID NO: 1099 - DNA, 307 bp, Rattus norvegicus
  Genbank Accession No. AA965118
tttttttttttttttctgctatcttcctttatttatatttgcagtatgaaacacaagctctgcacacatacttgcacactcacaccagccttggggagggagctgggacaaggccacttggcagcagtgctgggaccctcagggtatgggagatccagcaacctccattctgggactctggggctattgccagggaggccgtgttccccagggccaaaggccagatgactggtcaaagtgcaaggtctagacaaacgcatggccatttgggcccgaagtcctctgttacaccccacggtgatcctga

SEQ ID NO: 1100 - DNA, 494 bp, Rattus norvegicus
  Genbank Accession No. AA965120
tttttttttttttttttgaaacactgaccctaataagagtcagcaagaaatacaggatcccttccctcccccggcctgcctccgctgaagccaccaccaccatctctgtggctggatgctggaagagtcctccatgtttgtggactcaggatgacagggcagcctccttctgtggttgttgggcttgtgaacgctgcagtatcttttggctttccacgtctctaaaatgtttttcaactattttgcgtacatggctcagtgcgctcccctctttgcctttacaattttccacttgatatgggggtgtgataacaacttcttccatgactacaatgtttttttcttgccatttacagtctttaatggtcttgtgaatggtctggaagagctgctggccctccagggagacgccagcgctgattgcataggcctggctcagcttctcctccttctccgtccgtgctttgctggcaagcttactaacattgagtgaa

SEQ ID NO: 1101 - DNA, 498 bp, Rattus norvegicus
  Genbank Accession No. AA965122
  misc_feature (1)..(498): n = a or c or g or t
tttttttttttttttttcgaaagccacctctttatttcgcattcctgccgcgtgaccagtttgcatgagctgggaatgagagggttgtggagggaaaggcagagtgtctgggggcagactctcctggaaatagtagatgcacactgctcaggcaggttagactggagaagcaatttcacgataaaccctacagaatgagaaatgtacaaagttgttgggtggctgctggcctcttgcctccccatgggggtcagggttacacccatcagtcctgcacaaaggtcctgnagttgacctgnggagctgcaaaatcttccctgngggacaagaacagtcttgctcacccagcagatgtgccaacgaataggcacatgggtgtgtgcccagttgctgtggtttccccctcaggttccatagctcctcaggtgtgtcttcctcctgcctctatgtcctccccttaaaggtgttcatacaggtgtaagtccccgagaacctgtg

SEQ ID NO: 1102 - DNA, 528 bp, Rattus norvegicus
  Genbank Accession No. AA965162
tttttttttttttttttgtaaaaagaataactactggatgcagtggcatacacctttaattctagcattcaggaggcaaaaggaagaggctagccacgactacataaggagctctaggacagccaagaccacagagaaagacttttgtcttaaccccgtctcccactcccaagaagtctcctcagccccaaggcttgtacaacacagacacctgataatcaatgatgctgaccatcctagagccctcccagcagactgtggcttagagattacagtaggcaacaatgctttatctgttgttacgcaggatattagaaggcgtaagactaatgggacgtgcctgtaagagtgggcaaaggttcaagaatccaagagtatgtttttccccttcagactggatacatgtccttttgaagatatcctacaacccactgcttcccttctgtccacagttgtgcaagtttctttgcacatctgggtctacagatgtcaactggctacctacatatgtgtgtccaggggacctca

SEQ ID NO: 1103 - DNA, 522 bp, Rattus norvegicus
  Genbank Accession No. AA965168
tttttttttttttttttcactgactgaataaagctttattccaatgcaaaataaaacatgaaaaatttatatactcatatacaataacatccaaaatgtcttcggtgatataaatgggattattttaaaaagtttgtaaagaattcactctccattcccatatgccaaactatgatttcacataatgtatctttagaacgtatgaacagatgacttgataatcataaaagaacagggaagactacagaaagtgagggtatagacaacaggctttgttttatgttgcactagtaaatagttctgcatatggaacggaacactttctgaagtgatcaagagaggggctcgaagcgtctttgggaacggctcacttcccactcagcagccaaacctagcttttaaaagccagtctgtgggcgactacatgactggagggagaaagagttgtacttggaagccacagttgcatatgagagtcctggcttattttagtctctatttttcctcttttttatgggaaag

SEQ ID NO: 1104 - DNA, 519 bp, Rattus norvegicus
  Genbank Accession No. AA965190
  misc_feature (1)..(519): n = a or c or g or t
tttttttttttttttttgccaaggtatatacacattttatttaaaaaagtttacagttttcattatacacaactattaaggaggttatagtcagaggaggcatttgtccaggtgacagacatgcccactagatcatcacaatgcaaggaaggcggaagggaggagatagggccagggggggaaagcagtaaaaagcttagatttcaattaagggctggtaagtcccttttctcttcaagtatcacgcatgtgtaccaaatacaatcagtaattaaaggccatttcttcccacacccacagccgagtaattgctaaaccaagagccctggccactcctcaggtgagcaaaatgctgcacaccatggctccccaagggccatcacaccatccaattcctaaagagctggccaaggtgttcagtggccanaggaagatgaacatggattcagaagtccaaagaatgcagttctttgtgcccaatcagaaatgagttggtttccctcgtgccgaattcttggc

SEQ ID NO: 1105 - DNA, 442 bp, Rattus norvegicus
  Genbank Accession No. AA965207
tttttttttttttctataacggggatgtttttattgagactcgggaggtcaaaaaactcagaccagggaatccggacctgatggatatcagggctttgccagtggtagaggcggccccatgggggcaggacaagcacccactcctctgtcttcagcagcgtctttagcaaggatgccacccggatatagacatccctgcggagattaaagccttccggggggttgacatcatacagaaggtaccgtctgcgggatgccgcccccgacaggatgtccgccgccgactggccaggccagaattcttctcctgaagccgagaccggccgccaggatgctgctgccagcagcagacagacgacgctgagcgccgccatggccccggcggccacgcacttccggctgccgcgccccgctccggaagcgcgcctgtctgcccggcgga

SEQ ID NO: 1106 - DNA, 413 bp, Rattus norvegicus
  Genbank Accession No. AA965278
tttttttttttttttttcacgtgcttattttattgtactggatcaacctcatctccttcctctgctgcagtagaccgtagtagaaagcaactttctctctgcggtaagcacaatgccaaatcttgtcactagagggcacaagagggacatcttgaaggaagaggcttctggctttagaggcttgtccttttgctccagctgtttgacttgtggggtgcttgtggatctggggacgtccggtggtacactgcctcagctgcatgtcttgatgggcacacgcatgaactagctttggagtctacacctcacgaccactgtgtgactcctaacagcgatgcttgcttgctctgttcctggccagtgcattccttttctaggtcgtggcccggggctcctggagggttgatgctctt

SEQ ID NO: 1107 - DNA, 361 bp, Rattus norvegicus
  Genbank Accession No. AA996412
tttttttttttttttttacttcataaatatttattatttacagtgggggatttttctcagtatcaagagttttatacaagttgatgggatgcacacgcagcgagagggactccagcagctcacacagtagaataagaatccaagttataaaatacgctaaatgaaaagaatttgcagaggtggacaggacatgatagaaacccttttcttaaaaaatataaggtatctcacaaaagcctgaacattttacacgctagtaataaaagttgggtgaggtggggggcttcatatactctcatcacaaaaatatttaccagtcctctgactggagcgctctctcctgcgggtcacctcgctgtgg

SEQ ID NO: 1108 - DNA, 408 bp, Rattus norvegicus
  Genbank Accession No. AA996422
tttttttttttttttttggacagcaaagcccacactatatttggcccagatataaattagatcacattcaggtagtgataaattacagacaaagataggaccagtagacaggacacactccacaagaggacagtctcacttaaatacagaggacatgctacactgaccataatttacacacagttctacagattgaaataaaaaggaaaaactacatcacaacgaatttcctttgaacattgaaaatggtgtaaacatgatcatccacactgagatcacaaatggctatctgatgcacttgtatgcagttttggcagaagcaggtgagcgggtggcacaatggtcctatgaagctgccaggcaggtagacaccctggtccacaccaccccagtgtcacacttctgaag

SEQ ID NO: 1109 - DNA, 376 bp, Rattus norvegicus
  Genbank Accession No. AA996461
tttttttttttttttttatattgggattatcagtttaactaccaaaggatgttcagactgttactttatgtaattatataccacctaaagatacagaaaggcgcactggaaagcagcgggctcactccagggcctaggcactttccacgcttacacacttcaagaactttcttcgtgagagaaacttaatgcctctaactctcagcaaagttctctttccccccgtaggtgaggaccaggaaagcgcatttggtccaggccagtttccatttacctttatcaaactttaaatttttgttatttttaaattctgtgtgtatgtgtaaatgtacatacatatgaaggtccctactgagtccagaagagagcatcagat

SEQ ID NO: 1110 - DNA, 482 bp, Rattus norvegicus
  Genbank Accession No. AA996463
tttttatttttttttttatggaactgaaatctaaactcttttttttccaaatatgaattctgcacattttctgtgacattacaattagtgttctatatgaaacaaacaaacaaacaaaaaaccaaaaaaggaacagaaaagtgggctaatgagtaaaatggaaggattttattgtgataccgtataagaaaccgtatttatatctgctaaccacctaggaaacacgagtcagtactactgattcacatacttattttgaattgaaggaagatggttttgactatattgtccaatataatttgcaatgattagacttagcatgttctcttaaacttctgtaccgaaccacaaataagtaggtatagtttgttcactagacctagatctgaaaaaccttacaaactttccattcatctcccctcttcgctgttactctgcctccctccatcaccatgctgaattcctctcatcttccacatcat

SEQ ID NO: 1111 - DNA, 541 bp, Rattus norvegicus
  Genbank Accession No. AA996471
  misc_feature (1)..(541): n = a or c or g or t
tttttttttttttttttcagtttatacatttattatagaaatccccgtccagtgtgagtagtgtcttgggcccagatccattggtacaaaaagaaaaatttaaacaccaggtaaagggggtaggggaacccccagctccagaaagtcacagacaatatagaaaacacaccttatgtggatttgtttaaaaagtgataaatagaaggaatgccaaggaggacatgatgtggcctgtggcccatggccagatgtcacctgagggttttactggcatgtactagttgccaggtttaaccactgcagcatcccaggatgcaacatactcaaatggctctgtttcttgacaacctcttgtacggccttctcattggggaaggtcatcctanaggctatgggcagagacagagatataactccttcaggtaccctacttagactcccatccttccaaatgtagacagaagcccacctgctcgagaactctagtgggaggaggcagggagctctgttcacagcagtcctagtcccgagactctatgtg

SEQ ID NO: 1112 - DNA, 419 bp, Rattus norvegicus
  Genbank Accession No. AA996529
tttttttttttttttttaaactggtaaaataagcatttattagaagggcagggggtgggggaaaaaaaactctctgaggccagctcgggagtgggaaacaatgggggctccctgctgaggtagggcaggactgtagatcttcccactcctgagtctcagggaaggcctgtggcagagctcactgtgcctttaggccagtgtgtgctgagcaactcatatcaggggaggtggcagaggaagtcatgcagaggcaaggccaggacccctgacagggagattcccaaggtgtcagaaatgcaggcagcttccatggcaaactctcggtgcttgtcactggtctccagggcaatgttgtggaaggtattcacgtaagcggccccgcccagaagcccttcatacagaatgacgatgaagatgag

SEQ ID NO: 1113 - DNA, 330 bp, Rattus norvegicus
  Genbank Accession No. AA996581
tttttttttttttttttccttctcaaagctactatttattctgtacaaggctccactgtaactagacattctactcttgcttacatagtaaacaagtgtacaccagcccttgggctcacgtcacaggtcttccctagagaaggggatcaggccaggcaaactcggggtgtcttttctagggtgccttgacctgggacactcaagcactccaggttctgagggcataagccaggcccaccagtgggtgtgcaaaatgcactgtgcaaaatgccgtagtgctgagtagcctgactcttgggacagcatggagtttttttttttttttttttg

SEQ ID NO: 1114 - DNA, 384 bp, Rattus norvegicus
  Genbank Accession No. AA996640
  misc_feature (1)..(384): n = a or c or g or t
tttttttttttttttttcaagctgacagttttttttaatttttctcaggcagaagatagactggtagaagcaagatgtggggaggggttaggtaaccataaaagaatgggtctggctcgatgaccaggatattggctgggtaaatcggtcagcggggggaacagtagggtgagattacaaaggcatggatactgtgaggggagagacctaagggtgacgcanaggcccaatccagagacctgggaaagggacaaaccattccactctccaggttgccagcagcaacatcgagagtcattggtgggaaaaaatgtaccaggaatagcgattccctcatanaagggtgtctganagtgataacatanccagcaatcgtgcataagg

SEQ ID NO: 1115 - DNA, 354 bp, Rattus norvegicus
  Genbank Accession No. AA996688
tttttttttttttttttaaggcttttttttttttatttcagccacggaatgatgcatgctacagagtaacctttactttcccccacttggtttttaaaaagtcaccactattttcaatcccgaaagaacatggcacttgtttgtttttccccgcctcaatcattccagactttcaagtgttttcttcaatactgaggctttctcctgcagctctggcctgttgtctgtctccatagtagctaaagactcaatcaaaagtcttctgcattctgctgtcaaacattcccactgtttaccttcttcaagttttttaagcagtaattcgatcacagataaagcttctgttctcacaca

SEQ ID NO: 1116 - DNA, 163 bp, Rattus norvegicus
  Genbank Accession No. AA996697
tttttttttttttttttccttgtatgaactttttaatgaattatgagccaatgaacattacagaattaagccttaatatttcttctttcctatgagaacttagataatataaccgccagtttcaagtaggctagaagaccatagtgaataagagtagtcatca

SEQ ID NO: 1117 - DNA, 258 bp, Rattus norvegicus
  Genbank Accession No. AA996727
tttttttttttttttttaaggcttagttcatttattacagcacaaatatctcagaacacactgtatcagaaaagacctggcagtaaatctaagacaaacagtttccactttccaagtttgcagtcggtcaagcaggacatagatgcggagcccttttcaaatgacacagttattctgaaagtttaaggtgctacaggaacatacaaccaaggacttcattgtggagaggagaccagattcaaatctgccttcccggtt

SEQ ID NO: 1118 - DNA, 334 bp, Rattus norvegicus
  Genbank Accession No. AA996797
tttttttttttttttttcatggtaagaagattttttttattgaaatatagtctgagcaacaagatgtagccgagaggaggaggggctggcctgcctgaggcagcagcatctaatggcacaggaacaaaaaaatacaaataccccaatgtctgtgtgccccacaccccacctgccagggattgtaggacagcagcagaaggaagacccaccacagccccaaagaggatctggctcttggcacctgcctgccttggccatatttcgtgcttctctcaggtccaaacaggagtgtactgccatttctcccacccacagagacatggtcagagtgaca

SEQ ID NO: 1119 - DNA, 365 bp, Rattus norvegicus
  Genbank Accession No. AA996816
tttttttttttttttttgctgatgtaacaatcatttattaaatgctattatttttctgggggatttttacacccctttacccctttgtagctaatggttaatatctacctcacttcttgcccatacattcccgagtaaacaacacaaagacactataataagttgtaggtattatgctgggcacattgagctattttaattctcccacttgttaaaacccacacaaatgccagtcacttgccaatctggtgtctcccaggctgcttctgctccatcagcctgtcgtcaggattcacttctcttggccacaggcttctgatggttcatcccatgtaatggtgacctcttacctctgcctcgtgccg

SEQ ID NO: 1120 - DNA, 312 bp, Rattus norvegicus
  Genbank Accession No. AA996864
  misc_feature (1)..(312): n = a or c or g or t
cggccgctgccaccgagactaccgaagaattcgcagccattttcctccctcggccgctccagccaatcagcggcaacaatacttgctccgcggaagcgaaaacttctgcctcttattggtctagccttgctcggaacaaccaatcacaaaccttcttcgtaatgttccgaaaaggcaatgggaaaaagagacagttagatcctgattggcaagagctgctgagggaggtaaattagaacaagaagtgaaagggagaggcgggcacggactgaggcatcccagcataaaanaaaaaaaaaaaacctcgtgccg

SEQ ID NO: 1121 - DNA, 495 bp, Rattus norvegicus
  Genbank Accession No. AA996885
  misc_feature (1)..(495): n = a or c or g or t
tttttttttttttttttcacagtaccaagctttattggaagcactgcagtctggccgtggagaggcgatgttctagccacacaaactgtcatgctcacactcacgttcacaccgactctctaggcacagactgggctaggtcaggtctcgggcagatcgggaggcttggtcctctcttctggtccttggtttcctgggccagagtgagtcacatctcttcactcaagacacagggccccttttggtgctgccgcctttgctcttggaggaagacttcttcagtcttcggatgatgcgttctacccagggctggtctagaggtgcacagagctggtagccccttagtgtggtgaacacaacagcaggcaccctgcagccatcttggataagaaggtancggaaggctttcacgatgttaccaaggatggggcgctgggtcacagacaggcagcagtcttccgcatcgttagcaccccccagagctggggctgagaa

SEQ ID NO: 1122 - DNA, 512 bp, Rattus norvegicus
  Genbank Accession No. AA996886
tttttttttttttttttacaatggcacaatcatgtttatttcaaccttcaaacagcacaaagaagtgacagcttctgataccaaatcatacaagggttattggaggaacaaaacaatactaacataaagaaaatcattcaaacaacaaaagtaagtgctttacatctcagacaatgctgtgtgcttgctgccagagggcgtttccaccaggggcttccaacagcaggaccaaagcaaagccaggatccgagagaaggtgcattctcacctgggagtttatacccaagtcactacaaacccgactgctccactcagaattcctgaaacctgatcttaaaacctaactaagatttgggagtggtaacaatgaaaacaacctcaaaacagaagagtgtggcaagaaagtaaacagtaaacaaggtttcccataaggcatcaggagacctgctggctgactcctcacttttcaccagcttagaaaaatgttacttctcagcaaacccaaaacttca

SEQ ID NO: 1123 - DNA, 529 bp, Rattus norvegicus
  Genbank Accession No. AA996955
tttttttttttttttttaagttagaaattgaccaaattgtccaaataatgatggtgattttctccccatctactctggcaccgccacctagtggcagattcacagcagccacatagaaggtttggcccagctctgggaacttgatggtggtgcatcaaattattttactaggtaaatgcactagtacacaaagtttccaggcaatactgattaaaataaaagaaacaacaaaacagcctacctcttatgtgttaccaaaatgtactttgctttgactcatttccctactcattcctcattacctgggaatggcactcagataacgaggttatcacaggaaaagaactgaccacttggagataaatgattctcaaggcagacagtaaggaggtgtgcactcctcctgagttccctaagttctcagcacagaccacagaacatctaccagcacagaacagctctactcctcgtaagcacatcattacagttagaaatagtcatatgttactcttaagtttataagcagaaa

SEQ ID NO: 1124 - DNA, 464 bp, Rattus norvegicus
  Genbank Accession No. AA996974
tttttttttttttttatatttagtgtacttttattgctcagcttattgaccagaggcataccctgtgttccaaagatcaagtcctcaagcgtgccaacagtactgactccagtctctgtcacatcccaaacacccatccagacaagtcagggactgcagctgctccctgccattttcaagaagagacaaactgaaattcctaacttcttaaggatcttcctacaaatgattttattataaatatttctcttggaataaacaaaggctgtattcagcactatcttccaacttgttctaaagcagaagagaaaacatggaatccagaaccatttagaaatcaagataaacagcagacacctgagtgccatgctaagtgtctttctagtaaaataaaacaaacaacccagaaagttaaacaggaacacccagtcccactagcctgctggatgaaaataatgagtttg

SEQ ID NO: 1125 - DNA, 369 bp, Rattus norvegicus
  Genbank Accession No. AA996993
tttttctttttttttttgcaggtttaactgattttaattgaacatgttggacacatggtgttgcacatgccattaatcttaacaattggaacacagatcctaaacagctacacactaagcatttataaacattcacaaacaaaaacagtttgcaactttttgaggaattgtagacacaagcaactaataacagccatgtggtcagctggaacttgagattagcactttggacctttcacttcaagcccgtcagcttccatcttcttcctcgtctcgaagatcgcacttattttcttccactgtcgatcaagctctgccttagcagtgggttcattgaagcgcctggttttccgtccccgtggtcagcaa

SEQ ID NO: 1126 - DNA, 513 bp, Rattus norvegicus
  Genbank Accession No. AA997048
tttttttttttttttttgaagatggaaattttggttttatttgaactgactgtagtagataataacacaaactatatgcgttttttcaaaatcagcagcctaggcacatcagcgatgacgtaacctttgaggaaaagaggagcctccacccacttcatctcaggggagcgtctacttctagtgcaaagtatgtgaggctccagccttctatgcccgtgcatcttgctacaccttagccaagctcctagttaaccacgaaagcaggaaaattgaaattattctgggtttttgggtcttacaatttaaatcacaacatctctaaaaagataggtcaactctaatgcttctaaagtgattttttctttctttcttttttttcggagctggggaccgaacccagggccttgtgcttcctaggcaagcgctctaccactgagctaaatccccaacccctttttttttttgcttttttaaggtttgtttttaaccgttgtgtatgtgtacgtgtggagg

SEQ ID NO: 1127 - DNA, 281 bp, Rattus norvegicus
  Genbank Accession No. AA997122
tttttttttttttttctgtctctatgatttatttatttcgcttctctgccccacccccacctgtgtggccctcttagacatcagtacccaaacaaatagtaaactatcaaggaaagactcattctccgtccgtcccgaaccttctccctctccctacagcaacattttgatatacttaacattgaccctgaacaagccagtccttcccaccccctcccacagacctctggcatccccctctcaaactttgttcttggtggaagaagctagaatctacctta

SEQ ID NO: 1128 - DNA, 489 bp, Rattus norvegicus
  Genbank Accession No. AA997182
tttttttttttttttttgagccaagatcattttattcccactcatcattatgtttgcagtctccacttttaaagttcccttgtactgttaccctgaagagtaacttggtgtgttgtttgtagggctgaccagtttgagtatgtaatgtatgggaaagtgtacaggatcgaaggggacgagacctcaacggaagcagccacacgtctgtaagtaacacggtctagaaaagtcttctgcctccctgttctgaggtggggccatgcttctatttctgtgttgccttctccccacccccttgttttttcttagtattccaaatctaggtggaagaatttgtcttgggaacagtttccagtctgaatgtgggtcacttaacgtcacctgttgtcagggtttcaagactctgttgtccaaaggacacactggtaatctgtcttgctttgtgagggacaacagagcatcttcctggataaccacatgcatattcat

SEQ ID NO: 1129 - DNA, 317 bp, Rattus norvegicus
  Genbank Accession No. AA997191
tttttttttttttttttaaaaaagaaagacctacttgttgttttaattccacctacccccacccgaccccaagcaccatggctggcagatgagcagtgtaccccaaagagcctcaggaggtgctggcccaccctcctctacataaacgtgcagaagccctggggacaggcagacttgcttcagttcacatcatggtgaacatggcgactctgggtcaagattagaactcagatccctccctctaggctagtgcttcctcttctcctagcttggtgttgagaacagaggtgggtgcaaggtgtgtctgaagctggagg

SEQ ID NO: 1130 - DNA, 396 bp, Rattus norvegicus
  Genbank Accession No. AA997237
  misc_feature (1)..(396): n = a or c or g or t
tttttttttttttttttaatggggcaacatttttatttctgtacattgacatacaaattttccccaaaggtacaacagatgcgacaccatgcagacacgcagctgtgaatgacagttcagagctcaacataaacttgtgctgtgaacaggtaccgcccccgtcgacacatacagtcacgcggctcttaagaggaaaagcacacatggttgggttgcagaaaggacagaggtanggaagcgttcctcactagacacaacacaccatattgtttttccaaaacacacacgatacattagagtgaggtggtgtccttcagaacagggaggagttgaagtgtgggcctccctcaacccatgtgccacccaagggctgggtgtgtgatggtcacgagattc

SEQ ID NO: 1131 - DNA, 370 bp, Rattus norvegicus
  Genbank Accession No. AA997242
tttttttttttttttttaattttctaaatttttattttatagcaattgtcatagttagagaagtaaataacacatttaaaaacctccttagggccaaaggaagccagagtatttacaaacacatggggtaagagtgggaagacaggggtgtgaggctctacagcttgagaacccaagctctgccccagactgggacactgatgccaaccaccaagcctgtcctgtgggctcaaggaacattacacagccacagggctctcccgctcacagaacctggtgggagacctctagctaccccgagggctcaactcccatccagggaactcccctacaccccacaagccagctcaaaggggcccctgggaagcac

SEQ ID NO: 1132 - DNA, 443 bp, Rattus norvegicus
  Genbank Accession No. AA997253
tttttttttttttttttcatataaataagacgcttttattatcattttgcttcctctgcaattggggagattgtaaataagagagtccttagaggcaatgtaggggatggtggtgataagggaggtcaaagtcatggttgacactgattacaacatccacatatcagaaatgtgcattgtatagtgctgaacttcgactctctgtgcctcagttactacacctatgatatgagtacaagactagtccctaaggaggccatggtgaggatgaaagaatacacatggaaagggattttgaaaatgacaaagttgtttgtaaatgacaataaatattaatatcttttgtaattctaaagattaaacccatagactcatatgctaggcaatcaatcagccacttgtaaattgtttccgcacaatgagatgtaatatctacctttata

SEQ ID NO: 1133 - DNA, 512 bp, Rattus norvegicus
  Genbank Accession No. AA997304
tttttttttttttttttagtaaataccttttaattccaagatttttaaatgttcagctcagtattaccaaaatggaagggcattaacatgaaacgcattttgaattcttgttctcaggatgttgcagaatggctgatgactatttcttgataagtttgaagtgctaattctatatatgctcctctctgtgcttctgtttttgcaaagaccttaattaagttgactccctcagcagcctgctctttggcctcttgggctgactggccttctggatggagcatgtggtacagctggaccaggctggtggcatcatcaaccaagtctctctggatctgatcgatgagcaaaccatcgatctttttgttatttaccaaataccaagccattccaccaaagtgtcttgttgaacgtaaaatctcatattttccatgtctgtctatatcttcgtaggtctggtgatgaaccttgatatactcagtggaatctggctcaaactgggcaacacagagatt

SEQ ID NO: 1134 - DNA, 497 bp, Rattus norvegicus
  Genbank Accession No. AA997342
tttttttttttttttttgataaaaagctgtttactgtctgacaaagtcaagctcacaaagaaatttccttgagtttaataaagatgctaaaaatgttactttttaagtagttaacttttttttttttacaaagttctgtacataaaataaatatacagaagcaaaccccatcaactgtgtacatcagtaatcctcactggtgggctcaccatttataaggaagacatcattcaacgcatcctgtcacagagaccaccctgtctgtcatcaaggacttctgccccaaagggccatcactgggcctcctcgatgaagtctgagaaacagcaagaagcctccaacctactgactagcaagtggccacaaaaccaatagctgtctcgtctagagtgtggcctagtggcaatgtctatgaccaaagcccttaaaatatgaggtgttcagaacagaaatcagccctacctctccttggccagtcactgtgaaagtgtgcgtaa

SEQ ID NO: 1135 - DNA, 468 bp, Rattus norvegicus
  Genbank Accession No. AA997345
  misc_feature (1)..(468): n = a or c or g or t
tttttttttttttttttgctgtatgaaaataatttttaataaaaaattttgaaagtgtcatgtcgatgggctattagaaccatgaaagttagtgttcctgtgaatgtaagttttctcagacagctaggaccagcccaccacaaggtacgcgtggaaccaaagtgcttagaggcttcggattttaattgtgcaaaagatcttgagcctaaaatgcctaagaaccatcaggctaacttgttaagagctagaacattgttaccaagcacatttgaagacggatcttttaattaaaatagggggcctggtgtcacagatcattggtagaattaacatgaaagggccctatcccaaaaatgatttggtagagtggtagagttgctcgtcttacagaacatcattctgcttgtgacaggttagaaagccattaaggcttctttgactccactgaatanaggtctgctcgtttct

SEQ ID NO: 1136 - DNA, 425 bp, Rattus norvegicus
  Genbank Accession No. AA997394
tttttttttttttttgtgcttaaaaacagattagggaaagaatttatttgcttacgcctgggaaacagtgccagtcactgtggactggaccctcctacatcagcaaagacaagaagacaactccccacagactaaccggaaaaagataaatgattaaattaggattcctttttcagttgattctaagctaagtcaagtggacacctagtgctaacaaggataaaaagcaaactcccaaaccaactcaaagaatccgtcaccaacgatgtagcactgatgagaaggtggcattgtggtcactgtgaaagccccttgtcccatcgctgttctggctgggggccttgcaccggcacagtctgacgtcagctgtctcttctcccaaaacggcagcacaggcagtcaatcctgtgcatgattgctggctt

SEQ ID NO: 1137 - DNA, 357 bp, Rattus norvegicus
  Genbank Accession No. AA997406
tttttttttttttttttcccttttcaaggtcactggcctttttcctcaattgtaaatagttagtgtttattttaaaggtggtggagggagggtggggacataaatttgttgcatgagagtgtcaggttttctgtataagcatgcatcctctgacaggacattttgttgaaaataagcaccttgataaccaaaaccccttcaaaatagcaacaaagctttagttctgtattgatgaagtcacataaaagcctggctttatttttgtaggacttcatagctgagagtagaacatagcattggggctactgttggggtaatgcaaactaaataaacattcaactcttcaacctcgtgccg

SEQ ID NO: 1138 - DNA, 395 bp, Rattus norvegicus
  Genbank Accession No. AA997438
  misc_feature (1)..(395): n = a or c or g or t
tttttttttttttttttgttttaaaaaattaagtttataaatattttctccactgtacaaagttttcccagccctgcccaccccttcaccgctcacatttctcacttcttaaaaatcccaattatatttattttttaaatcataaaatatatttttcctttgttcatatttaaaaatatttacagggaggcagcgaggccggggtggacggccgaggtcaggacgagtccgtgcaggtagtacttgctggtcttccagcgactggtgctgtagtcgctgtcacacacgtctgtgctgcaaggtgttgttgggggtgccatacctcgaatgatgtanggcctgtatggtctggcagtggatgggatgtttgaagaataaaacatgtccatgttgta

SEQ ID NO: 1139 - DNA, 571 bp, Rattus norvegicus
  Genbank Accession No. AA997522
  misc_feature (1)..(571): n = a or c or g or t
cggccgcaaaggttttgtctttttggttttttaatcttctcagctttgaatacgttgcctagagacttagtttactacccagtttgtggtttgggaggggggactgtaactcaacaatttgttagcttttcaattaaaaaagacacttacttcatgtggtatgtcatctttttatcattgttcccatacagggaaacactatttgcatgtaaaaattaatttaacctttaacattaaagtgtatggtaaaactcagaacacagccatcctaagtacaaagatgcttttcaataaaaagtagtacaatagaggtagtaaacagttgattttgtggatgtaaatgtgttttctcacgtaatgaattaagtttggttattttttaattgaagagaatcttgctggaatggtggtgcccacaccttcaatcccagcacttggaaggtcagcctggtttgtanaggaagttctaggatagcctgggctacaaaaagaagccctgtctcaaaaagcaaaagaaaaaaaatccaagagattcttaagcagtttgtccttcactggaagctgttaacat

SEQ ID NO: 1140 - DNA, 220 bp, Rattus norvegicus
  Genbank Accession No. AA997544
tttttttttttttttttccacaggtaatgtctacatttattttataccaaaaaagttatgtgcaccatagaaccattcttacatagttacatctgtttctatttaccaattagcaacatggtatcgtaaacctctgacacagagaagttctaccaagactaaccagggaatcttcccagtgaactccgtttatacacgaatgtttactcacgagctttca

SEQ ID NO: 1141 - DNA, 470 bp, Rattus norvegicus
  Genbank Accession No. AA997577
tttttttttttttttttacagaagtaaaaacatttatttttttttccatctttagaactctggtcccacaaggtcagcagtcttgacccttcataaaagaaaccttttaactgaagggaaggttaagtctataaagaaactaggaagttcactgaagagacagtaatttcttataaaccactactcctggtggccacttctggctgacaaactctctctgtcacagtctctgaaggaaaggaaggaagcatctacaggtatgttcctccagaagccatccgggaaagacaagtgccagctacaccatgaacctgtgagcccagagcagaaccagaggacaggcagcctggcccagtctgtaatgcttcaacttcccacaacactgtgcagttggcttccagagcctgcctcacctgaggttgaaagtcataaaaccaggtatgcaggctgccctcccactgctgcctcca

SEQ ID NO: 1142 - DNA, 521 bp, Rattus norvegicus
  Genbank Accession No. AA997588
tttttttttttttttttaccagctctgggaacgtttaatgcacaatggtggtgacctaagtttgtctatcagccggtacagtttacagtttaacacacactcacttttgcaaggacatctgtgcataaagctccacatcccagagttgggaacttgtgtgagctctgaactatacccgcaggtttgtccgatcatggtacatctggtagggatcaccagtgtaccagttgcgcctcttccagaaagatgtcgtcattttatctaggagtttactctgggtcttattgcagaacacgaattccctcaagcgcttctttcttgcagttgactttttccataattttttcttatagccagcctttctccttagccaaaggccagagtgaagtcggaggaagcgatgcacaaccgacttcaccgtctttctctttcctttccgtgcactgcagtacgtcagagctctgaccggaggcttcaagacactgggaaccaatgtggccactctattaaggactgatgcc

SEQ ID NO: 1143 - DNA, 284 bp, Rattus norvegicus
  Genbank Accession No. AA997599
tttttttttttttttttaatttccaaaaagctttatgtgaaatattctagaagccctttacaagccaaagcattataattcaataaaaacataattttatagatatatttctctatacaaaaggctgatcgttacaaaaattagaataaataattggaaaatgagtgccactgatttaaaaaagatatctctgattgcttcatggtgaaatgccttctatgtcaccaaaagatgagggcgcggacagctgctccgagcccgggctgtgagtcccctgcgaagat

SEQ ID NO: 1144 - DNA, 447 bp, Rattus norvegicus
  Genbank Accession No. AA997671
tttttttttttttttttggtggtaaagcaaatgtattcaattatccaatttaatttaaaatcttggcacagaacattcaagaaagtttctttactcattaaagtctttgtcacatgttgtggcaggcaacaatggtatcttccttgggaaaagagcaagatcacagaaagtctgaaaagtacttaacgcagggactggaacacgttacatgatacattcatgagccatattatttagagctcataaatgttcctgggtagtgaataatagcattgaaatgagtgaggaaacccttggctaccatactgtcagctccatgttccacaattcagaagttaaacattacagatagctttacaacaaaggaagtaggaataaaaaaagttgctagtaatttcaacatatctcattcaaatcacaaacaattagtttaaatcacaaatccta

SEQ ID NO: 1145 - DNA, 459 bp, Rattus norvegicus
  Genbank Accession No. AA997716
cggccgcccacagcatacagcagcccgcccaccacgcagcccgccagcccactgcggggcacctgtaggtctgccaggcgcagccaggagccattgctcgggttgtaggcctccaggtagctgagcgactgtcggaagtaaccgcccgcagtgtagatgaggcggcccactttgggcgcccggcagggcaccgcttgtgtgggcttgtgcagcgtgagctcctggaagatctgcaccaggtagtccttgcagcgcgcgtcggcctgcaggatctcgcacttttgcagctgtgtctgcaggaagcgtggcgtgagagcgtggcagcgcacggcccgtagcagtgcctgcacgtagaagcgccgctgcgggcagtcgtatttgacccagtcgatgcacgcatggaacacctcggactcgcagcgcacgttcagatcatcgcggccctcgtgccgaattctt

SEQ ID NO: 1146 - DNA, 491 bp, Rattus norvegicus
  Genbank Accession No. AA997721
tttttttttttttttttcagttttaggaaacaaaaatctttattaaaaaaataacttacaaatcaagagaatgctgtttcctctgttcacgggtttgcagcccgaaacgtaactctacaatacggttcgtgtcacaaactgcattgctgggcagtttccgttccatatgctgtgccagcattaaacaccacacagatataaaactattgtaaataaaacattccagccaggactggcataaatttatatatatatttatattttatatatatttatatcatttcgaatcagctaacaatgaatgtcatccttagtcaaaactcagagtcctgctaatctgaggcctacatggtccaaatacaacagccttacacctcccatacaatatttaaaatatatttagctttcaaatgcatttataaggtacatccatagtgagaaaataaagtcttaaaacttaaatacaaaagtcaccaagtaaaaacttgaag

SEQ ID NO: 1147 - DNA, 398 bp, Rattus norvegicus
  Genbank Accession No. AA997731
tttttttttttttctttctgctggtactttattcaatttacctcgttaagttttattttacagaacattgtaaaatataaaacttaactgattacatgcatttctacattttacaaaaatgtttactagttacactaagtacttacatcacagtgtgaggtttttggtggtggtttggccacaaaacacgcaaggtaacagtcacctagttcagattaaccagttttgtctaacccttggaatcctcaccatcaccctgcgtctaatggcaaaaggctgctgtcgtcatggcttccggtaaggtcagccaaagggtcatagggcaagggtcacacaatgtatggaaaagccaaggccaatcatgaaaggcagtcatcttagcctcagtcctcgtgccg

SEQ ID NO: 1148 - DNA, 422 bp, Rattus norvegicus
  Genbank Accession No. AA997763
tttttttttttttttatccttgctcaactccgtttattttcccacagtgcttcacgttcaccttcatagctaccaacaaatcaaatgtacaagagtatgttacacactatacaagggcgtctcagggcgaccaggaccccggtgaggaggtgtgcgttcatttctaaagtgcatgcttcccccacccgggcgccggcgcggcctctccgcccgcccacgaggaggtcaggaggtgagagactggatgttcctgagcatctcatcgaaggcctgtggcgatggcgcgtcggcgttctggaaggtggcctggactcggctgtacagactgaaggacttcagttccagccagagaaacccaaagcggtcctcatcgaacaggacgaagacgccgggggtacgctcggggctcgtaaaaacatggc

SEQ ID NO: 1149 - DNA, 454 bp, Rattus norvegicus
  Genbank Accession No. AA997784
  misc_feature (1)..(454): n = a or c or g or t
tttttttttttttttttgagatggaaaatgacgtttattggggggagaaggtgccacacagagccacgtgacaaagacatggtgatagtcagaggcagaagacaaaatggaagagcacattaaggcaaatgaatgatttaggaagttagagtcattgtgaggaatggtggacaaaagaatcggccccagcccctgagctctgaccctgagatggttgaagtacagaaagagtgccttctggtacacatggatcatttggaagagtccctaatgctgggactcttcaatacagttccacatgttgcgatgaccccaaccataaaattattttcattgctacttcataactgccattttgctactgttaggaatcgcaatgtaaatacctgatatgcanaatacctgatatatgacctcccaaaaggccanaatcctcagattgagtaccacagat

SEQ ID NO: 1150 - DNA, 436 bp, Rattus norvegicus
  Genbank Accession No. AA997793
tttttttttttttttttcaaaggaaagatgataagttttattgttacaaaacaaaaattttaaatttcagtcatttgagtaattgcaagagcagactaagggcttcatcctcacacaggcaccaagtcaggcacagcaggtagcttcaaatcataaggaaagggtttctttcctacctagaaccctctttggaatcaggctaacaacccatcatactaagccagctctcaatcttctcttttaaaatggctctaggtattaaccaggtaagtaaaaattagtcactaagtcctggcctgagagagccacatttctcctttaaaactagttaagaagcgtgtgcatttctgagatcccaacgtgtcccttaaaatgcagacttgcaggctcagacatcagttccacctgatacatgcagaagaaatggaggtgaaga

SEQ ID NO: 1151 - DNA, 366 bp, Rattus norvegicus
  Genbank Accession No. AA997806
tttttttttttttttttcccatacctattactttaattaattttcatgaacaatcctatataggtattatccctatttttttttctgaaccagggttaggaaagccagattgctcgcgatctaatatgttacaatacaaatgagccaagttgaggggtatgctacacaataaggaagtatttatttgctttcccctccctcctactttccatcccgagtttgtcaagataactcagatcttgatttttctctaacttgtaaaaatatgtcatcttgagtttgggctgcttcagaattcttggtctttgtgccagcttggttgcaggtgtagttcctatgcgcttcctgctcttgctgttgactgca

SEQ ID NO: 1152 - DNA, 457 bp, Rattus norvegicus
  Genbank Accession No. AA997821
tttttttttttttttttcaattttgccaattttattgaaccaataaaattcctactaataacaatgaaataaattctgcaggtataaacgtgatacagtttaacaaaacccattgttctgtacctataaatagattttcaaaatgtcatagaaagtgcagttatgaattgttaacatgttaatacacagctcctttatttcaggtgtgtttgtcttgattcattaacagttccttctttatctgttcaaataatattacccatccctcgaaaaacaaaaggacagccgcagaacgagaagagaggcgttaaaccactagagtactacacgagctggcccatttgggtcagctttagtcaaactgccaaaccagcaacataacaacaaaaatcaagcctacttatacatacaagaagctctcatgggttctgtcatctccataactgctgatgcatgt

SEQ ID NO: 1153 - DNA, 139 bp, Rattus norvegicus
  Genbank Accession No. AA997844
tttttttttttttttctaggtctgaaaaaataatccgtttaattgaaaacctggagaggccactccatgaaatgacagacgagctcagacacgcgcacaccctacattgcttggtagccacctttgcaacccagtaagg

SEQ ID NO: 1154 - DNA, 513 bp, Rattus norvegicus
  Genbank Accession No. AA997861
ttttttttttttttattgagcatatctttaatgaacctgggccatgccatggcaggagctaagccagagcatatggacacaacagaagaaggaaggttctggaacagcactttgagggacttatggtagccctcagacacagggtaggtagcattttagacccgatctggacccagtcatctacaggtctcactggaccatagcctcctccaagtgtgggaaggggcagacagcatactggcgacctggtcccagttgaggggtctgctcagaactcttcatgcacattgcgggcatagtccatcagcttgctgcccgtgaagaactcactgtacttgaggatctcctcaggctccagatggtgattctggttctcatcagcaatggcaatcatctgttttgcttcattgagggcattgtattcattcatggggtccatgtagttctccaactcctccatggtcacaatcccatcatggttagaatcaatcagttcctcaaactctttcttcc

SEQ ID NO: 1155 - DNA, 390 bp, Rattus norvegicus
  Genbank Accession No. AA997905
tttttttttttttttttcaaattataacaattttattatttaacataatcccaatgtatatacattatcctcccaaataagaaaaaatttaattccagagtttaaaatgtggtttccaaaatgaatccttattgtaaattttgaagaaaaaaaaaaaaaacccctgaaaactaattctaacgttaaattttgatctttgactaaaatacacaccttataccaatcagctctctcatacaaaaatgcatattataaataaaactttcaaaagtgatcttggatgttttattgcacatcaaagagaagatctgccagtctgaatggctctcagcctctttttatcatgcagtttcaaaagctactgactctgggtggatacactgaggacat

SEQ ID NO: 1156 - DNA, 489 bp, Rattus norvegicus
  Genbank Accession No. AA997929
tttttttttttttttttgaatccaagcagttttaccagcttttattataaacaccagcacatttcaagttccctctttttgatcacaaatataggacttttttcttctcctcttaagtatacagcatgagacacagtgtctgggcactccagctcttacagaaatttccttaggacaaaattagggataatatccatagcccacactctcagctacatcctttgacagccagatggacaattgcataggatgcaggctccaaggaggttggtacagagctttgaatttcaggataatctgaaaaggatgtccccagtgcccacattaaaaggctacacattgtcaagtgccacctcctgagtggggctgagagcagctcctctgaggctccagttcttcttcttgtttgaacacatggcttgggacttcccaattggcagcaaagggaattctgaagagagccaagaatgtgcaaggacccatcgagtt

SEQ ID NO: 1157 - DNA, 415 bp, Rattus norvegicus
  Genbank Accession No. AA997979
tttttttttttttttttcttccaaagtatataatgtatatttaacaacacaaaagacaccacttgagcttccccttagccaacaggaggaatatccacatataaaaattaaaaatttaaacttttaagtcattaatagtttttaaacataatacagacttaaaaattgttcaacatcaacacaagaccccacccctaagcacagaaatcaactccaaatccagaagtcacagttgtttgtccctagatgtcctacagcactgaacttgatctttatatcaggctaccagccaggaaaaggccctgaaagaaacccctgggagacagcagcacttctgattgctgctgcatacctatctaccctgagggcagatgcatctcacgtcaggtctgtgagactcggagccaccacctaa

SEQ ID NO: 1158 - DNA, 298 bp, Rattus norvegicus
  Genbank Accession No. AA998006
tttttttttttttttttgagtggcaatgtcacgactttatttatggtgcctgtgctttgtctcaaaaataccttctcctcctccccagacaataggtggggaggaggcagcaaaaatagaacatccctccctattgcacatggaccctatatacaggcccacctggcagaggccagtgggactcttggcacattcctggtccctgctggggaaggggggaggagtgctgggtagcatcacacgtgaggtgggaccctggggcaaccactctgcttctggatacttatctttgcatttc

SEQ ID NO: 1159 - DNA, 321 bp, Rattus norvegicus
  Genbank Accession No. AA998025
tttttttttttttttttctatcaagttctttattatcaaataattatacatgagaatacgattctatttctaaaaagatttctttacataatatcatattgtgagacacttagaagaatccaatgctagatcttcttcagttagtttctcttttgctacacagtggcttgttttggtctaaaatctcacactttctccatcacaatgctacccatgaagtgtattagttcctttccatatagtacttactactgcctggttaagaaacttatagtgacataaaagctagctacaagaaaaacatataatcaatcttataga

SEQ ID NO: 1160 - DNA, 406 bp, Rattus norvegicus
  Genbank Accession No. AA998043
tttttttttttttttttgaggcactaatttttactttaatatgcaaatttaagcaactgccccacaatgacttctgctaaagcattcatcagtaggctctttgacaaagtttagctatcacaagtaaatacagaggactacattttatgtttgatgatctttggcacatttgtcagttgaaaaatctcaaaaggcaataaaaaattttcaatgttttacacattcttttaatcctaacatcaaaacttaaggccgcaaaaaggcaagctgaaattttagggtatgtgaaagagttttaatagagttttacatacagtaccttacatatagaacagtgtgttttgcaaatttaaataatatctgaatgtacagtggcatgtattcttatcaaagagaaattcaagtt

SEQ ID NO: 1161 - DNA, 507 bp, Rattus norvegicus
  Genbank Accession No. AA998062
tttttttttttttttttcagcacagacgcattcacgcctttattacattttcttagcattccaagtcacaaataaggtctctgacaacaggcaaacctgtatttaaactcatagcgtcttcttctttaaataactgttactgtagggttgtgatttaatcacggttgtaaaaattgtgcaggtatctttaaaaaaattgcttctgtctttggtctccaagtgtccatctcagaacattaagtgacaggagccaacatagactgctaaataaaagaaaaatctaacatgacacaaatattttttaaaaaagacatcacgtgatttcctcgtagctgttaattcttaataacatacgaaggcagatagggagaacaggtccatcgaagttttattggaaaccttgatttcaagtaagattgcatgacactgtcggttaaaaatgtagtccagtcctaccagcaaactaactcactttccttgtttgctcaagcctccaggcaccggtca

SEQ ID NO: 1162 - DNA, 249 bp, Rattus norvegicus
  Genbank Accession No. AA998092
  misc_feature (1)..(249): n = a or c or g or t
tttttttttttttttttcagtgaacagtcttggcaaagaatcgccactttatttttctaccaattcagtatcaatgatatacaaaaggatataaacagattatcataaatatcaataggaagacacacaaaacactcctgaagacatcacgcaccggaacccagtgtgacttagccgtgtctactcaacagaaggttaagtctacaagtttcccactactctgcanaagcaatttgtggcttcctatgt

SEQ ID NO: 1163 - DNA, 372 bp, Rattus norvegicus
  Genbank Accession No. AA998102
tttttttttttttttttacccaaaatactgaaactttattagcaatcacagatatatcattattcatgatattttacaattatcttttgtctcctggggttggtgctaaggatttaccaggcaagcactctaccacagagcccattccaagcccaaaccctgggaaacactaagtgtccatgatgcctctcaagtgacacattgctgaaacaaggcaaagggcacttcacgggaacaaagtacaggtggcagtttggttcacccatcttcagtgagtcctggagcaagtgccctctgcaaactgaatgatgagggagtcaccttcacagtcatgcaggccctgccactgtgcacactgcgaaatcaaacctc

SEQ ID NO: 1164 - DNA, 347 bp, Rattus norvegicus
  Genbank Accession No. AA998110
tttttttttttttttttagaacagaacttccatctatttaggttgggacctagagggctcaggaaagaaattcatccaaatttgccaaaacaatggctggaggagagtcagggaaaagccacttccttgactcagcctcagagtcttcaaacagcacactgaaaccagctgggccaggtttaaaatttaatgcttgttcaggcctgggtccctcattcctgccgctgtcgggtccactgctctggggtcagagttttctgctcaaaggcatggatgtgcgggagctcttcggctaagcactcgttcaccagccggtgtctctggagcagtggctttccctcgaactt

SEQ ID NO: 1165 - DNA, 548 bp, Rattus norvegicus
  Genbank Accession No. AA998151
tttttttttttttttttgcatttcaatagaactagctttatttattattcaaacaaaaggaatggcctataagcaagtgcagatacggactgaagggggtgggcgtggcctgaagcttacaaaggcgccgccgtctcgcgacggaaacagcagactagaaggaacggaatagtgatgtctcgtctgctggaggagtctgaagatgcaaagttaactggaaaaaagaatttttttttttctttagaaaaggtgccgtgccgagtggtcggcgggagagagagagagagacgctaaagtggcttctgagagccaggctctgcggcttgagaactggcatcaactcacgggcttctcattttccccattttctataattttcctcttcttttcatctgtctttttcttgaagatgttatttcggtaaaactgaagctctttgatgctttcgctaatgtcatccagtgccctgtgagaagcagccttcttcggtgcaaattcataatcttccggataccagcgtctgcacagctctttaacagtgctcacat

SEQ ID NO: 1166 - DNA, 504 bp, Rattus norvegicus
  Genbank Accession No. AA998172
tttttttttttttttttcccgtggaaaaacatttttttactgatagaatttaagaattaaaccaataagaaaaccaaccaaacaaacaagcaaataaacaagcatgtctagggattacctcagcggcagagcacttgcttagtatgtgctaagccccgggtttgattccagtactgtaaaatatatctatttatatataatatatataaaacgaaaacaagcatatacaccttaagataatataaaacttgaaataacatcaggcattatggaatgggaaacaattttgacaccacccccacctcctacaatacaaaggaaaacaacaggttgggggtatgatgacaagcagaactctggatgattaacattacacagaccctacatcacagaacaccacagagtgagttatacattagtaagatcgtcctgacggcagtgcaagtcctagatcaaaaatgagttaaaagtttgcggtgtaaataacccacctgtgaagagatg

SEQ ID NO: 1167 - DNA, 545 bp, Rattus norvegicus
  Genbank Accession No. AA998174
tttttttttttttttttgaattttaactttattatgtctcttgtagggatcacaaacggaactctccaatacactttaattattcaaaggcctttcagagattccattgcgtgaggtcaacactatttaataccatgcaattgtttcctaaaataaggccatctttgacgttagtttgcacacttgttctctgtaaaatgcctttcaggcacaggccagattaatttgctgttatcagcttagttcttaatgcagaaaagtaaatttaaaaaacacaagtctcattattttgtccaagctggcctcaaatccctatgctcaaatgatcctcctgcttcaacttctgaaaaaaccaagcttatagtaagcacccaggtaaattttagtaaacccagtgtacatggtggtatataccagacttgcctacatagcaaattcaaagccagtgtaagccatgcaagaccccatctcaagaaagaaagaaaacaaaaaacagaaaaacctttttagataacaaaaagtggctttgggagtggtggcatatt

SEQ ID NO: 1168 - DNA, 409 bp, Rattus norvegicus
  Genbank Accession No. AA998207
tttttttttttttttttaaattggaattctttaatggtttcctaagcaacagtggtcagacagagtaagttttcttatgaaaaaaatgctaaaacttcttttgaacaaaggaatattcaaccttaagaaaaaccttaaaagactttattactggtactttccaattgaacactagcagcccaagccttctaccttaagttgaactcttaaaaaaataagttttaaaacactctatgctaatatatttacagtttatatagaaattttcaataatcaaaatacatctttagcaaaaatttagaatgttaaatttttataaaataagcaagaccaatagaaaaggagaattcagtaccatttcagacttagcttaagacagaggttctcctaactcctggcaactctttgg

SEQ ID NO: 1169 - DNA, 351 bp, Rattus norvegicus
  Genbank Accession No. AA998222
tttttttttttttttttctcaatcaaagattgttttaatagtaattctggtgactgatccacaaatagtgcccattttgacatatacaaagaaaaacatctgaagataactgttgtttctatttggaatagtcttaaaacaaacaagcactatgttattttcatgcatattccttggttttcagagtggcaaccagaacagagcaggcaacctgcttctgctcccatgatgctcagcgaatccagcaggatggcgggatcaaaggcactgccactgcagaacgctgtcaccacgtgtctatgtgagtggcaagggtttttctcttacacagcctttaaagtcctcgtgccg

SEQ ID NO: 1170 - DNA, 283 bp, Rattus norvegicus
  Genbank Accession No. AA998234
tttttttttttttttttaataaaaatatttttattatgccacaatgctttccaaagttatgtatcatctacagtcactgaaattgataaactaccagctccaaataaagaagcaaatcaaggagctatggacccgaaatcgaacttcaggaaggttatctaattaatgagctcctttggatttcctaattagtagaaccctgtgatcaaagcagggagcccagtctccaccaatctcctttcaggaagcatataagaagactgggctccctgcctcgtgccgc

SEQ ID NO: 1171 - DNA, 454 bp, Rattus norvegicus
  Genbank Accession No. AA998264
  misc_feature (1)..(454): n = a or c or g or t
tttttttttttttttttaagttcttggctaaaaatttattgatccgtccatgtatgccatttctcaggatgggaccctgggtcagggtcctagtcatactggtgggaggggtaggtcttgtgtctgtcttactcatgggcggtgaggcacagaagcatgaagtggccctggtcatgcttggatatgaccctcgagggcccttgtccatccagggtcactgtgtaggccccggttagtggttggtacccaatgtgtgggggcattacagccacgcatttcagacccgactcctgcagaatcttatgcatcctaatgtggtcatcggtcaggtcctgtangcgtgggagcacttgatcgggtcccagagtaggagggccaaggtgcaggccacggccttgtccactccatgtgccttcatggctgccacaatgtcccaagtgccctcggacattcc

SEQ ID NO: 1172 - DNA, 469 bp, Rattus norvegicus
  Genbank Accession No. AA998266
  misc_feature (1)..(469): n = a or c or g or t
ttttttttttttttttaaatgttgatcctcaagttggatttatgtccaagatttgtgcaaacagctgcctagtaacagcagctaccttaatacagacctctggcaccatagacataactgtgggggctgaggtcatcttcagtctggggccctttagcagacctggctggtgtggccttcattccagatcatggtggctctcaggaggccgacacaggtgcagtggagagcatgacagcatcaggccatcccgttgttctcttctgctctagagacaaagctctcttccctaactcctcacagaggggtaatgagcagggggtgcagggcaggtcctgctactgagcttgaagcaaaaacagcacatgcacacgaactgggtgtggtctctggagagcctggaaccaagtctttgaggttctgagaggaaggggtcttgttgcaccccactcttangatggaagccagt

SEQ ID NO: 1173 - DNA, 124 bp, Rattus norvegicus
  Genbank Accession No. AA998345
ttttttttttttttttgcaagttaagaagatttattgacagactagtcttgcagtccaaaaccgggctgaccgaggctcaagaagtttgccatggaaaaacccgttttggattcaatccccaaa

SEQ ID NO: 1174 - DNA, 249 bp, Rattus norvegicus
  Genbank Accession No. AA998356
tttttttttttttttatgatacaaaaatagtttattacaaaagaaatctgacccaaacctaataatttacatcgtgatcaatgtcctcccaatcccctctgttcctccgggtccgtcggggtagaggatggcagaggaggggctgtcctttggttcctccactcaaagaatcgaatatctagtggattccacagagggaaccttcgtgcctgagattaaatggggcttagagtcctgggcaatgggcgc

SEQ ID NO: 1175 - DNA, 548 bp, Rattus norvegicus
  Genbank Accession No. AA998435
tttttttttttttttttccttttgaaaaatatttattgagtataaataaatgtcctatacattaaatatcaagaaatattcattattcattacaagtcaggctatttaccgagggaaccatgggatcaaagtagtaactcatgatgcagtagtgacagttcattccaacagtagacagagtaatgacttgctcacatgacacaacgaaacctatcaaaggaggccatcacttaaagccatctacagtaccacaatagacaatggttctgaaaatactatcaaccccatcaataatctttatcttattaatacatcatcatactaccatatagaatttagagtctcatctccttggtttaatttcagattattgttaatgaatgaaaacaagtcatacaaagtcaaaggtacttttcagttagtctttcctaaggaaaaaaaagaatcaaattttagtaaagacagcttcccccaagcaatgaattccttaatggaaaaaaataaaaatacaggagcagtgtaattagcttttccctcaaagaaaggaa

SEQ ID NO: 1176 - DNA, 352 bp, Rattus norvegicus
  Genbank Accession No. AA998471
tttttttttttttttttggggttttaaaggtttttttgtttgtttttaaacagtctggtccctgataggggcctcctacccctctgcagcctgctacagttctgaacgtctctcaatcttgagcagttccacctcaaacaccagggttgctccacctggagggagaaatgtcatcagactgggacctgggactctgggagagtgatgggctgagggtgttaagggttttacctggtatctttgggggtgggaggatgagccccctactgtaatggtgtgtggggtgggagatgagccccctactgtaatggtgtgtggggtgggagatgagtcccctactgaaatggtgtgt

SEQ ID NO: 1177 - DNA, 374 bp, Rattus norvegicus
  Genbank Accession No. AA998488
ttttttttttttttattacaggtgtgccttttattctcctagacaagagtcatttggacccttcgtgttcctgctgagaattaacatgcagcatagtcattaaacaaagcagcatcattttggggtcagtagtattgtgtccttgttgtttccccaatgtctcagctttgtgagttagagtcttgatgtctccccaggttactcgcttgcttttcttcttgtaacgtctcctcttgatggctttgttgtctcccttcagctgcttcttttgcccagtggtcatcaaggtgctctccgggttggacgaatcagaatgggagccacctggcatttcattcactttatgaaggttaccaggcattggtgaagcacca

SEQ ID NO: 1178 - DNA, 419 bp, Rattus norvegicus
  Genbank Accession No. AA998506
tttttttttttttttttacttgatctgagagtttacttaaagtgaggagacagtttttagttatcaccttatttatacaaatctgatccccttgctacagctagtgtggatatgtaatcactaaatatggataaagtctgaatagcttgaataaacacagtatattgttttctaatatcgccatcctacttttctgtcatcgatcctgattttttttacagccacacaacttcatgctaattagaaaccaacttgtttcttacacatatctctttgagaagagttttagcatcctcagtcactatgtcaaggaaataatatttcaggtaagatatttctctaagatcacgatcatcagtaaataaatgtccattagccgaacagtaatcatgataatatcttgaaagcctttcatgtat

SEQ ID NO: 1179 - DNA, 420 bp, Rattus norvegicus
  Genbank Accession No. AA998556
  misc_feature (1)..(420): n = a or c or g or t
tttttttttttttttttgctgttgctgtcagtgtttattaaatgttcctgctgtcacagaaagccagaagcagtccataggatggactgggcctagctcagtagtacaacacctgcctaacacaaaagaggccctgggttcctcagccctgaagaaattaaaaaaaagtcagtccttgtgctggggaagcagcatggttggtagaatacttgcatggtgtacacaagccctgggacccatccctgccttctacaaagctcaacgtatactgcacacctgtaatcccagcactcaagaggtanaagctggatgaccagaagctccatgctatgctagacagcaagtgagaagccagcctggatccatgacactctgaaaacgattcagggtggctccagatcagagaagcagtgctgggga

SEQ ID NO: 1180 - DNA, 435 bp, Rattus norvegicus
  Genbank Accession No. AA998619
  misc_feature (1)..(435): n = a or c or g or t
cggccgccgcagggccgctcctcacggcaggacaagtattcggtgcttttgcccacctacaacgaacgggagaacctgccgctcatcgtgtggctgctggtgaagagcttctccgagaggtanacggaacttctcgcgcgggtgccgggagccagccgcggactgcatgtcggcggttggctccgcgaggagaccctccgaggcctggcctcctcttcctcccgagcctgctcgaggcttttttcccgctggggaaaaccgaggcgaacagccccgcatctgcatcccgggctctcattcctgctctggtctctagcgagtcctgtgtttacctaatgacagatcgttctggtgtcagtcccccgcctttctcttgaaagggctaacttcacttttacttcggggcgagactcaaagcctgacctcatccctctt

SEQ ID NO: 1181 - DNA, 392 bp, Rattus norvegicus
  Genbank Accession No. AA998621
tttttttttttttttttcctatatattgctttctacttttccttccatcccagaagggagcccaggcctaagcactcctgctttttccctatgtaggcacctgggagttaccagcccaacagcccacagccagcctggagcccaaagaagctatcaaatgactattccaagcagtcactgttcgtggaagtggcataccctagtcaggtatcaaggtcacccacggcaaacgtgggaggcccatgccagggcccagacccactgaccctgtaagggctctttcatgaggctggtctcagcagtaggatgtagaactctcctcccaagtgagagaccagagcataggttgtgacaggagtacagatgtaactgatccagctacgcccggcaga

SEQ ID NO: 1182 - DNA, 482 bp, Rattus norvegicus
  Genbank Accession No. AA998638
tttttttttttttttttcagctagaagagccaagtttatttagataaaattctgaaccacgttttcacaatggaaataacaacaatgatggtaatgatttgccatgtggcaggcactgaggtgggtcttacacaccctgactttgttactgtttttcccagtccccaatgtccaacacattcacctgcgagttcccggtccccatgttctgtctcaccatctggctttgtatcaagatggatttcctcttcaaaagtctcctccctgctgatctgttaaaagtccatccagatcagatagaccctgcacttgctgcccctgatgtatatataacatgtgaagactgcactctcttgacttgttctccctcagcaatcacttggatgctacatatgttgatgtcaataatttattcccagtatcccaagatcctcctctttttcatttatacagttgccctctgtttctgaaggcttcatatc

SEQ ID NO: 1183 - DNA, 557 bp, Rattus norvegicus
  Genbank Accession No. AA998660
tttttttttttttttttccgaataaagtttattaaataatatgtacagcgaagtagtaattcaacatgtctatcaaatcaatccacggcagtaaggaaaaacaataaatgaacagaaaaacctgtgtctgcgtagtacacgcgcttggtgtgcaatttaaatgcaatactctaataggttacatagatcggttttgtttttttctctcaataatgtcttcttttttggtagtaacctattccagcaatgtgacttaatactactgcagataaataggactgcaaacgtaaaactgcaaatatgatatgatagctgtcttctcttccccagagaacgagtgaatatgttaacaatttcccaggactatttttgtgctaaaggtccgcaagtgaattattcgaaattccttcatttaaataaaagtgttgggggggggaaacccttcgtgacttcattttactccctttctgctcaacttttaaaaattatttcttctatacaaggtaagtacatgggctccacaaagttaaacatacattacatatttacagtcccac

SEQ ID NO: 1184 - DNA, 370 bp, Rattus norvegicus
  Genbank Accession No. AA998666
tttttttttttttttttgttttttggaaggagttcccgaacctccgctgcttggtggtgtgtccctttctttcctgctgtgtgcctcccgagttgcaccttttctccttcgaaggggattttagttttttaattttactttttaatttttttttttttgaaggagttcccgaacctccgctgcccgttgagtcccgttcttccacgccacgtgcctcccgagtgcaacgcttccttttttttctcgccctcgagaagggtaaattttttttttttttgtgtgtgtggcaatgttagcgacttcttcccgtgctctctctcgctcttctcgctcgtattcccgcccgtcacgcttaacgcacgttcgtgtg

SEQ ID NO: 1185 - DNA, 209 bp, Rattus norvegicus
  Genbank Accession No. AA998701
ttttttctattttttttgattttgttttctttttaattttttttatattactgataaacacagtggcaaccggtgtcttctctcatttcgctgttccagtcttctctgcaggtgcagggaaaccttctctgaggcttccagggagtccattcattcccttagttcaacacaagcaactgtatactccggaagtgttgctgtgcggatag

SEQ ID NO: 1186 - DNA, 389 bp, Rattus norvegicus
  Genbank Accession No. AA998752
  misc_feature (1)..(389): n = a or c or g or t
tttttttttttttttctcgtctcaaaatatttaattttgtttgaaaaggatacattcccaccttccctccctaccacatcactccggcccaccagcagtgacacacgcacaggcacacacacacataaggccaatgggctgctgtctgcttccgcctctacagctgggacaaaggggtttcctcctggcctccttcccccagcaaaggtangganaggggttgctggaatgcggctcccagggagggtgcagagccccaaacactctaccaatcacatgcacttagaaaaataaaaccaagtggtgttccggcatccaacaccaaacgacagcaatctctacctggaaatcatctttgcctttttctagaaaaatttattgcaccctcg

SEQ ID NO: 1187 - DNA, 467 bp, Rattus norvegicus
  Genbank Accession No. AA998807
tttttttttttttttttgaacgctttacgtgggtaatctataggaagctttggagccaggatcagctcctctgagtagaaacatgtgagagacacttggggtttggggtaagaagagaaagatgggagggtcctacacccttcatcaacctgggctcgccacctccccttgagtctcgatgatggagattacctgctcaatccctttatccataaattaagaaactgaaggtcgaagaggtgaatcgggaaaaaccttaaaatatggccatgagattcctctctctgaggcacttgtcagattctaggatccttcacgaggctcctccctctcctcacttaaactgtaagggttttatgggtggctgtgtatgaatttctgagtggaggagacagatcttgacatctgggaagtgcccagacatcgggggctcaaaccttgccagctcaggatgccctacctcctcc

SEQ ID NO: 1188 - DNA, 431 bp, Rattus norvegicus
  Genbank Accession No. AA998857
  misc_feature (1)..(431): n = a or c or g or t
tttttttttttttttttaagctcaaagtagtgtgctttttattcttcaacaaaaccaaggaaactgattaaacttagaagctagtgcaacaatttagtgttgctgaaatcaataaaataaaagtaatgagagcagaggaaagggtgttaactgttcctgatgacatgccaagctattttagagactgcggccaaagcttctgcgcaagtgggtttgatgaatctctcaggcagcaagaacccgtatctgcctgtatcccgaagttcaatcgtaaacgaatatttgatgcccaaatcatagatccaatcatcagaacctccaggagctagatataaactttctgagccactgccatgtgtgtacctggtgtttttattaatactttcaatggcacgaactgcttcgctggccactanagacagttcctcatg

SEQ ID NO: 1189 - DNA, 135 bp, Rattus norvegicus
  Genbank Accession No. AA999006
tttttttttttttttatcagtgatatataaatttttattatgaacatagagcaaatttacaaataactcccaattggctttagccgggcaaaatgaagtaacccaacattgcgtgggtgaagcaaaatatacaca

SEQ ID NO: 1190 - DNA, 502 bp, Rattus norvegicus
  Genbank Accession No. AA999042
tttttttttttttttttgtgttatagatttatttgatatctgaactgagtctacaagtcagacccatgagtaacggattgcttcgtggttgtcagaggctagtgtgcagtatttccaagggttacatccaacgacatgacgcggaaaacacaaattgacggagacagacacaatcattaagacaagagacgctaaacgtgccttagtgtccgtgggattgatctaaggcaaggacccttctaggtggggaccctagtgactgatctaaagcagagtggcttaccaccactagatgctaactgtactgtgtgcaaaccaggcgcccagtaacaactgtcctggaaccccaaaactggggagcctgccctcccagtggtgacctctcatgcccaatctacctctaaatgtcagctcttcacgatggaccagatggtgacagagctaatgtaagcagaagacgcgagaggtggtattgagcaaatccttgatgtggggacagagt

SEQ ID NO: 1191 - DNA, 469 bp, Rattus norvegicus
  Genbank Accession No. AA999054
tttttttttttttttttcttaaggcaggttagtttaattttatagaagaaatactttcaaacgatacaaattacacaatcagagagaacagtgacaaaacaaagagatgaatactgattataacttattcccacaacagaaggttacttatttcagcaataatcaccaaagtccgacaaggcaatgattagataaagtgaaaaaccaaattcccttttacacacagtgctgtttcagagaccctggtggcagaattcaggttgttgcatgaccagagctgttcagagacagtggttttctttctcaccagactaagcacatatacaatctcacacagcagatggaaactccctccagctccctaatgcccatataccttcatttgtctgaagtaggcaatgtattcccaacattgtagttttaagaggttggtacctgccaaaaggaagcaaatgatggtgttgggtac

SEQ ID NO: 1192 - DNA, 342 bp, Rattus norvegicus
  Genbank Accession No. AA999064
tttttttttttttttttgggaagggtcacttcttttattatcccaaaaatgcgaagtattgaaggcacttgcaagaacatggagagaggaggaaagcaggaagcaggatcccacctggtcgttacccagcctggagaaaaagaaaagctatagagccaggtcggaagtcagcccggtgtccactacagaaggcgaatcccattctacagacaatgaggaagttaagagcacgggggcaagggacggggaccagcagtcacgagttagtggttctttaaggaacacatttggcagtgaggacaccgttcagggcccctgctggaaaaggtctcggtacatctc

SEQ ID NO: 1193 - DNA, 397 bp, Rattus norvegicus
  Genbank Accession No. AA999103
tttttttttttttttttaaatacttgcattttatttcaggccaaagcccctcgactttgaactaaatgccaggccagtcccacaatgcaggccagtagtgccacagttgaggtggaccgcacagctggagtggatggccagagtgagacacacacacaaacctaagagcagagcagtggcaaggtgagcccggcacttagcccgccctagcactccagctagcagcccctgctttttgcaaagcccattcagcagcaggagacaggagccgaactgtctgcaggacagcttagggctccttacctccatccccagccctaacttcccggccgaaacaaagcctgtggccccactggactgaacttgcagcttccaaggaatgcagccgtaggccctg

SEQ ID NO: 1194 - DNA, 335 bp, Rattus norvegicus
  Genbank Accession No. AA999138
tttttttttttttttttagactgacatcttttatttcatacactgtgtaacctggtacataaaaagtaccagattatagtcatgataaatattttcatttccatttggtctaccaaaccaaatcacttagctattaaaataaaaaggtggggactgagccaacagttatgtgcaaacagtaagttttctcttccagccctcaaagcagcagctgctgtgggaatgagatgcagacctgatggtgacatgccttttcaaagaagctgagcgtccactctccagtatgaagatgacgtagacgcctatgctgactatgagcacgcgagcacacgagt

SEQ ID NO: 1195 - DNA, 200 bp, Rattus norvegicus
  Genbank Accession No. AA999169
tttttttttttttttataaagaaccatatttattttcatttacagcatcaagtatcataaataaacctaaacatcgcttgctgtgtgtgtaaaatacagggttccgtatggcactgtaaatgaattctctagggtcacagacatgccacgagatggagaggagactgtctaaagaggctgagagcaggggtggggtgcgg

SEQ ID NO: 1196 - DNA, 404 bp, Rattus norvegicus
  Genbank Accession No. AA999172
tttttttttttttttttcttcaacaacacatttattactcccactcagtggttcccgggggctttgacgttaggtcatacataattctagaaattccaggaatcttctttatctcagtgaccatctttagcaccacctctacaggaatttcattgccaggtgttgcaggtactccagtcatgaagtcactagtaataaaggttcgaataaccacagacctctggcatgaaggctgcttctgaagtggatctcgatcgaaatgtaatggggtcaaaatcactggcatctggctgattttcccagcatacccagactcccggagaatgttatgggcctcaaaatcagcttggcgtaaagtactgagcacccctgttgtcaaaaatgttgcctcgtgccgaattctt

SEQ ID NO: 1197 - DNA, 1795 bp, Rattus norvegicus
  Genbank Accession No. AB000199
gcgagcggaaggaaggaagcctgtgtgcatctagctggtccaccagtccaggacacaacatctcccagtggccagtttgggcgccctgggacttcctacagctggccatggcagactctgcacaggtgccagcactggtatacctggtcacaggtggctgtggcttcctgggggagcatattgttcgaatgctgctggagtgggagcccaggctccgggagctgcgtgtctttgacctgcacctgagttcttggctggaggagctgaaaacagggcctgtgcaggtgactgccatccagggggatgtgactcaggcccacgaggtggcagcagccatggctggatctcatgtggtcatccatacagctgggctggtagatgtgtttgggaaggccagtccagagaccatccacaaagtcaatgtgcagggcacacagaatgtgattgacgcttgtgtgcagaccgggactcggctcctggtctacacgagtagcatggaagtggtagggcctaatgtcaagggccaccccttctacaggggcaatgaagacaccccatatgaggccatccacaggcatccctacccatgtagcaaggccctcgctgagcagttggtcctcgaggccaatggaaggaagggactgcgctttggaggtcggctgtttcgggccatcccagcttccgtggagcatggtcgggtctacgttggcaatgtggcttggatgcatatactggtggcccgagagctggagcagcgggcagcactcatgggtggccaggtgtatttctgctatgataagtcaccttataaaagctacgaggacttcaacatggagtttctgagtccctgtggacttcggctgataggcacccacccactgctgccctactggctactggtgctgctgactgccctcaacgctctgctgcagtggctgcttcggccgctggtgctgtacacacccctgctgaatccctacactctggctgtggccaacaccacctttactgtcagcaccaacaaggcacagcgccatttcggctacaagcccctcttctcatgggaagagagcagggcccgcaccattcactgggtgcaggccatggagggttccgcctggtgatggcagggccaggaactggagaccactgtggcacactccaggtcctgagcccccaaaagcctggacggagagaaatggctaccttttgaagctgctgactctgctagacacatcaggactgtgctatggaccctgccacgtctgtgcctggttcatatcccagtctccaagttctaggacagagtctgggtgcaggcctatctttggtgccaactcgggcctgccagctagttggcaaaaactgattcctgaatggtctcactaccccttcctgtttctagtttctcaagcagggagggacagagactccagaggtctgttgctggcctgcttactccaggtaccattttcagacctggctcctgccacatctggttctccattttcttttcttttttttttttctttttcttttttttttatttttttcggagctggggaccgaacccagggccttcgcttgctaggcaagcgctctaccactgagctaaatcgttttcttaagtgtatctcttttagacatttttcttttaatttgctttaaagaaaactgaaggaatgaatggttttccatgtcttgccttcttaacaaattcagctatgatattgttagcttcctccctgaggatgccaacctgtatctggccacacctggattaaaatcctttgcc

SEQ ID NO: 1198 - DNA, 4514 bp, Rattus norvegicus
  Genbank Accession No. AB000216
tgaagtttgtggagcgctttctcaccggctggtccgggacgatagccggcgcctcgctcttcggtgaccgccccattctctcgggattccttctctgtggtgacggacgctctagacgctcggtaagggaagctgaggctggcggcgggagttcagaggaggagcgcggagaggttgctcgctgacagcggcgcggctggacgcggacggcgtcgggctctggccggctgagagcttcgcccaccttccccgcggcctgtgcgcaggcgatgctgcggccccgaggcgcggcgcggcgagcagggagggcgcctccgagagcctagagctggtttccgtcctcttccccggggcaagtgggcatggaacagtgagagcccctcgctcggcgaggccgcgcgcggaggctccccatggccgggacgtacagctccacattgaagactctggaggacttgaccttggactccgggtatggggccggcgactcctgccgctcgctcagcctttcgtcttccaagtccaactcgcaggcgctcaactcttcggcgccgcagcaccgcggggcggcctggtggtgctactccggctccatgaacagccgccacaacagctgggacaccgtgaacacagtgctgcccgaggatcccgaagtggccgacctcttctcgcgctgcccgcggctcccggagctagaggagttcccttggaccgagggagacgtggctcgggtgctccgcaaaagcgtcggcggccggaggctgccctcattctccgccgaggctgtgaggcgcttggccggactcctccgccgggcgctcatccgcgtggcccgggaggcgcagcgcctaagcgtgctgcacgccaagtgtacccgcttcgaggtgcagagtgcggtgcgcctggtgcacagctgggcgctggccgagagctgcgcgctggcagcggtcaaggcgttgtccctctatagcatgagcgctggcgatgggctgcgccgcggcaagtcggcacgctgcggcctcactttctccgtgggccgtttcttccgttggatggtggacactcgcatctccgtgcgcatccatgagtatgcggccatctcgcttacggcttgcatggagaacttggtggaggagatccgggctagggtcctggcgagtcagagccctgatggcggaggggcaggaggcggagaggtatccgctgaggccttggagatggtcatcaacaacgatgccgagctctggggagtcctgcaaccctatgagcatctcatctgcggcaagaacgccaatggtgtcctctccctccctgcctacttcagtccctacaatggtgggtccctgggccatgatgagcgagcagatgcctatgctcagctggagcttcggacactggagcagtcactcctggctacctgtgtgggcagcatctccgagctgagtgatctggtctctcgagccatgcaccacatgcaggggcgccaccctctgtgcccaggcaccagccctgctcgccaggcccgccagccaccacagcccatcacatggtcccccgatgctctccatacactctactacttcctgagatgtccacagatggagtccatggagaaccccaacctggatcccccaagaatgaccctgaataatgaacggcccttcatgctgctgccaccactgatggagtggatgcgggtggcaatcacctatgcagaacaccgtcgcagcctcactgtggacagtggcgatatccggcaggcagcccggctgctgctaccaggcctggactgcgagccccgccagctcaaacccgagtgctgcttcagttccttccggaggctggacgctcgagctgctactgaacgcttcaaccaggacctgggcttccgcatgctcaactgtgggagaacagacctcatcagccagccatcgagccctgggccagacggggtgaacacaatggatgaccagggtctgacaccgctaatgtacgcctgtgctactggggatgaagccatggtccagatgctcatcgatgctggagcaaacttggatatccaggtcccaagcaactctcccaggcatccttctgtccatccagacagcaggcactggacctccctgacattcgcggtgctgcacggacacatctctgtagtgcagctgctacttgatgctggtgcccatgtggagggctcggccgtgaacagtggggaggacagctatgccgagacaccccttcagctggcctctgcagccgggaactatgagctggtgagcttgctactgagccgaggtgccgaccccctcctcagcatgctggaagccaatggcatggcttcttccctccatgaggatatgaactgcttcagccactcagctgcccatggccacaggaatgtcttgaggaagctcctgactcagccacagcaggctaaagcagatgtgctgtccctagaagagatcttggctgagggcgtggaggaaagcgacacatcgagccagggcagtagcgaggggcctgtgaggttaagccggacccgaacgaaggccctgcaggaagccatgtactacagtgctgaacacggctacgtggacatcacgatggagctgagggcactaggtgtcccctggaagctgcacatctggatagagtctctgcggacctctttctcacagtcacggtactcggtggtgcagggcctcctgagagatttcagctccatcaaggaggaggagtacaatgaggagctggtgacagaaggcttgcagctcatgtttgacatcctcaagaccagcaaaaatgactccgtcctccagcagctggccaccatcttcactcactgctatggcaccagccccatccccagcatcccggagatccggaagaccctgccagccaggctagatcctcactttctgaacaacaaggagatgtctgatgtaaccttcctcgtggaaggaaagctgttttatgcacacaaagtccttttggtgacagcatctaacaggttcaaaaccttaatgaccaataagtcagagcaagatggggacaacagcaaaaccattgagatcagcgacatcaagtaccacatctttcagatgctgatgcagtacctgtactatggaggaacagagtccatggagatccccacggctgacatcctgcagctcctgtcagctgccaacctgttccagctagatgccctgcagagacactgtgagatcctgtgctcccagacccttagtgtggagagtgctgtcaacacctacaaatacgccaagatccacaacgccccagagctggccctcttctgtgaaggcttcttcctcaagcacatgaaggccctgctggagcagatgccttccggcagctcatctatggccgaagcagcaaagtccagggcctggacccactgcaggatctgcagagcaccctagctgagcgagtacattctgtctacgtcacctcccgggtgtgagccagggtggatggtgactgctatctgagggtgtacaaaggtctgttaaagccagaaaccaccagcgacacccccagtggagggaggcttgtaggccttctggggtaggctctcggggggtacgtcctgctcttcccctagattaccctctgtggtgttgactgatcctgaggtggaaggagagtccacttcactgttgctcggccagtaactggcaggggtgtgacgtaattgcaccctgagggctaccctgtgccctctcccctccagtggctcagcgtcgagccgatccacctcagcaccagccatcctggctggggatgttaggatcacaggcattcttatgaatgtagaaagtgtccgagcccaggccactgggtgcaggagccgctatgtttggtttcctaacagagagaggctaagtcctgccctccaagctgtgcctttgaaagggctgggccctgttggtgaaaaccagacctccagtgccctccctacaagactactaacgagagtctgaactgggaatccctgagcaccgggtatgctgggctacaggagctggcagccacaggaggcccagccccatcatgtctgtaggctgaggcagcagggcttcaatggcctcaagtgcagggcgccttccactcagggctggggtgcaagagcacacttctcacctgggttccgtgactctggggcatgaacggacagggccttggtggaagagaagctgtgtcctctcccctcctgtcctcagtcttggctccccatcctctgacctgtttgtggacagacgctgggacacgatcaagaacagctaccttagaaactatttattcatcagaagcccccagggcttgcaatcctggaacaatattttcaacttgctgcttgtgctggatgtacaaaagaatgaatggtattttattgctgtaatattgtatgatactgtaactataccttaatgttgttacttactgtaaatgtactatggttttatcaacaataaacactcattaacattgac

SEQ ID NO: 1199 - DNA, 1288 bp, Rattus norvegicus
  Genbank Accession No. AB000491
gccgaaagagggaagatggcgcttgatgggccagagcagatggaactggaagaggggaaggcaggcagtggactccgtcaatattatctgtccaagattgaagaactccagttgattgtgaatgacaagagtcagaacctccggagactgcaggcccagaggaatgagctcaatgcaaaagttcgtctgttgcgggaggaactgcagctgctgcaggaacagggctcctacgttggagaagtcgtgagggccatggataagaaaaaagtgttggtcaaggtccatcctgagggcaaatttgttgttgatgtggacaagaacattgatatcaatgatgtgacacccaattgtcgggtggctctaagaaatgacagctacactctgcataagatcctgcctaacaaagtggaccctttggtatcactaatgatggtggaaaaggtgccagactcaacctacgagatgattggcgggctagacaagcagatcaaggagatcaaagaagtgattgagctgcctgtgaagcaccctgagctctttgaagccctgggcattgcacagccaaagggagtcctgctatatggacccccgggcactgggaagacgttgttggcccgggctgtggctcatcatacggactgtacctttattcgtgtctctggctctgaactggtacagaaattcattggggaaggggcaagaatggtgagggagctgtttgtcatggcccgagaacatgctccctccatcatcttcatggacgagatcgactctatcggttcttcacggctggagggaggctctggaggcgacagtgaggtacagcgcacaatgctggaactgctcaaccagctggatggctttgaggccactaagaatatcaaggttatcatggctactaataggattgatatcctggactctgccctgcttcgtcctgggaggattgacaggaaaattgaattcccacctcccaatgaggaggcccggctggacattttgaaaatccactctcggaaaatgaacttgaccagggggatcaacctgaggaaaattgctgagttgatgccaggagcttcaggggctgaagtgaagggcgtgtgcacagaggccggcatgtatgctctgcgggaacggcgtgtccacgttactcaggaggactttgagatggcagtagccaaggtcatgcaaaaggatagtgagaaaaacatgtccatcaagaagctttggaagtgagggtgtgtcctttgtgtggatccctcaaataaaggtctgtgcgataaactcc

SEQ ID NO: 1200 - DNA, 2138 bp, Rattus norvegicus
  Genbank Accession No. AB000929
cctggaggtatcttccaacatggctaggtggcagagagtctactggttgcgttctctcttcttcgcccttgtgacttcagtaaattcattaagccttcctcagtcagagaatcctgccttcccaggcactctcatttgtgataaagatgaagtgagagtagaattttcaagcagatttgacatggaaaagtggaatccttccttggtggatacctttggtaatgaaatttcgaactgcacttatgctctggacttggaaaagtttatcctgaaattcccttacgagacctgtactataaaagtgattggtggataccaggtgaacatcagagtgcaggacaccaatgctgatgtaagctataaagatgacgtgcatcactttttctgcccagctattcaagcagagattcatgaggtctcagaaattgttgtctgcatggaggatctcatatctttttctttcccacaacttttctctaggcttgctgatgaaaatcagaatgtatctgagatgggatggattattaagattggcaatggtacaagagtccacactctgcccctgaaggatgctatagtacaaggatttaatctcctgattgacagccagaaaataaccctccatgtgccagccaatgctaccggagtagctcactatgtgcaagagagcagctatctctatactgtacagctgaagctcttgttctcaagtcctgggcagaagatcaccttctcttcacaagctatctgtgcaccagatctttctgtggcttgtaatgtgacacacatgagtcttactataccagaatttcctgggaagctaaaatctgtgggctttggacaaaggaacatccctgaggatcaatggcatgccaatggaattgacaaagaagcaacaaatggcttgagactgcatttcagaaaatctctcttgaagacaaaaccctctgaaaagtgtccattctaccagttctacttctcttcactcgagctgacctttaacttccaaggggacatgctatccacagtgattgatcccgagtgccactgtgagtcaccggtctccatagatgaactgtgtacacgggatgggtttatggactttgaggtctacagccaccaaacaaaacctgcactaaacctggagagcctcctggtgggaaactcctcctgccagcctattttcaaggttcagtctctggggcttgcaagatttcacatacctctgaatggatgtggaacacgacagaaatttgaaggtgataaagtcatctatgagaatgaaatccatgctctctgggaaaatccaccgtcaaacattattttcagaaacagtgagttcaggatgaccgtgagatgccattacatcagagacagtatgctactaagggcccatatcaaaagccattcttctccagtggcctctgtaaagccaggtccactagcgttggtcctacaaacctacccagacatatcctaccaacggccttataggaagaatgagtaccctctagtgaggtacctccgccagcccatctacatggaagtgacagtcttgaatagaaatgatcccaacatcaagctggttttagatgactgctgggcaacaacttttgaggacccagcctctgtcccccagtggcagatcattatggatggctgtgaatatgaactggacaattaccgcactactttccacgcagccaactcctctgcagcccattctggtcactaccagaggtttgatgtgaagacttttgcctttgtgtcagagtctcgggggctctccagcctgatctacttccactgcagtgccttgatctgtaaccaagcctcccctctgtgctctgtgacttgccctgcaccactgaggaacaaacgagaggccagcaaagaaggcacaatgacggttagcctcccaggacctattatcttgttgtcagatgactcttcatccaaaggtgtaatgaaccctgacagctatgagattaccaaagatattgcttctaaaacattgggtgctgtggctgcactagtgggctcagcagtcatcataggtttcatctgttacctgcataagaaaagaattgtaaggttcaattcctgattggacttttgcaaataaaagaggctgcagt

SEQ ID NO: 1201 - DNA, 2195 bp, Rattus norvegicus
  Genbank Accession No. AB001453
  misc_feature (1)..(2195): n = a or c or g or t
ccagggcccgcgctgcgtggctgctgctctgctgccttgtaacggtgaaagggctcgatcgtcggcctcggctgtccctctccgaaaaggctgtcctgggacccgggctcctagtcccgctcggggcaccgcggctcgtgtgctatgcgcggcagtccgcgccggggccggcagcagcagcgcccgggtggatgcggcgagcccacggaggggcatgcttccacgcaccaagtacaaccgcttcaggaatgactcggtgacatcggtcgatgaccttctccacagcctgtcggtgagcggcagcggcggcaaggtctcggcggagcccgcggcgagcccctacctggtgtcgggcgaggcgctgcgcaaggcgccggacgatgggcccggcagcctgggccacctgctccacaaggtgtcccacttgaaactctccagctccggcctgcgtggcctgtcgtcggccgcccgggagcgggcaggagcgcggctctcgggcagctgcagcgcgcccagcctggcggccccggacggtggcagcgcgacccccgggtcccgtgccccggccgccagcatgagcgccaccaggaagagccgggccagcgacgagccgttgcccaggcccccgcggggcgcgccgcacgccagcgaccaggtgctggggtcgggagtcacctatgtggtcaagtacttgggatgcatcgaagttctgcgctcaatgaggtctcttgacttcagtacaagaactcaggttaccagggaagccatcagccgtgtctgcgaagctgtgccaggcgccaaaggagccttcaagaagagaaagcctccgagtaaaatgctgtccagcatcctggggaagagcaacctccagttcgcagggatgagcatctccctgaccatctccaccgccagcctgaacctgcgcactcctgactccaaacagatcatatcgaaccatcacatgcggtccatctccttcgcctcagggggagacccggacacaacagactatgttgcctacgtcgctaaggaccctgtgaatcgcagagcttgccacattctggaatgctgtgacgggctagcccaagatgtcatcggctccatcggacaagcctttgaactccggttcaagcagtatttgcagtgtccttccaagattcctgctctccaggaccgaatgcagagtctggacgagccgtggactgaagaagagggagatggccccgatcacccgtactacaacagcgttcccaacaagatgcctcctccaggagggtttctcgatgctcgattgaaagccagaccccacgcacctgatgcagcccagttttcaggaaaagagcaaacttattaccagggaagacacttaggagatgcattcggtgaagactggcagagagcacccaccaggcaaggctccttggacatctatagcacaccagaagggaaagctcacatggttcctgtaggagaaacaccaacctatgtcaacacccagccagtcccaccacaggtttggccagcagcaaccagcagcactgagagcagcccacggaaggacctctttgacatgaagccttttgaagatgccctcagaaaccaacccctgggccctgtgttgagcaaagctgcgtctgtggagtgtatcagccccgttacacccagagccccggacgccaagatgctggaggagcttaatgctgagccctggtaccaaggcgagatgagcaggaaggaggcagaggctctactacaggaagatggagacttcctagtcaggaagagtaccaccaaccccggctcctttgtcctcacaggcatgcacaatggccaggccaagcacctgctgctggtggacccggaaggcacggtccggacgaaggacagggtctttgacagcatcagtcacctcattacttaccacctggagagcagcctgcccattgtctctgccgggagtgagctttgtctccggcaaccagtggagaggaaaccctgagcttgccctgcgcccaggtcaggaggacctgggctccgctgctctcagcctatggaatctggggcaactgtctgtgggcccatcaccttcttcaaaagccccgtgagagaggtttccttcaagttcaaatttcataaatatgttcacacgactcagatgcatantanaaatgttatacccacacatcctgtacaaa

SEQ ID NO: 1202 - DNA, 1587 bp, Rattus norvegicus
  Genbank Accession No. AB002406
cgcaggttgtggctgcacacactcgtcaaaatgaagattgaggaggtgaagagcaccacgaagacgcaacgcattgcctcccacagccacgtgaaggggctggggctggatgagagcggcctggccaagcaggcggcttcggggctcgtgggccaggagaacgcgagagaggcatgtggtgtcatagtcgaattaatcaaaagcaagaaaatggctggaagagctgtcttgttggcagggcctcctggaactggcaagacagccttggccctggctattgctcaggaactgggcagtaaagtccctttctgcccgatggtgggtagtgaagtatactcaactgagatcaagaagacagaggtgctgatggagaacttccgaagggctattgggctgcggataaaggagactaaggaggtttatgaaggggaggtgacagagctcactccctgtgagacagagaaccccatgggtgggtatggcaaaactatcagccacgtgatcatagggctcaagactgccaaaggaaccaaacagctgaagctggaccccagtatttttgaaagtttgcagaaagaacgagtagaggctggagatgtgatttacattgaagcaaacagtggagctgtgaagaggcaaggcaggtgtgacacctatgccacagagtttgaccttgaggctgaagagtatgtccctttgccaaagggagatgtgcacaagaagaaggaaatcatacaggatgtgaccttgcacgacttggacgtggccaatgcgcggcctcagggtgggcaagatattctgtctatgatgggccagttgatgaagccaaaaaagacagagatcacagataaacttcgaggggagatcaacaaggtggtgaacaaatacattgaccagggcgttgcagagctggtccctggagtgctctttgttgacgaggtccacatgctggatatcgagtgctttacctacctgcaccgagccctggagtcctccatcgcccccattgtcatctttgcatccaaccgaggcaactgtgtcatcaggggcaccgaggacatcacttctccacacggcatcccgttggacctgctggaccgggtgatgatcatcaggaccatgctgtatacgccacaggagatgaagcagatcattaagatccgagcccagacggaaggcatcaacatcagtgaggaggccctaaaccacctcggggagattggcaccaagaccacgctgaggtattcagtgcagctgctgacccctgccaacctgctggccaagatcaacgggaaggacagcattgagaaggagcacgtggaggagatcagcgagctcttctatgacgccaagtcctccgccaagattctggccgaccagcaggacaagtacatgaagtaacgtagggtttggaggtgcacccagaggacagaccccacaccgaggacagggtcttgcgttgagcatgctttgcagtgttacagtttgtttgtaaattatcaaacctccaaggttgtttggaaggaaccctttcccacctagcttgtttttctaataaaactgaatcttattttgatgataaaaaaa

SEQ ID NO: 1203 - DNA, 1772 bp, Rattus norvegicus
  Genbank Accession No. AB003042
ccgttgctgtcgggtcaccacagagcccaggagaagccaggacatggaccccataagtaacgacagcagtgaaatcacctatgattactctgatggaaccccaaatcctgacatgcctgcagatggcgtttacattccgaagatggaacctggggacattgcagcccttattatctacttggccgtgttcctggtaggagttaccggaaatgccctggtggtgtgggtgacagcctttgaggccaaacgtactgtcaacgccatttggtttctgaatctggcggtggccgacctcctctcgtgcttggcactgcctatcctgtttacgtccattgtaaagcataaccactggcccttcggtgaccaggcctgtatagtcctgccctcgctcattctgctcaacatgtactccagcatcctgctgctggccactattagtgccgaccgtttcctgctggtgttcaaacccatctggtgtcagaagttccgccggcctggcctggcctggatggcttgcggagtaacctgggtcttagcattgctcctcaccattccgtccttcgtgttccggcggatacataaggacccctactcagatagcattctatgtaatattgactatagtaagggtccgttcttcatagagaaggctatagccatcctgcggctgatggtgggtttcgtgttgcctctgctcactcttaacatctgctacaccttcctcctgatccggacctggagtcgcaaggccacgcgctccaccaagacgctcaaagtggtgatggcggtggtcacatgtttctttgtcttctggctaccctaccaggtaacaggggtgatattagcttggctgccccggtcctcatccacttttcagtcagtggagaggctgaactccttgtgcgtttccctggcctacatcaactgctgtgttaaccctatcatctacgtcatggctggccagggtttccatgggagactccgaaggtcactccccagcatcatacgaaacgtgctctctgaggactccttgggcagggacagcaagagtttcactcggtccacgatggatacctccacccagaagagtcaggcagtgtagaggagatgccacaactgcctagctgctccttttccagtcctcctccccttcctccttcctcctctcacccctcctcccttcctcccatctctttgcatgtttaattttatgtgattctctttaaattgccctgactagccttgagcccaggatgctcacggatgctgagattataggtaaaaattcctttggagagaaacattacattaagatattactgggctttttttctgaggcaggccttggcctcgttgcccatctgcagtgtctaggcagatacacctagtgatgacgtctaggggtcaggtaacagagaacccaggtctcgagggaacccggggctcacggatacactacgtgagtaagctatagccctagactccaggcaacaaataagcacccaccctttatttcttttctatgtctgatttttttgtttatttgagacaaagtccatgtaggctagtctagccatggactcctcctgtgatcatcctccagaggtcgagactgtagacctgtgctaccatgcccgacctatcctttatttctgcaattttgtcttttcaaaaatggtattcgacagaacccaacatatccaagttttgtaaaaacaactgtgcacggcttacacgataaaaaatttttgtttttttaaaaaggcaaaaaa

SEQ ID NO: 1204 - DNA, 1416 bp, Rattus norvegicus
  Genbank Accession No. AB004277
ccgggccttattggaggacgactctgatacccaacaggtggtggtcctggtgagggacaatggtgacccttcactatcctccacagcaacagtattgctggttctggaggacgaggatgcagaggaaatgcccaaatccagcgacttcctcacacaccctcccgagcggtcagacctcaccctttatcttattgtggcgctggcagctgtcagtctcttatccctagttaccttcactttcatgtcagctaagtgtctgcggaggcatgaagatagggaccggggtgggggccagtgctgcaggggccaggactcgccctccagggagttctataaacagtccagtcccaaccttcaggtcagctcagatggcactctaaagtacatggaggtgaccctgcggcccacagattctcagagccattgctacaggacgtgcttttctccagcctccgatggcagtgacttcactttcctcaggcccctcagcgttcagcagccctcagccttggcgctggagcccgaggccttgcgttcccggtctagtacgctgcgggagcggagccagcaagccccgcccaacactgactggcgtttctctcaagcccagagacccggcacgagcggatcccaaaatggggatgaaaccggcacctggcccaacaaccagttcgatacagagatgctgcaagccatgatcttggcctctgccagtgaagccgctgatgggagctccactctgggagggggcactggcactatgggtttgagcgctcgatatggaccccagtttaccctgcagcacgtgcctgactaccgccagaacgtgtacatccctggcagcaatgccacactgaccaacgcagctggcaaacgagatggcaaggctccggcaggcggcaatggcaacaacaacaagtcgggcaagaaagagaagaagtaatatggaggccaggccttgagccacagggcagcctccctccccagccagtccagcttgtccttacttgtacccaggcctcagaatttcagggctcaccccaggattctggtaggagccacagccaggccatgctccccgttgggaaacagaaacaagtgcccaagccaacaccccctctttgtaccctaggggggttgaatatgcaaagagagttctgctgggaccccctatccaatcagtgattgtacccacataggtagcagggttagtgtggatacacacacacacacacacacacacacacacacacacacaaacaccatgccacactcccctagttacagctgaactccccatcttccaacccagtcaggctcattcatctccagcctccctgtcccaacctccctttgagtaacacctctcttttgagccaggtagttgggctgttggggtgacaggttgagctaagg

SEQ ID NO: 1205 - DNA, 1679 bp, Rattus norvegicus
  Genbank Accession No. AB006607
gactgataggcgtgtcgggcgggaccagagcgcgccccactcagcgaaagctgccgtccctctttgccttgagcgccgcagccctgagaatcgcatctggcttggaaacagtcctaagactggagtctcgaagaaagccggagacagtcgcgaagaacggaggacgcccagagactcttcggcttcccggaagtggaaccgagcatacccggaaggagctaatcccacctgaagattgctgagcacccgcaggcgttaagcctaacggagtccacgtcatggcggcggatgggacaggtgtagtcggaggaggggctgtcggcggccccctgtccaaggacggtttgctggatgctaagtgcccagaaccaatccccaatcggcggcgctcttcctcgctgtcccgtgacgcgcagcgccgagcctatcagtggtgccgggagtacctgggcggagcctggcgcagagcgcggccggaggagctgagcgtttgccccgtgagcggaggcctcagcaacctgctcttccgatgctcgctaccgaaccacgtgcccagtatgggcggggagccccgggaggtgctgctacggctgtacggggctatcttgcagggtgtagactccttggtattagaaagcgtgatgttcgccattcttgcagagagatctctagggccccaactttatggagtgtttccagagggccgcttggaacagtacctcccaagccggccattgaaaactcaagagctccgggacccagtgttgtcaggagccattgcaacaaagatggcccgtttccatggtatggagatgcccttcaccaaggagccccgctggttgtttgggaccatggagcggtacctaaagcagatccaggacctgccgtccactagccttccccagatgaacctggtggagatgtacagcctcaaggatgagatgaatcacctcaggacgttgctagacgctacaccgtccccagtggtcttctgccacaatgacatccaggaaggaaacatcttactgctctcagagccagacagtgatgacaacctcatgttggttgatttcgagtacagtagttacaactacaggggctttgacattgggaatcatttctgtgagtgggtttacgattacacttacgaggagtggcctttctacaaagcaagacctgcagactaccccactagagaacagcagctccttttcatccgtcattatctggcggaggttcagaaaggtgaggtcctctccgaagaggagcagaagaaacaggaagaagatttgctgatagagatcagccggtatgccctggcctctcatttcttctggggcctatggtccaccctccaggcttccatgtccactatagagtttggctacttggaatacgcccaatctcggttccagttctacttccagcagaaggggcagctgaccagcttcctatcaccttgaggatccaacccccacctcagatttctcctggagcctccggggcaggccctcggagggaggggcaaagagcagaagcccccagagcttgggctgtgcctctaagtgagactgtcgttgaagtagctgacctccgtactcctttcttagtacttgcccaaggggggcatctgacagcccctggggctgtgcacctaaataaatgaacttcacaaatac

SEQ ID NO: 1206 - DNA, 1628 bp, Rattus norvegicus
  Genbank Accession No. AB008424
ctgtattgagtgttggccagtggtctttggtagcctgggcagcagcggggcagacatggagctgctggctgggactggcctgtggcccatggccatattcacagtcatcttcatattactggtggacctgatgcaccggcgccagcgctggacttctcgctaccctccaggccctgtgccgtggcctgtgctgggcaacctgctgcaggtggacctctgtaacatgccatacagcatgtacaagcttcaaaaccgctatggtgacgtgttcagcctacagatgggttggaagccagtggtggtgatcaatggactgaaggcagtgcaggaactgctggtgacctgtggagaggacactgctgaccgccctgaaatgcccatctttcaacatataggctatgggcacaaagctaaaggtgtggtgcttgcaccttacgggcctgagtggcgagagcagaggcgattctctgtgtccaccctgcgcaacttcggtgtgggcaagaaatccctggagcagtgggtgacagacgaggccagccacctctgtgatgccctcaccgctgaggcagggcggcccctcgatccttacaccctcctgaacaaggctgtgtgcaatgtaattgcatctctcatttatgcccgccgcttcgactatggagaccctgatttcatcaaggtgctaaaaatattgaaagaaagcatgggagagcaaactggcttgtttcctgaggttttgaacatgttcccagttctcctgcgcatcccagggttagctgacaaagtcttccctgggcaaaagacatttctcaccatggtggataacctggtgactgagcacaagaagacttgggaccctgaccagccacctcgagacctgactgatgcctttctggctgagatagagaaggccaaggggaaccctgagagtagtttcaatgatgcaaatctacgtctggtggtcaatgacctgtttggtgctgggatggtgactacttctatcactctaacctgggccctgctgctcatgatcctgcatccggatgtgcagtgccgagtacaacaggaaatcgatgaggtcatagggcaggtgcggcatccagagatggcagaccaggcccacatgccgttcaccaatgctgtcatccatgaggtgcagcgctttgcagacattgtcccaatgaatttgccacacaagacttctcgtgacattgaagtgcagggcttccttatccctaaggggacaaccctcatccccaacctgtcctcagtgctgaaggatgagactgtctgggagaagcccctccgattccaccctgaacacttcctggatgcccagggcaactttgtgaagcatgaggccttcatgccattctcagcaggccgcagagcatgcctgggggagcccctggcccgcatggagctcttcctcttcttcacctgcctcctgcaacgcttcagcttctccgtgcccactggacagccccggcccagcgactatggtgtctttgcctttctccttagcccttccccctaccagctctgtgcattcaaacgttagaaggaaagaaattctagtccagcctctaccttagtgtcatacacagattaaaacagttctgtggctgcca

SEQ ID NO: 1207 - DNA, 987 bp, Rattus norvegicus
  Genbank Accession No. AB009246
atgcaggcagcctggctcttgggggccctactggtccctcaccttttgagttttggccatggagcccgaggtcatgggaaggaatgggaaggagtctggggaggtgccctggaggaggagcgagatcgggagtcactgatgttgaagaatctccaggaggccctagggctgcccactggggtgggaaataaggataatcttgctgaaaactctgaaggcaaagaggtctgggaggccacggagactcaaggggaagaagaggaagaggaaaccaccacaacaccttcttctagccccactcctttccccagcccttctcctacatcagaggacacagtcacttacatcctgggccgcttggccagcctcgatgcaggcctacaccaattgcacatccgtctgcatgttttggacacccgtgtggttgagctgacccaggggctgcggcggctgcgggatgccgcgagtgacacccgcgactcagtgcaagctctgaaggaggtacaggtccgttctgagcaggagcacggccgcttggagggctgcctgaagggcctgcgcctaggccacaaatgcttcctgctctcgcgagacttcgagacacaggcggcggcgcaagcgcggtgtaaggcgcgaggtgggagtttagcgcagcctgcggaccgccagcaaatggatgctctaagccggtacttacgagctgctcttgccccctacaactggccagtgtggctgggagtgcacgaccggcgctcggaggggctctaccttttcgagaacggccagcgcgtgtcattcttcgcctggcaccgcgcactcagcccggagtccggcgcccagcctagtgcggcatcccatccacttagcccggatcagcccaatggcggcatcctggagaactgcgtggcccaggcctcagacgacggctcctggtgggaccatgactgtgagcggcgcctctacttcgtctgcgagttccctttctag

SEQ ID NO: 1208 - DNA, 2346 bp, Rattus norvegicus
  Genbank Accession No. AB011679
ctcgcatctctctgcagcagcctccggggctacgttccatcctatcagtctgagaccagcccagaagaaaaaaaccaaaaatccttaattatcttcttttgctcggtacctacattgggaccatcaaaaaaaaattattacagtaaaccgtagccatgagggaaatcgtgcacatccaggccggacagtgtggcaaccagatcggtgctaagttctgggaggtgataagcgatgaacacggcatcgaccccaccggcacctaccacggagacagcgacttgcagctggaccgaatctctgtgtactacaatgaagctacaggtggcaagtatgtccctcgagctatcttagtggatctagaacccgggactatggactccgttcgctcaggtccttttggccagatcttcagaccggacaactttgtttttggtcagtctggggcaggcaacaactgggctaagggtcactacacagagggagctgagctggttgactctgtcttggatgtggtgcggaaggaggcggagagctgtgactgcctgcaaggctttcagctgacccactcgctgggtggaggcacgggctctggcatgggcaccctgctcatcagcaagattcgagaagaataccccgaccgcatcatgaacaccttcagcgtggtgccctcacccaaagtgtctgacaccgtggttgagccctacaacgccaccctgtccgtccaccagttggtagagaacacagatgagacctactgcattgacaacgaggctctctacgacatctgcttccgtacccttaagctcaccacgccaacctacggagacctgaaccatctcgtctctgccaccatgagcggtgtcaccacctgcctccgtttcccgggccagctgaacgccgaccttcggaagctggctgtcaacatggtgcccttcccgcgtctccacttcttcatgcctggctttgcccctctcaccagccgtggaagccagcagtaccgggccctcactgtgcctgaactcacccagcaggtcttcgacgccaagaacatgatggccgcctgtgacccacgccacggccggtacctcacggttgcggctgtcttccgtggacggatgtccatgaaggaggtagatgagcaaatgctcaacgtgcagaataagaatagcagctacttcgtggaatggatccccaacaacgtcaagacggctgtctgtgacatcccaccgcgaggcctcaagatggcagtcaccttcatcggaaacagcacggccatccaggagctcttcaagcgcatctctgagcagtttacggcaatgttccgtcggaaggctttcctccactggtacacgggtgagggcatggacgagatggagttcaccgaagctgagagcaacatgaatgacctcgtctctgagtatcagcagtaccaggacgccaccgcagaagaggaagaggatttcggagaggaggcagaagaagaggcctaaggcggaagccctgcgtcacctcaggctgcttagttcccttagcttttttccaactgccctttgtttctttctgctgcctctgtcctgtttttgttccgttttgttttctcattggggggtaaacggtgcctggcacgtggcaggcgctcaataaatatttctttgtggaatgtctcctttctctttccgatctgacattctgagcgttaaccctgtgcttcctcctggtacccatttctttattatgactgtccagttaatattcttccaatatattctccaggaaccagcgttcggctccagacccggggtagaacccagcccagttctaagaactcaagagagtagccaccatcttaaagcaaagtagcgggtggggaaaaggtgggtagaggagatgctacttagggggtgggattttccagtcagggccatttagacacgggaatcgctggggctttcagtcgatggggctttcttttttccctgcttcatctctcggcctcaggagaggtattaacagtattatcaccatttatatcctagctgtcctgagccaaatctgccattggaggtgtcttcccctgtgttggttctccaagggacgttgtatggggatttgtgggggcagggcagcaaggccttgttctctaaatgtccagaaacactctaattaccatttccacctgggtgcctcacacactccccagaggggaggtaacatctctgccccatttccatcctgttccttggcttggtcattccctacctttctattttctgttaaacttggctttttttttttcatattgaaaagatgacattgccccgagagccaaaaataaatgggaattgg

SEQ ID NO: 1209 - DNA, 814 bp, Rattus norvegicus
  Genbank Accession No. AB012230
atgaactctggcgtgaacctgcagaggtcgctgtcttctccaccgagcagcaaaagacccaaaactatatccatagatgaaaatatggagccaagtcctacaggagacttttacccctctccaaattcaccagctgctggaagtcgaacatggcatgagcgagatcaagatatgtcttctccaactacaatgaagaagcctgagaagccactgtttagctctacatctccacaggattcttccccaagattgagcacttttccccagcaccaccatcccggaatacctggagtcgcgcacagtgtcatctcaactcgaactccacctccaccctcaccgttgccatttccaacgcaagctatccttcctccagcaccatcaagttacttttctcatccaacaatcagatatcctcctcacctgaatcctcaggatactctgaagaactatgtaccttcttatgacccgtccagtcctcaaacgagccagcctaacagcagtggtcaagtagtagggaaagtgcctggccatttcacgcctgtcttggcaccctctccccatcccagtgcagtgcgacctgtgaccctgaccatgacagatactaaacccatcactacatccactgaagcctacacagcctcaggcacatctcaagccaatcgatatgtgggactaagcccaagagacccatccttcctgcatcagcaacagctgaggatttgtgactggaccatgaatcaaaacggcaggcatttataccccagtaccagtgaggatacattgggaattacttggcaaagtcctggtacctggg

SEQ ID NO: 1210 - DNA, 1624 bp, Rattus norvegicus
  Genbank Accession No. AB012231
gaagtccaagccacaatgatcctgccaagaatcctccagggtacctagaggacagttttgtaaaatccggagtcttcaacgtatcagagcttgtgagagtatccagaacacccataacccaggggactggagtcaacttcccaatcggagaaatccccagccaaccatactatcatgacatgaactctggcgtgaacctgcagaggtcgctgtcttctccaccgagcagcaaaagacccaaaactatatccatagatgaaaatatggagccaagtcctacaggagacttttacccctctccaaattcaccagctgctggaagtcgaacatggcatgagcgagatcaagatatgtcttctccaactacaatgaagaagcctgagaagccactgtttagctctacatctccacaggattcttccccaagattgagcacttttccccagcaccaccatcccggaatacctggagtcgcgcacagtgtcatctcaactcgaactccacctccaccctcaccgttgccatttccaacgcaagctatccttcctccagcaccatcaagttacttttctcatccaacaatcagatatcctcctcacctgaatcctcaggatactctgaagaactatgtaccttcttatgacccgtccagtcctcaaacgagccagcctaacagcagtggtcaagtagtagggaaagtgcctggccatttcacgcctgtcttggcaccctctccccatcccagtgcagtgcgacctgtgaccctgaccatgacagatactaaacccatcactacatccactgaagcctacacagcctcaggcacatctcaagccaatcgatatgtgggactaagcccaagagacccatccttcctgcatcagcaacagtcctggtacctgggctagcttggttccttttcaagtgtcaaataggacacccatcttaccggcaaatgtccaaaattatggtttgaacataattggagaacctttccttcaagcggagacaagcaactgaggggaaagaaacacaaccatagtgtaagaaaattaggggaaaaacacccaacaaaagaaaagaggaagactggacaacagggagaaaggagagaaactgaagaaagaagacgctagaccagcattgcagcacttccggtcactaattcccttaaggttgagactgtagtgacaggaaagggtcaatgacatctcaccgatgctagactgcagcccctgcaccgtagcctttgttccatgaagtccgctgggaaatagatgttctgtctctatgacaatatattttaactgactttctagatgccttaatatttgcatgataagctagttttcttggttagtattcttgttgtttacgcatggagtcactattcctggttatctcaacaacgaaggctaggaggcggcgtcagaggggctggggacagagccatgagccagccattttataagcactctgatttctaaaagttaaaaaaaattatatatatatatatataaaaatctctgtagcctttagttatccgtacagatttattaaattttggcccttaacccagccttttccagtgtgtaacccagtttgaaaatcttaaaaaaaaaaa

SEQ ID NO: 1211 - DNA, 616 bp, Rattus norvegicus
  Genbank Accession No. AB012234
ggtccatcacctcccctccttccaccagcaccaccaagcgccccaagtccatcgacgacagtgagatggagagtccagtcgatgatgtattctatcctgggacaggccgctccccagcagctggcagcagccagtctagcggatggcccaacgacgtggatgcaggccctgcttctctaaagaagtcaggaaagctggacttctgcagcgccctctcctctcagggcagctccccacgcatggctttcacccaccacccgctgcctgtgcttgctggagtcagaccagggagcccccgggccacagcatcagcactgcacttcccttccacctccatcattcagcagtcgagcccgtacttcacacacccaaccatccgctaccaccaccaccatgggcaggactcgctgaaggagttcgtacagtttgtgtgctctgacggctcgggtcaggccaccgggcagcattcacaacgacaggcgcctcctctgccaaccggtttgtcagcatcggatcccgggacagcaactttctgaacatcccacagcagtctcagtcctggttcctctgattaagatcaacaaagaaacaacaaaattttaaaaaaaaaaaaaaa

SEQ ID NO: 1212 - DNA, 1903 bp, Rattus norvegicus
  Genbank Accession No. AB017544
gtcaggcctgaggaagatggcgtcctcggagcaggcagagcagccgaaccagcccagctcttctccaggaagtgaaaatgtggtgcctcgagagcctctgattgccacagcagtgaagttcctacagaactctcgggtccggcagagcccacttgcgaccaggagagcatttcttaagaagaaagggctgacagatgaagagattgacctggctttccagcagtcgggcactgcttccgacgagccttcacccgtgggcccagctaccccggtggttcctgtccagccccctcacctcatttcacagccatacagccccggaggttcccgatggcgagattacggtgccttggccatcatcctggcaggaattgcatttggcttccaccagctctacaagaagtacctgctgcccctcatcctgggaggccgagaggaccggaagcagctggagaggatggcggcgagtctctcggaactgagtggcagtgtggcccagacagtgactcaggtacagacaacactggcctctgtccaggagctactgagacagcagcagcagaaggtccaggagctagcccatgagctggccgctgccaaggctaccacatcaaccaactggatcctggagtcccagaatatcaatgagctcaagtcagaaatcaactctctgaaaggacttcttctgaatcggagacagttccctccctccccgtcagccccgaagatcccctcctggcagatcccagtgaagtctccgtcaccctccagccccgcggccgtgaaccaccacagcagcagtgacatctcccctgtcagcaatgagtctccgtcctcctctccagggaaggacggccacagccctgagggctccacagccacataccgcctgctggggcctcaggaagagggggaaggggtgatggacgtcaagggccaggtgaggatggaggtgcaaggggaggaggagaagagggaggacgaggagggcgaggaggatgaggatgatgacgtgagccacgtggatgaagaggacgtcctcggggtacagagggaggacagacggggcggcgatgggcagatcaatgagcaggtagagaagctgcggcggccagagggcgccagcaatgagagtgagcgagactagggctggcgcttggttgcccgccttcccagtgccccagggcctcagaggcgggtgggcaagagttgtggctctgcttccatgaggggggccggaaacccaggtaggggtggggccgtccttccgtgcagtgtgggctgcgtttcttttcaccagcctcccagacaggttcccagccccagccacgggcccaggccgagaactcgggagctctgcactccagccccctccttgacgggtgtcttgtctaggtgtgtcctctgagtaccttgaccacctgacaccatgcatggccagagctcatgtcatttcctgcctctgtcacctcagtgcaggggaactatggcccccctcggtcttgctgtctcccccactgtgccctggcctggcttgtggcttcttctttgcctgttccaatagccagggtgccagccccgctcttcatctctggggctgccagccttcccacagccaggtcctggctgacagatgccgcccttgggcgcctgtccccagcccacctgcccgttgttttttataccacacgagacgtcctcgcttgctgtgtcgtggtttagctactcagtggtgaggcgtgcttctccctcctgcggtggaggaggcagcagggccttcctgaccaacagccatgtctgtccttcccactgagaaacacatgttcatttacgtgatcatgtatagatttcagactataagataagactgtacataatgtaataaatacgagttgccatattt

SEQ ID NO: 1213 - DNA, 2279 bp, Rattus norvegicus
  Genbank Accession No. AB019693
ctggttcggcccacctctgaaggttccagaatcgatagtgaattcgtggcttattatttgttctgaggaagctctctgtgtggatacagatttataggtattagaagagatgttctatatacagagttctgaggcactgcagattctgaagaattccctaaggaagcacctccctgagtccttaaaggtttatgggactgtcttccacatgaaccagggaaacccattcaagctcaaggctgtggtggacaagtggcctgattttaatactgttgttattcgaccacaggaacaggacatgacagatgaccttgaccactacaacaacacttacctaatttattccaaggatcccaagcactgtcaggaattccttggctcatcagacgtcattaactggaaacaacatttgcagatccaaagttcacagtcagacctgggcaaagtgatagaaaaccttggagccactaacttgggcaaggtcaagcataagcagtgctttctctatatggtatctcatacagcaaagaaactgactccttccttggtggatgcaaagcacttagtagtcagcagtgagaaacccacaccttttgaccatcagttattcaaatttgcccgcctggatgttaagcatgctgcattggtgaatagcatctggtattttggtggcaatgagaaaagccagaagttcattgaacgctgtatctttacctttcccagcgtctgtattatgggccctgaggggacccctgtgtcctgggccctgatggatcacactggagaactaagaatggcaggcaccttgcctaagtaccggcaccagaacctcatttaccatgttgcttttcaccaggtccatacactagagaagctgggctttcccatgtatttacatgtggataaggttaacctcaccattcagagaatgtctgctgtgctggggcatgtccccatgccctgtacctggaaccagtggaactgggtacctctctaaagccagaaaagagtgagagggggactgcacttgtagatggagaaatggctgagtgaacagagagaagtgaactgtcattagggtggtgtgtgtttctagagagcagggttgcatcacactgagctgcacacagtttcttcgccctcacattgctcatgctcttaattccatttctcagcatacagaaggccaccatgtcctgctcccacattctcaggattcctgtaacacatttggctaaattgtactctctcctattcattttgcaggctcattgatccatggctattagtcagtaggtttgttttgtgacctgaccccccacaaccctgcacacaggcatacttcctctggctttctgtagctttgcttttatgggttggagaagtttgttctcatgtcactcaccagacattaaattgttaatatgtaaaaactactatacatgcaaacacagatacacagtatgtgtggtacaactgtaagaattgttagaaaagagactagagctcagcaagtaaatgtgcctgcagtcaagcctggtaacctgaatttgattcctgggaaccacattgtaaaaggagagaatctattccatcgacttgtcctctaacctccccaggtatggggcgcatgtgcacacacaaataagtaaatgtaatctttaaacagttaaaaagactaactggtgatctttgagactagatttgtattttttttttcaatgaacattcactattacttcccgtgccaggaaggaacacttagcattgttctaaaggctgagcttcattacttcagtctaacgtttatatgtcataaattctttatttatggaagcttaagctctagaaagcaaagaactgtgtggagaagagaaaataacaacattaaaaacaggaaaaacggatgtctgttatgtaggagaaaggaagaagttgggatgaggaaggaggatgggaagcagaactggggtgctgaagggagaggaaaggagggtagtagagaggaggagagaagagggaaggggggggaatgggaaaagaggggaggggagagtgatatcttaggttatagagagatcagctcttctgtagagaggataaataatgtggtcgcattcatagctgagttgagcagaaagtgatcagattaaaagagaatgaaggggggctggggatttagctcagtggtagagcgcttacctaggaagcgcaaggccctgggttcggtccccagctccgaaaaaaaagaaaaaaaaaaaaaaaaaaaaaaaaaaaaa

SEQ ID NO: 1214 - DNA, 1910 bp, Rattus norvegicus
  Genbank Accession No. AB022209
accctgtcaagtgtccatgatgctgggccctgagggaggtgaaggctatgtggtcaaactccgtggcctaccctggtcctgctcaattgaggacgtacaaaacttcctctccgactgcacaattcatgatggggtcgcaggtgttcatttcatttatactagagaaggcaggcagagtggtgaggcttttgttgaacttgagtcagaagatgatgtaaaattggctctgaaaaaagacagggaaagcatgggacaccggtatattgaggtgttcaagtcacacagaaccgagatggattgggtgttgaagcacagtggtccaaacagcgccgacagtgccaatgatggctttgtgaggcttcggggactcccgtttggatgcacaaaggaagaaatcgttcagttcttctcagggttggaaattgtgccaaacgggatcacactacctgtggacccggaaggcaagattacaggggaggccttcgttcagtttgcctcacaagagttagccgagaaagctttagggaagcacaaggagagaatagggcacaggtatattgaagtgttcaagagcagtcaggaggaagttaggtcatactcagatccacctctgaagtttatgtctgtgcagaggcctgggccttatgacaggcctggcacagcccggaggtacattggcattgtgaaacaggcaggcctggataggatgaggtctggtgcctatagtgcaggctatgggggctatgaagaatacagtggcctcagtgatggctatggcttcaccactgacctgtttgggagagacctcagctattgtctctcaggaatgtatgatcacagatacggagacagcgagttcacagtgcagagcaccaccggccactgcgtccacatgagagggctgccctacaaagcaacggagaacgacatttacaacttcttctctccactcaaccctgtgagagttcatattgagattggtcctgatggaagagtgaccggagaagctgatgttgagtttgctactcatgaagaagcagtggcagctatgtccaaggacagggccaacatgcagcacagatacatagaactcttcctgaattcaacaacaggagctagcaatggggcttatagcagccaggtgatgcagggcatgggtgtgtcagctgcccaggcaacttacagtggcctggagagccagtcagtgagtggctgttacggggccggctacagcggtcagaacagcatgggtggatatgattagtattgtaggaacatttgggttatttcaatcagaaaatttcacaggcagccaataaacagtcaagagcagtttataactctagaggaagctgggggacccactttgcaccatgagtttgtgaaatctggattaaaaaattacctcttcagtgtttctcatgcaaacttttcttctagcatgtaatattgagtaaactaaaaactattttcttccgcttttctcaattaacatttttggtagtatacttaagagtgatgttatctgagttaagtagtttaagtatgttgagtggatctttcagcacaccacagtgaacacactgggggcatgtacttttctggagaactcaaggtgctagatccctgatgcaaagagaagcatttctcatgttcattctagtttatattttcatttaaaatctttaggttaagtttaagctttttaaaagttagttttgagaattgagacacaatactaatactgtaggaattggtgaggccttgacttaaagctttctttgtactgtgatttccttttgggtgtattttgctaagtgaaacttgttaaattttttgttaactaaatttttttcttaaaataaagactttttcgcggccgcgaattcctgcagcccgggggatccact

SEQ ID NO: 1215 - DNA, 5350 bp, Rattus norvegicus
  Genbank Accession No. AF000114
  misc_feature (1)..(5350): n = a or c or g or t
gggtaggagaaagggaagggtgggtaaggacggaaaaagcagcatcggtcagccgcgaaccccaggagaaaasstgggggcctgagccagaaccggagccctagcggcacaagscagacacccagggttggtcanctccgcatgatgagtctccggcttttcagcattctgctcgccgctgtggtctctggagcccagggctggggctactatggctgcaatgaggagctggtggggcctctgtatgcacggtctctgggtgcttcctcctactatggactctttaccacagcccgctttgcccggctacacggcatcagtggatggtcgccccggattggggacccgaatccctggctccagatagacttaatgaagaagcatcgaatccgggctgtggccacacagggagcctttaattcttgggattgggtcacacgttacatgctgctctacggggaccgtgtggacagctggacaccattctaccaacaagggcacaacgcgaccttcttcggtaatgtcaacgactcggcggtggtacgccatgacctgcactaccattttacggctcgctacatccgcatcgtgccactggcctggaacccccgcggcaagattggcttgaggctgggcatctacggttgtccctacacgtccaacatcctgtattttgacggcgatgatgccatttcataccgcttccagcgaggggccagtcaaagtctttgggacgtgttcgcttttagtttcaagacagaggagaaggacgggctgctgttgcacaccgaaggctcccagggggattatgtgacgcttgaactgcaaggagcacacctgctgctgcacatgagcctgggcagcagccccatccagccgagacctggtcacaccacggtgagcgctggtggcgtacttaatgacctaagctggcattatgtgcgggtggaccgatacggccgagaagcaaatctcaccctggatggttacgtacatcgctttgtgctcaacggcgactttgaaaggctgaatctcgaaaatgagatattcatcggaggtctagtgggcgcagcgcgtaagaacctggcctaccgccataacttccgtggctgtatagaaaacgtgatctacaaccggatcaacatagctgaaatggcagtgcagcgccattcgcggatcaccttcgagggtaatgtggctttccggtgcttggatcccgttccacaccccatcaacttcggaggccctcacaacttcgtccaagtgcctggctttccacgtcgaggccgccttgctgtctccttccgcttccgcacctgggacctcacagggctgctccttttctcccgcttgggggatgggctgggtcatgtggagctgatgcttagtgaagggcaagtcaatgtatccatcgcgcagactggccgcaagaagcttcagtttgctgcggggtaccgcctgaatgatggcttctggcatgaggtgaactttgtggcacaggaaaaccatgcggtcatcagtattgatgatgtggagggggcagaggtcagggtatcatacccactgctgatccgcacagggacttcatacttctttggtggttgtcccaaaccagccagtcgatggggctgccactccaaccagacagcattccatggctgcatggagctgctcaaggtggatggtcaactggtcaacctcactctggtagagtttcggaagcttggttactttgctgaggtcctctttgacacatgtggcatcacagacagatgcagccctaatatgtgtgagcatgatgggcgctgctaccagtcttgggatgacttcatctgctactgcgaactcaccggctacaagggagttacctgccatgaaccattgtataaggagtcctgtgaagcctatcgcctcagcgggaaatattctggaaattacaccattgatcctgatggcagtggacccctgaaaccatttgtagtgtattgtgatatccgagagaaccgagcatggacagttgtgcgacatgacaggctatggaccactcgagtgacaggttccagcatggaccggccctttctgggggccatccaatactggaatgcctcctgggaggaagtcagtgctctggccaatgcttcccagcactgtgagcagtggatcgagttctcctgctacaattcccggctgctcaacactgcaggaggctacccctacagcttttggattggccgaaatgaagaacagcatttctactggggaggctcccagcctgggatccaacgctgtgcctgtgggctggaccagagctgtatagaccctgcactgcactgcaactgcgatgctgaccagccacagtggagaacagacaaggggctcctgacctttgtggaccatctgcctgtcactcaggtagtgataggtgacacaaaccgctccagctctgaagctcagttcttcctgaggcctctgcgctgttatggtgaccgcaattcctggaacactatctccttccgcactggagctgcactgcgtttccctccaatccgtgccaaccacagccttgatgtctccttctacttcaggacctcggctccctcaggagtcttcctagagaacatggggggtcctttctgccagtggcgccgaccttacgtgagagtggagctcaacacatcccgggatgtggtctttgcctttgatattggcaatggggatgagaacctgacagtgcactcagatgacttcgagttcaatgatgacgagtggcatttggtccgggctgaaatcaacgtgaagcaggcccggctgcgagtggaccatcggccctgggtgctaaggcccatgcccctgcagacgtacatctggctggagtatgaccaacccctctatgtgggatctgcagagcttaagaggcgcccatttgtggggtgcttgagggccatgcgtttgaatggagtgactctgaacttggagggtcgtgccaatgcctccgagggcaccttccccaactgcacgggccactgcacccacccccggttcccctgtttccacggaggacgctgtgtggagcgatacagctactacacgtgtgactgtgacctcacagcttttgatggaccatattgtaatcacgatattggtggattctttgagactggcacatggatgcgctataacctccagtcagcactgcgttctgcggcccaggagttctctcacatgctgagccggccggtaccgggctatgagcctggctatatcccaggctacgacactcctggttacgtgcctgggtaccatggtcctgggtaccgcctacccgactacccaaggcctggccggccagtgcccggataccggggncccgtgtacaatgttactggagaggaggtctcctttagcttcagcaccagctctgctcctgcagtcctgctctacgtcagctcctttgtgcgtgactacatggccgtgctcatcaaggaagatgggaccctacagcttcgctatcagctgggcaccagtccctatgtgtaccagctaaccacccggccagtgaccgatggccaaccccatagtgtcaacatcacccgggtctaccgaaacctctttatccaggtggactacttcccgctgacagaacagaagttctctctcctggtggacagccagctggactcccccaaggccttgtatctagggcgtgtgatggagacaggagtcattgacccagagattcagcggtacaacaccccaggtttctcaggctgcctgtctggtgtccggttcaacaatgtggctcctctcaagacccatttccgaacccctcgccccatgactgctgagctggcggaggccatgcgggttcaaggagaactgtcggagtctaactgtggcgctatgccacgccttgtctccgaggtgccaccagagcttgatccctggtacctgcccccagatttcccatactaccatgacgacggatggattgccatactcttaggttttttggtggccttcctgctgctggggcttgtgggaatgctggtgctgttctatctgcaaaatcatcgatacaagggctcctatcacaccaacgagcccaaggccacccatgattcccaccctggcggcaaagctcccctacctccctcaggccctgcccaggcccctgcccccactccagctcccacccaggttccgaccccagccccagccccagcctctggcccaggccccagggaccagaacctcccccagatcttggaggagtccaggtctgaatgagtcacaagggcttcagggaccaaggccaactcctctaagtyccttmagctcctgcctctcctctcccctgtcagggacatttggctcttcttagcaggctctgttcaccaggaggatcccctcttgccaagtttggtgtgcagagctacagatgggaccaaagggagtggccgagtctcactgcctaaaccaatgccctgcccccaccccccaccccagctcctggctgtttgcctgccctacgggagaaagctcatggagctgaggcgggcctttcctgccatctctgtcccagctgctggcaaggattaacaaccaagggcaggggagatgaactgcctcccttcctgtgggtattatcagcagggacagatgtgggggatcgaggggctgcacagggcaggcagggagggagggaggaggctgctaaaacacaccctggagcctcccccctgccctrctgaccggctgtcttccatctrcttcctctcagctggggttgagggaagaacttcatccccaccccccacctcacccaaccctttttgttcttacagagaccaagaggcctcagcttagtcactttagtacctccactgcttcacatgctttagccaaagccataaaaagcctgcaagtagaagaaataatgcagaccctgcccagccagtcctctgctcctccacccctttccaaaatacgcaatagcctgggtgcctgtgtgcaggcctggcccccctccgtgcatgaggagccccccctcccccgctcagagatgctgcgtgttcgtccaggaggtcatattctttatatatattttttgttgcaaagcctctctctagagaactatatattactctaattttttaattatctgtttatatataaaagaactcagtgggccgtcctgtgctgtgcccagtttgtagtgagctccttctgtgttggatgtctcatgagtcctgccagccactcacccgcctgccgggcctccattctagagcagggcagagcccgctgtgccctcacctgagcaggttcaataaaagcagmgtggcagaaa

SEQ ID NO: 1216 - DNA, 2847 bp, Rattus norvegicus
  Genbank Accession No. AF000578
ggtcgctcttggaggaagtggcctctttgcgtcccgtgaccgaagcgccgttactactttctcgaagctccactcggccgcttgccggacactccgccgccaagatgccccggattatgatcaaagggggcgtgtggaggaatacggaggatgaaattcttaaagcagcggtaatgaaatatgggaaaaaccagtggtctaggattgcctcattgctgcataggaaatcggcaaagcagtgcaaagccagatggtacgaatggctggacccaagtattaagaaaactgaatggtccagagaagaggaagaaaagctcttgcacttggccaagctgatgccaacgcagtggaggaccattgctccaatcataggaaggacagcagcccagtgcttggagcactatgaattcctcctggacaaaactgcccaaagggacaatgaagaggaaacaacagatgacccccgaaaacttaagcctggagagatagatccaaatccagaaaccaaaccagcccggcctgatccaattgacatggatgaggatgaacttgagatgctttctgaggctcgagcccgtttggccaatactcaaggaaagaaggctaagaggaaagcaagagaaaagcagttggaagaagcaaggcgccttgctgccctccagaaaagacgggaacttcgagcagctggcatagagattcagaagaaaaggaaaaagaagagaggagttgattataatgctgaaatcccatttgaaaaaaagcctgctcttggtttttatgatacttctgaggagaattaccaggcccttgatgctgatttcaggaaattacgacagcaggatcttgacggggagctaagatctgaaaaagaaggaagagatagaaaaaaagacaaacagcatttaaaaaggaaaaaagaatctgatttaccatctgctatccttcaaactagtggtgtctctgagtttactaaaaagagaagcaaacttgtgctgcctgcccctcagatttcagatgctgaactccaggaagttgtcaaggtaggccaggccagtgaagttgcacggcagactgcggaggagtctgggatcacaaactctgcttctagcactctcctgtctgagtacaatgtcacaaacaacagcattgctctgagaacaccacggactccagcctcccaagacaggattctacaggaagctcagaacctcatggccttgaccaatgtggacactccactgaaaggtgggcttaacaccccactgcacgagagtgacttctctggtgtgacgccacagcggcaggttgtgcagactccaaatacggttctgtctacccctttcaggactccttctaatggagctgaagggctgactccccggagtggaacaaccccgaaaccagtcactaacgccaccccaggtagaacaccacttagagacaaattaaacattaatccagaggatggaatggcagactacagtgacccctcttacgtgaagcagatggaaagagaatctcgtgaacatctccgtctagggttgttaggcctccctgcaccgaagaatgattttgaaattgttctgccagaaaatgcggagaaggaactggaagaacgtgaaatggatgacacgtacatcgaggatgctgctgatgtggatgctcgaaagcaggccatacgagatgctgagcgtgtaaaggaaatgaaacgaatgcacaaagctgttcagaaggatctacccagaccgtctgaagtaaatgaaactattttaagacctttaaatgtagaaccacctctaacagatttgcagaaaagtgaggaactgatcaaaaaagagatgattacgatgcttcattatgacctgctgcatcacccctacgagccgtctgggaataagaaagggaaaaacgtcgggtttgctaccaacaattcagagcacattacctatcttgagcatagcccttatgagaagttctccaaagaggatctaaaaaaggcccaggatgttctggtgcaagagatggaagtggtaaaacaaggaatgagccacggagaactctccagtgaagcttacaaccaggtgtgggaggaatgctacagtcaagtcctctatcttcctgctcagagccgctacacacgggctaatcttgctagcaaaaaggacagaattgaatcacttgaaaagagacttgagataaacaggggtcacatgacaacagaagccaagagagctgcaaagatggaaaaaaagatgaagattttgctgggtggttaccagtcccgcgccatggggctcctgaagcagctgaacgacctgtgggaccaaatcgagcaggcgcacctggagctgcgcacctttgaggaactcaagaaacacgaagactctgctattccccgtaggctagagtgtctaaaggaagatgtgcagcggcaacaggaaagagagaaagagcttcagcaaagatatgcggatttgctgatggagaaagagactttacaggcaaagttctgaagcacagaggacgctctgcctcagaagaactagttgctggtttcgtactcagcaaggccgagactgacctttctcctcattgacaaagtcacccagcacctgtgggctctcggttgcttgttttgaatgatactgatcttgcgtgttctgtgttacaaacttggactccaggataataagggtttaaattatccagatgctcattctttgccagtgtcatatttacaaaatttcgtagtttaggcctttaatttaaaaagcctgattttaaatactgcctgcaagtaaacccttgaataaaaagaacatgtgaagaaaaaaaaaaaaaaaaaaa

SEQ ID NO: 1217 - DNA, 1182 bp, Rattus norvegicus
  Genbank Accession No. AF003835
ggaagcttccccaccgcaaagcagctagacgtgcgggcagtctcagctgtccactgggagtcgccaacaccatctcttgggctccagggtcgcaatcactaccggggatctccagcaagtcttccggacccacgcgtagaggaggtggtgccaccgcgcgcaaacctggcgcggtcgtgacgtcaggactacgctagattggcaattggctggaggcatgtggcgcggacgggcactggcaggagtgattggatcagctcttaaggggcggggtctggaggcggagcatgctgccgagagcgttgaagtacggcgctccgcacagcttctcgacactcctgtctggaatcgctgtgttctaggtcagatcagacattctgtcacaatgcctgaaatcaatgccagcaatcttgatgaaaaacaggttcagcttctagcagagatgtgtattcttattgatgaaaatgacaataaaattggggctgacaccaagaaaaattgtcacctgaatgaaaacattgacaaaggactaatacatcgagctttcagtgtcttcttgtttaatactgaaaacaagctcctgttacagcagagatcggatgctaaaattacctttccaggttgtttcaccaatagttgctgtagtcatccattaaataaccccggggagctggaagaaaatgatgccatgggtgtcaaacgagcagcacagaagcgcttaaaggcggagctggggatacccttggaagaggttgatctaaatgaaatgaattatctaacaagaatttactacaaggcccaatctgatggtatctggggtgaacatgaaattgattacattttgtttctgaggaagaatgtaaccctgaatccggatcccaacgagattaaaagctattgctatgtatcaaaggaagaactcaaagaaattttgaagaaggaagccaggggcgaaattaagtttactccatggtttaagattattgcagacgcttttctctttaaatggtgggataacttaaaccatttgagtccttttgttgaccatgagaaaatacatagaatgtgaatgtgtaaatgatttgagatttttttctacctactaagaatggtttgattttgttttaaattgggctcccttgtatgacacatagatattttacaaccagaatttgttttgag

SEQ ID NO: 1218 - DNA, 636 bp, Rattus norvegicus
  Genbank Accession No. AF004661
taccatgttctgtgcctcaccctgacggaggtttcagcccataccgtggagctaaatgaaatgtttggccagatccagtcccctggctatccggattcctatccgagtgactcggaggtgacctggaatattactgtcccggaggggttccgggtccagctttacttcatgcacttcaacttggaatcctcctacctttgtgaatatgactatgtgaaggtagaaaccgaagaccaggtgctggcaaccttctgtggcagggagaccaccgataccgagcagaccccgggccaggaagtggttctttcgcctggttcctttatgtctgtcactttccggtcagatttctccaatgaggaacgattcacaggttttgacgcccactacatggctgtagatgtggatgagtgcaaggaaagggaagatgaggagctgtcctgtgaccactactgccacaactacatcggcggctactactgctcctgtcgctttggctacatcctccacacagacaacaggacctgccgagtggaatgcagtggcaatctctttacccagaggacaggcacaatcaccagcccggattaccccaacccttaccccaagagctctgaatgttcctataccattgacctg

SEQ ID NO: 1219 - DNA, 4409 bp, Rattus norvegicus
  Genbank Accession No. AF008439
ccacgcgtccgatggggaagaagcagccgagggcagcagcaagtgctgctccaaactgtgagctaaaatcctattctaagagcacagatcctcaggtatctaccatggtgttggatcctgaagaaaagattccagacgatggtgcttctggggaccatggagactcggccagcctcggtgccatcaaccctgcttacagcaactcttccctcccacattccaccggggattctgaggagcccttcaccacctactttgatgagaaaatccccattcctgaggaggagtactcttgttttagtttccgtaaactctgggccttcacaggacctggttttcttatgagcattgcctacctggatccaggaaacattgaatctgatttacagtctggagcagtggctggatttaagttgctctgggtgctcctgctggccactattgtggggctgctgctccagcgtctcgcagctcgactgggagtggtcaccggcttgcaccttgctgaagtgtgtcaccgtcagtatcccaaggtcccacggatcatcctgtggctaatggtggagttggcaatcattggttctgatatgcaggaagtcattggctcagccatcgccatcaatctcctgtctgccggaagggttcccctgtatggtggagtcctcatcaccatcgcagatacttttgtatttctctttttggacaaatatggcttgcggaagctggaagcattttttggctttctcatcactatcatggccctcacatttggatatgagtatgttacagtgaaacccagccaaagccaagtactcaggggcatgttcgtgccatcctgttcaggctgccacacccctcaggtggagcaggcggtgggcatcgtgggagctgtgatcatgccacacaacatgtacctgcactctgccttagtcaagtctagacaagtgaaccgggccaataagcaggaagttcgagaagccaataagtacttcttcatcgagtcctgcattgcactctttgtttccttcatcatcaatgtctttgtcgtctccgtctttgctgaagcattttttgagaaaaccaatgagcaggtggttgaggtctgcagaaatagcagcagcccccatgctgacctctttcctaacgacaactctaccctggctgtggacatctacaaagggggtgttgtgcttggatgttacttcgggcctgcggccctctacatctgggcggtggggatcctggctgctggacagagctccaccatgactggaacctattctggccagtttgtcatggagggattcctgaacctaaaatggtcgcgctttgcccgcgtgatcctgaccaggtctattgccatcatccctaccctgcttgttgctgtcttccaagatgtggagcatctgacagggatgaatgatttcctgaatgttctgcagagcctacagctcccctttgccctcatccctatcctcaccttcacaagcctgcggccagtgatgagtgagttctccaacggaataggctggaggatcgcaggcggcatcttggtccttctcgtctgctccatcaacatgtactttgtcgtggtctacgtccaggagctagggcatgtggcactgtatgtggtggctgcagtggttagcgtggcttatctgggctttgtgttctacttgggttggcagtgtttgattgcgttgggcctgtcgttcctggactgtgggcgctcggtaagcatctctaaagtcctgctgagcgaagataccagcggtggcaatactaagtaaacactgggtcagcctgtctgtctgtctttgcagggagccatcagagccagtgtgtttctatggtttactgtgtgaacatagccacaagtatgtgccgttgcacagactgcatttagggaccaactgttagttgggaaacactggggtgggtgtgtggtgtgtgtgtgtgtgttgtttccttctgtctttgtcaaatagcatgctgctattaaatgcttggtggcctaaaactctgtgtagcctaggctgccttcaaacttacagcaatcctcctggctcagcctcctgggtgctgggattccaggcatgtctaccgctcctggctgtcacgagtgcttacaagatgactggttttgtcaggggaggtcttaccctgtagcattaggcagcaccttgaaaaggtgagccttgagctgttttgaacactaaattcctaaatagctgtccaaggccatggctcggttttagttctgagaaacccaaccagactgttgtcatcatttgaattgcagaattagagaccgctatttttgagttcaggatttctgtttgtttggtgcatttcattttgtttttcaagacaagggtttcttccttgttgtcctggaacttactctgtagaccagcctggctttgaactcacagagatcctcctgcctctgcctctgcttcccgactgctaggattagaggcatacaccaccactgccctgctaagctcagagttttttatttctactttggaattcctcagtggaaagaaaggtagagcaggagagggggtgtggtcaagtgatggctcccctccaggtccttgcaggtttaccttaaggagtggagcttagcagggcttcatctgtagtcctgaggctagtgacttccctgttaatagcaagcatcccgatagtgtttcatctcgagtacacacagtcctggaatctccgccttcctctcctgagagagtgcggatggcaaaagactactgtagcacttgtgaactggctcacagcaaatcccagagctgaccgcactactcccgaaagtacccttcaccaaatcttggctctgacccaccgctgtttcatgcccaagataactcagaaggcaacctcaggagctctggacccaaaccttgcaaagtcagtagttgtcactgtgatgcaaagtcctctccctgcaaggtgggactaggctgcctcctcacagcccttccctcggagagaaagcctcttgagaccaggctgcggagctctggagattcagcacgggactacagaactgctgctctcagttcagccacttctgtcctggcacgtgggagacatgattctgtcacatcaagtcctgtctgtttgctggaaaggaataatacaagtttgtataatcattgccttggtggcaacaggagctacagtgacttcgaaggatgtcgtcctctttgccgctttcccagttcgactgtcccgacaaatgacctgcattgtggtgccactgtggcattagtgctagcatttcacacagtcagaagctcagcctgcatagagtcctgtgaggcatgaagggtaaatgcagtttcactcagcctggttgacctcagccccacagctaacacaacacagtcaggccgcgggtccctcactgcggcattctcaacccctgggttgccacccatttgcagcccctatatccaaaaccatttacattatgatttataacagtagcagcattagttgtgaaatagcaaagattttatggttgggggttaccaccacaaagggtcgcagcagcaggaagtttgagaaccctgcaccacagggtccatctcacacctgcctctgccaccattgttcccaaaactgactggaaactgagcttttgaaactgtctcgatgtggtgcttgagggccagattgacagtagcagaattactggaatggatgctctagtgacatctgcatttgtacaggggcggggttgggcggggcggggcggggttgggcagggtgtgttcagagtcactgtacttacagtccagcccagagctgctggcagtcatgcccaggggtctgccttgtgcgtgctagcaaggctgtgctgcagatctcacttcctgccccagagttctgctgtagtatgttcgtttacagtgatagacggttccattgtgtacgacggtctctgactctatgcctacagtatttacagtgtcaaagattaaaagtgtcgcctgtccatttggccgtcactgggaaacagtgcttccaacagtgctctgtacgtaacctgtaagcatttcaaccccgccacgccagtgtggcctggcgttacgttggcgagccatcttgtacgttctcacttggtcctcgttcttctgcgacctgaaatagttgttccctctgctctgggagctggcggctggggaacagcagcagcttgtcttgtaaggtcctgccaggagggcaacaagtgactataaggaggctgttagtgagcctctgacagcttgtgaacttgctgtaattaaaacaaaaacttccctgttaaaaaaaaaaaaaaaaaaaaaaaaaaaaaaaaaaaaaaaaaaaaaaaaaaaaaaaaaaaaaaaaaaaaaaaaaaaaaa

SEQ ID NO: 1220 - DNA, 2261 bp, Rattus norvegicus
  Genbank Accession No. AF012714
tcggtgcttagcccctacttcggcacgaagacacgctacgaagatgtcaacccctggctgctgggcgacccggtggcgccgcgacgggacccggagctgctggcggggacttgcaccccggtgcagctggtcgccctcatccgtcacggcacccgctaccctacgaccaagcagatccgcaagctgaggcagctgcaggggctgctgcagacccgcgagtccgtggatggcgggagccgagtggccgccgctctggaccaatggccgctgtggtacgatgactggatggacgggcagctggtggaaaaggggcggcaggacatgcgacagctggccctgcgtctggccgccctcttccctgacctcttctgccgggagaactacggccgcctgcggctgatcaccagctccaagcaccgctgtgtggacagcagcgccgccttcctccaagggttgtggcaacattaccacccaggattgccacctcccgacgtctcagacatggagtgtgaccctccgagagttaatgataagctaatgaggttcttcgatcactgtgagaagtttttaaccgaagtcgaaagaaacgccacggctctttatcatgtggaagccttcaaaaccgggccagaaatgcagacagttttaaagaaagttgcagccactttgcaagtgccagtgaacaatttaaatgcagacttaattcaggtagcctttttcacctgttcgtttgacctggcaattcaaggtgtccattctccctggtgcgatgtgtttgacgtagatgatgcgaaggttctggaatacttaaatgatctgaaacagtactggaaacgaagttatggctatgccattaacagccggtccagctgcaacctgtttcaggacatttttctacacctggacaaagcagttgagcagaagcaaaggtctcagccggtctcttcttcagtcatcctccagtttggtcatgcggagaccctcctacccctgctctcgctcatgggctacttcaaggacaaggagcccctgacagcatacaattttgaggagcaggtgcatcgcgagttccgaagtggtcacatcgtaccatatgcttcaaacctaatatttgtgctttaccattgtgaagacgcacagacccctcaagaaaaattccagatacaaatgctgctgaatgaaaaggtgttacccttagctcactcgcagaaaactgttgccttgtatgaggatctgaagaaccactaccaggacattcttcagagctgtcaaactagtaaagaatgtaacctacccaaggtgaacatcacgtccgacgagctctgaggactcatcagtgctctgctgagggcgcttgttgccaataggtagccactctaaaggcagcaacaggaggatctctgtgagctcaaggccaacctgttctacatagtgagttccaggccagccaaggctgcgtagagaaataaagtttggtccttttgtcttttcacagaaaatgatagtttcttttagaatctggacatacgggtaagacatgactctccctggagcagctctcttcagaaaaactaattcagcaaaacagctgtccctcccagtgtttgcagagctgaaattttcctaatgacctaagaaaatgctgatgtagaatggtattagaaaataacacttcaaaagtgttggataccaaagcacagtggcagctgggtgagccgcagtgagtgactgagatggggacttgagtgatcatgttgggttctttccttctccttcacgaaggacacaaagaaggaagtctaataacgtatccatccagacaggaaatcaactcgatattaagaaccaggctgaagtaaaactgaaagtgtgggctatttttgttgatgttatttacaaaaagatttaaacactgtcagtaattgcctttaacctccaagtaggtcttgcagaaccacctccatccctcggacctgtttgaggcgcgcagttataatggggcccagcctggtacagagccgacttccttgactgttgcctggttatctttcgttccatcatggctcccctttttatatcttgatattacataaagtttatcttttggtggcttggatttttttttaaataaagacttatctgcctaatttaattgtagagattcgaacctgattcaaagaaattttgagttctttcaaataccataaaaatgtttgctacaataaataaataaaattcttgtggctttactaccaaaaaaa

SEQ ID NO: 1221 - DNA, 602 bp, Rattus norvegicus
  Genbank Accession No. AF014503
gagggcagacatttggaaaacaggcaagactttggagaaagcagaccaggtatgatggccaccttgccaccaacagcccacacttcccagcaacctgtaaacatagaggacgaagatgggatcctggatgagtatgaccagtacagcctggcccaatcttatgtcgtcggtggaggtcggaaaggacgtaccaagagagaagctgctgccaacaccaaccgccccagccctggtgggcatgagaggaagctgctgaccaagttccagaactctgaaaggaaaaaggcctggcgctgagacagagctggagatgaggccagaccacggacaccacacccagcaatggatacaggaccttggagaaattaggagttgtaagcaggacctaggcctgcttgattctttcccacctaagtgaggctctggagagggaacaccaaaaaaagcccttccggacccagctaaagggcaagttaggagcgagaagcagagggtagatgggcagagctaagaaggcacccccaaaaagaacagtgggaaaaactggatgcccttgggtggcagtaacaataaactgtacaacagtgacagcaaaaaaaaaa

SEQ ID NO: 1222 - DNA, 669 bp, Rattus norvegicus
  Genbank Accession No. AF016387
ccaagatgaaggacatgcggatggataagtcggagctcgggtgcctgcgcgccattgtgctgttcaatccagatgccaagggtttgtccaacccctcggaggtggagtctcttcgagagaaggtttatgccaccctcgagccctataccaagcagaagtatccggaacagcctggcaggtttgccaagcttctgctgcgcctcccagctctgcgctccattggattgaaatgcctggaacacctcttcttcttcaagctcattggggatacccccattgacaccttcctcatggagatgttggagacccctctgcagatcacctgaaactcctcggcagtagcttcctcacccagagtgacccctgggctggtgtgtgtgtcgccctacccctgcacactgtcctctcccactctgacttcccttcctgtccccaaaatgtgatgcttgtcccgaataactacaacctttctacacatgagacttttctaggtggagttttgtatggttgttaaaggtgacccttctttgctacttaaggggctgagtctggcagttcttggaagagtagccaagcctctgtacatataattatcttggtttaaattattttttcacttgccatggaaagcaaacaaatggaaaagaaaataataaatacgatactggc

SEQ ID NO: 1223 - DNA, 1934 bp, Rattus norvegicus
  Genbank Accession No. AF022774
cgaagcagatgtgactcctgccctgggctgtgctccccatcatggctgacaccatcttcagcagtggaaatgatcagtgggtgtgccccaacgatcggcagcttgctctgagagccaagctgcagacaggctggtctgtgcacacataccagacggagaagcagaggaggactcaatgcctgagccctggagaggtggaggtcatccttcaggtcatccagagagcagagcggctggacatcctggagcagcagaggattgggcggctggtggagcggctggagacgatgcagaagaacgtgatgggcaatggtgtctcccagtgtctgctctgcggggagatgttgggattcctgggcagctcctctgtattctgcaaagactgccggaagaaagtctgcaccaagtgtgggatcgaggcttcccccggccagaagcggcccctgtggctgtgtaagatctgcagtgagcagagagaggtctggaagaggtcaggggcctggttctacaaagggctccccaagtacatcttgcccctgaaaacccctggccgggctgatgatccccacttccgacctctgcctgtggagcccacagaaccacagcctcagagtgctgaagtcagccgtgtctacacatgggcccgagggagagtggtttctagtgacagtgacagtgactcagatctcagctcctccagcctggaggacagacctatgccctctgggatcaagggcacaaaatatgacaagcctagaggggactcaggtggcagcatggagtcacccaggatggggcctgcccgaccgcccagccatctttctggcagccagagcagcctgggcagtgagacgggggcaggtgctacagatccacagggaggcaccctaccccggcctgagcccagggtatccggcaaaaggcatacctgggcaactacccattactgaggtggccggctgacctccctgggctgaggcacactctctggaggaagattcagagagagacaacagggccggcctaccggagcccctctctgaaggttcttgagggctcacaagctccctgataccttgacctgcaactcaacaagccagtgtttggggaccgagcgtgcttgcccccaccctgtagtgccttctctactatctcactcagcaccccaccttttatttattgcccctcccccatcccagtcacatctcgatttgctcgggccttgggttgggttggaaaggccttcctctatgcactgaagtttgggtgggacacacagggctttctttgtactaatgatgcgcactctaaccctcagtgtgaccctgcggagctgagcaaccccaccccacacccccacaccccccaccccccaccacattcccagtgtaagcctggagcaccaggctgtccctattcctccaaccggcgggcggcggggcggcggcggaggccagagcaaggtcctatttgccccgaggctggtccaggagctgagttaaatccagctttgaggtttccccgaagcccctattggcctctgggtttttgttctaccctgaaacacagctccccctcagacattaaaatgctttttgttcttcagtggaaaacaaagctcccaccctgcctcatgctcgctggcccagcctgggagtttcaaattctaaagccagagcaagcgtgaaaaatattcaaaatacagatgcttctggaaaacccctccctggggtgggggtgaggaagtgtcctatgcccttccttccctgagtccagttccatccttccccaccaccatccctcccattattattattaataatggccaccaccattattagccttttgcctgttgctgctggcagaagacaaacttcactatttccctgagatgtgtagccatcagcactaacataataaacataagaattttc

SEQ ID NO: 1224 - DNA, 4076 bp, Rattus norvegicus
  Genbank Accession No. AF025308
gggcttgcagccagcgcctcctcttaagagaagcgtctctccaccgcatccacaggcttgtgttgtgatgtattcgcgaagtggctttcttctgaagactccagggtctgacttctgaagagaagaaggaagaggagggtggaggagcacacagaaaggcctggaggcgtcccctggtgttcaggcagcttctgggtcagaacttggagacaccatgacaaacagcgtctgtcccacagcccaaggttcaggcaaagtcatagccaggcggtgtggtcaggggccgggctggggattccccatctccccagtttcacttctgcttctaacctgtgtcaggtccttctgcccggatactgatgacgcgctagcaattctctcattcctattgggtgccgtgattccggtgaaccaatcagcgttgcccagacactagatgtaaactccacgcagccgcgggactcagccgcgtccgggacctcggataggggcgatggcaccgcgcacgctgctcctgctgctggcggccgccctggccccgacccaggttcgcgcgggtgagtgcggggtcgggagggaaacggcctctgcggggaggcgcgggagcggcacggggaagcggtccccggtcgcacccaagaccccggccccttctccaccgcgtccggagccccggcccctgctccccgcgcgccggcagccgcccgggatcctgggaggaggtcgggatctcaccgcgcgccgcccccaggctcacactcgctgcggtatttccacaccgccgtgtcccggcccggcctcggggagccccggttcattatcgtcggctacgtggacgacacggagttcgtgcgctacgacagcgacgcggagaatccgagatacgagccgcgggttgggtggatggagcgggagggtccggagtattgggagcgggagacactgatggtcaaggaaaacgagcaggtttaccgagtgagcctgaggaccctgctccgctactacaaccagagcgagggcggtgagtgaccccgggtcggaggtcaggacccctccccgtccccacacggccggagacttccgggtccgaagtccaggttcgggaacagaaccgacccggaccggtttccctttcactttggaggagtccgcgggtgggcggaacgggtgggcggggcccggcctgaccgcggggtcccgcaggctctcacaccatccagtggatgtccggctgtgacgtggggtcggacgggagcctcctccgcgggtatgatcagttcgcctacgacggccgcgattacctcgccctgaacgaagacctgaaaacgtggatggcggcggacacggcggcacagatgacccgaaacaagtgggatcaggcaggtgaagcagagagacacaaggcctacctgcagggcacgtgtgtggagtggctccgcagatacctggagctcgggaaggagacgctgctgcgctcaggtgcgggggccgcgggcttctcctcctctgccctcgggctggggctcagtcctggggaagaagaaaccctcagctgggtgatgcccctgtctcagaggggagacagtgtccctgggtctccctgatccctcatcacggtgactgcactgcctctcccacagggcccagccttctccctggagagttctgagtccctctcaggagaaggagggaatttcccccttaacagcaggggctccctgctgtcagccatggcctctcccaggcatgttctctgcccacacccactctctgaggacactgactcctgtcctgctgagtgtgtcagcccttacacctcaggaacagaagtctcctttacctcacaggactccactactctaggctggttcccacagtttctaaaagattccccgggtttctcacagatccctccctgatgtggggttggcatcccttcaataccccatttctctctcttcctacagtggagaatggtaccatgagcccttatggggtaccctggaggaatataaattgtgggatttctttttcttttttctttttttctctctttttcttatcttttacttccttttttctttccttttttttttttttttttttttggaaggcattattttacttccagtcaggttttctctgcaaacacatattaaatcaattattttctattccctcttctgttctgtgaccacccatctcatgctataaaacacccgtaaaggacggccatgttgacccactcgctcatgtggattccctcttagcttctgagtccctcaggaaagtgtgcagttctgtgctgagggaaccagctctccctgcagctcactagggagatgacagttgaagtgtcagacacacacagttcagtgtcatccttgatttaactgtgtcctgtgtagatttcagtttgtcttgttaactgtgtgatttcttaaatcttccacacagatcccccaaaggcacatgtgacccttcaccccagacctgaaggtgatgtcaccctgaggtgctgggccctgggcttctaccctgctggcatattcctgacctggctgttgaatggggaggatctgacccaggacatggagcttgtggagaccaggcctgcaggggatggaaccttccagaagtgggcatctgtggtggtgcctcttgggaaggagcagaattacacatgccttgtggagcatgaggggctgcctgatcctctcaccctgagatggggtaaggagggtgtgggtatagagctggggtcaggaaaagctggagccttttacagaccctgagctggtcaaggctgagagctggtgttcctgacccccaccttcatttcctgtacctgtccttcccagaggctcctccatccactgaccccaacatggaaaccactgtcatttatgttgtcgttggagctgtggtcatcactggagctgtgaccatgattggagctctgctgactgttgtgagggggaggaagagaaacacaggtaggaaagggcagggtcttgtttcccctcagcttcctttagaagagcgctctgatcattaatgggaagcacagccacaccccacattgctgctgtctccaactgggtcctctgtcagttctggaaacttcctcctgtcaagaccttccttgaactctcacagcttttcttctcacaggtgggaaagtaggagtctacacccctgctccaggttagtgttggggcaggagtgtccctgagggtattggagtgaagctggagatgtggggaactcggggaatccatagtagctcctccatagaaatcttctgggggcctcagttgtaccgtgatgtgaatacatacatatacacatatacatatacagaacacaatacgtgtgtgtgtgtgtgtgtgtgtgtgtgtgtgtgtgtgtgtgtgtgtatgttttcttttaccctaggcaaggacagctccgagagctctgatgtgtctctcccagattgtaaaggtaactctgggtctgactggggaggggcaatgtggacatgattgcgtttcagggactcccagaatcccctgtgagtggagggttgttgggctgttgtcttcacagtgatggtttgtgactctcgttctctagcatgaagacagctgcctggagtggactgagtgacagacgatgtgttcaggtctctcctgtgacatccagagtcctcaggtctctttagacaccagtgtctgatgttccctgtgattctatggcttcagtgtgaagaactgtggagcccaggctgccctgcacacctggaccctgtccctgcactgcctgcattcccttccacattcaaccttgctggtccagcctggggttgggggggtggggacatatgcatcctgtcactcagtgctgctttgagctgcaactcctcacttctacactgagaataagaatctgagtgtgaacttgactgttcacatccttgacacaagtgttgattgctttttaaattactggattgaatacttagaggttctttgttttttatttttgttttgttttgttttctttgttttgttttaaaataaatggcaggtgga

SEQ ID NO: 1225 - DNA, 1242 bp, Rattus norvegicus
  Genbank Accession No. AF026529
ggcacgagaagagaacagatcgctttggaaaccggactgcaggattgtgatccagttctgagctggtgataaacactccttgtgacttttggtcaattcagctaccagattccagccaacatgaccctcgcagcctataaggagaagatgaaggaactcccactagtgtctctgttctgctcctgttttctgtctgatcccctgaataaatcatcctacaaatatgaagcagatacggtagacctgaactggtgtgtcatctctgatatggaagtcatcgagctgaataagtgtacctcgggccagtcctttgaagtcatcctgaagccaccttcctttgacggggtgcctgagtttaatgcctccctcccaagacgtcgagacccatcgctagaagagatacagaagaagctagaagcagcagaggagcgaaggaagtaccaggaagctgagctcctaaaacaccttgcagagaaacgagagcatgagcgtgaggtaatccagaaagctatcgaggaaaacaacaacttcatcaagatggcgaaagagaagctggcccagaagatggagtccaataaggaaaaccgggaggcccatctggctgccatgttggagcggctgcaagagaaggagccgcctgctgcgcggtgactcccgggaccgatcggtggcctcgtcccatggacaagcacgcagaggaggtgcggaaaaacaaggagctgaaggaagaggcctccaggtaaagcccagaggccaaggaagtttccaggacagccggacagctcccgcagcaacctggttccagcagcatcggccgctggctgctctcccagcactggggttcggggggaggggggtggccaaaggggcgtttcctctgcttttggtgtttgtacatgtaaaagattgaccagtgaagccatcctatttgtttctggggaacaatgatggggtggagaggggacagagagtgtgtggaaaaggaggtgaagatgacccgaggactttgtacactgtccactgactgcagacttgccaaggcccccgcttttcagcctctgcctggacattcggcctccaggttcctagtggagagaagatgtgacagaagttcagagtgaagggccgagtcctggtggggtggtgtgcagggccagcaggacgagcccgtctggatggagtgaaacctacctgagcgggtgggataaggtctgtgtgcgtctgttcattgtcatcttttct

SEQ ID NO: 1226 - DNA, 1110 bp, Rattus norvegicus
  Genbank Accession No. AF029357
cccctgcagccacagacagacggttcgcctctccgtaacaggcagctcaccatgcagacccttagaaaggaaaactgcagctcagtgtccgagttcatcctcctgggcttctccagcgaatcccagatcagaatggccctgtttatcttttttcttcttctctacatggtcaccctcctgggcaacggactcatcgtcgctctgatttacctagactctcgcctccacacgcccatgtacttctttctcagcatcctctctttggtagacatgagctacgtcactaccactgtgccccagatgctggttaacatggtgtgtccaaaaaggaccatctcctggggtgcttgtgtagcccagatgttcatcttcctggtcctgggtattgccgagtgtgttctctacgccatcatggcctatgacaggtacatcgccatctgcttcccccttcactattctgtactcatgagccgtcttgtgtgtgccaagatggttacaatatgctcctccatcagcgtcacgggcgctctgatctacactgtcttcaccatgcgtctgccctactgtggtccctacaagatcaaccacttcttctgtgaggtccccgctgtcctgaagttggcctgtgcagacacatccttcaatgaccgcttggacttcatcctgggtttcgtcttacttttggtccctctctccctcatcctggcctcttatgcctgcatctttgtctccatcttaagaatccgctcatcccaggggagactcaagtccttctccacatgtgcctcccacatcactgtggtcaccatgttctatgggccagccatggtcatgtacatgaggcctggttcttggtatgacccagagcgggacaagaagctggctctgttctacaacgttgtctctgctttcctcaaccccatcatctacagcctccggaataaggatgtgaagggcgcttttatgaaagtactcggaggcagagggacagcccagtgagccagaactgtatgactggatggagctcttttggcttactaaagacatcagttctgaataactcgagttttcctggagctctaagcagccaggagaggttgtggcacccct

SEQ ID NO: 1227 - DNA, 816 bp, Rattus norvegicus
  Genbank Accession No. AF030087
gttgtgctagattaaagtttcagagctcagtagattgagattgtaatgtctgtcatgtatgcatgcatttctgtaacagacatgcatcaacttttacataagtacgcttgtgtgactcgttgagaaaacacaggaaagaaagattgtaagtccaaatcatgtcttccactttgctcttctatatttcttgaccacttagaaaaaaagctcacaagcctttgaagaaacagcagcaggctgttatttttttcaaggtttacaaattaagtgcttgatttttaatgtattctcgctactgttttgattttcagatcttgattcaatatttgaagatgtgccttttattgggtaatgttaattctcgaatgtagtaatgttgtaccacaattgtaatgttacatgatcatgggtgtggcattctctgacaaattatgtgacaagaaagtcattttcagagaactcatggctccgattgcacagtccccttgctaaagcaaagggcactctcttaaggctacttcagaactggtctttgtattttctctaagtgatggatgcgtcgtgtccatttagaggcagggtaccacgtgtcccaggcagccctagatatgtgccatgagaaagttcaaagactaacaaagtctacaggaactcaaaatttcatttttgtaatggtaaccccccaagattttctccaagaaataaattattttgtactttataacttaaaagcagctagtagtacatttctgagatatagcaggagaccaaaacatttttggaaaaagaataaatatataaagagaaaaaaaaaaa

SEQ ID NO: 1228 - DNA, 1892 bp, Rattus norvegicus
  Genbank Accession No. AF034218
cgggcgggcttagctggtaccaggatggcggcggccctggcgtgggtcctggcggcgcctggtgcgagttcctgagctgctaccaggcaggtgacacttcctgtagcccccagcatgcgggcaggactgggtcccatcatcacactggccctagtgctggaggtagcatgggcctcggagcttaagcccacagcgccgcccatcttcaccggccgaccctttgtggtagcatggaatgtacccacacaagaatgtgctccgcgccacaaagtgcccctggaccttagggccttcgatgtggaggctacacctaacgagggttttttcaaccagaatatcaccaccttctactatgaccgtctaggcctgtatccacgttttgatgcagctgggatgtctgtgcatggtggcgtgcctcagaacggtagcctctgtgcacacctgcccatgctgaaggaagctgtggaacgctacattcagacccaagagcctgcggggctggcggtcattgactgggaggaatggcgaccagtgtgggttcgaaactggcaggagaaagatgtgtaccggcagtcttcacgccagctggtggccagtcgacaccctgactggccatcagaccgaatagtgaagcaggcgcagtacgaattcgagttcgctgctcggcagttcatgttgaacacactccgttacgtcaaggcagtcagacctcagcacctgtggggcttctacctctttcctgactgctataatcatgattacgtacagaactgggatagctacacaggccgctgtcctgacgtggaggtggcacaaaatgaccagttggcctggctctgggctgaaaatacagctctctttccctccgtgtacctggacaagacgctggcatcctccaaacacagccgcaactttgtcagcttccgtgttcaggaagcccttcgtgtggctcacacccaccatgcaaaccatgcactccccgtgtatgtcttcacgcgtcccacatatacccgaaggctcacagaacttaaccagatggacctcatctctaccatcggtgaaagcgccgccctgggctcagctggtgttatcttctggggcgactcagtgtacgcttcaagtatggaaaactgccagaacctcaagaagtacctaacgcagacgctggtcccctacatagtcaatgtgtcctgggccacccagtactgcagttggacccagtgccatggccatgggcgctgtgtgcgccgcaatcccagcgccagtaccttcttgcacctcagtcccagcagcttccgcctggtgcctggccgcacgcccagtgaaccccagcttcgacctgagggggagctcagcgaagatgacctcagctacctgcagatgcactttcgctgccactgctatctgggctggggtggtgagcagtgccagtggaaccataaacgggcagctggggatgccagtagagcctgggctggagcccacctcgccagtctcctgggtttggtagctatgactctcacctggaccttataagggatctctccccgcagatagcagtccagctggcctctggcacaaggatctccttggcacaaggagcctgttagggggtaggcaaatgagtctggagttggagtgggcagtacccccaggatgcctagaagagcatccataccacctgtcacccccctgttctaagggggagagaaacatcccctgagatgccctcatcttgccagagaagacgaggatacagttaggccggggaaggcctacctctactctctgttcctggatagtttataatcttggggtctcttttgtaaattaaatacaaaacaactgcaaaaaaaaaaaaaaaaaaaaaaaaaaaaaaaaaaaaaaaaaaa

SEQ ID NO: 1229 - DNA, 403 bp, Rattus norvegicus
  Genbank Accession No. AF034237
agtgcacgttcattttatcatattttggtattggtaatttgataacatttcatggtggtaaaatatagctctattttgggactttttatagaactacatttattcgaaagcataggaatatgttcttgtgattatcaggatctcctaatatttatctcaattcttttgtaagcttatggaatatttaattatttaagcatattttactgtaatatgtcatatctgaagtgtcagtagttactttgaataccgtactatttgctgtattttttcctgtgtgtatacgtatccttccagaacaggagtgtacctcctaatgttcactgtcacactgctctatgtgtgtccggttggttgaacactgtactgacttgagaataaactgcttcggcaatccattgtc

SEQ ID NO: 1230 - DNA, 1188 bp, Rattus norvegicus
  Genbank Accession No. AF034896
acgtgatgggatcagaaattcatgtaccctaaagttatacctaccaacttctatacacatgtcagttcctagttccagatgaaggtcttccaagcagcactgtcagtcactgaacatccctcctgaaaccctcagatgctttgtttgtaaccatgtaaatttatgcgtgagcccattccacagagcagacatgttctaaaagaagaggggaaatgcttagagatgagtgtcaactgttctctgtggcaggagaatagtttgtctgtcaaacgctttgcatttgccaagttctctgaggtccctggagaatgcttcctcctgttcaccctcatccttctcatgttcttagtatcactaacaggaaatactctcatagcccttgctatttgtaccagtccatctctacacacccccatgtacttctttctggccaacttgtctctcctggagattggctatacttgctctgtcatacccaagatgctgcagagccttgtgagtgaggcccgagggatctcttgggagggttgtgcctcacagatgttcttcttcatattctttggtataactgagtgctgcctattggcagccatggcctttgaccgctatatggctatatgttccccactccactatgcaacccgaatgagtcgtggggtatgtgcctatttggcaattgtctcatgggtgatgggatgcatagtaggtctgggacagaccaattttattttctccttgaacttctgtggaccctgtgagatagaccacttcttctgtgaccttccacctctcctggcacttgcctgtggtgatacatcccaaaatgaggctgccatctttgtggcagcagtgctctgcatatttagtccatttttactgatcatttcttcctatgtcagaattctcgttgcagtgctggtgatgccttcacctgaggggcgccataaagctctctctacctgttcatctcacctacttgtagtcacactcttctatggctcaacatctgccacctatttgaggtccaagtctagccactcaccaggagtggacaaactcttggccctcttctatacatcagtgacatccatgctgaatcccatcatctacagcttaaggaacaaggaagtaaagggtgcactgagaagaactctgggcctgaagaaagttctgacaatgaaaaggtaa

SEQ ID NO: 1231 - DNA, 966 bp, Rattus norvegicus
  Genbank Accession No. AF034900
atgagtgtcaactgttcgctgtggcaggagaatagtttgtctgtcaaacgctttgcatttgccaagttctctgaggtccctggagaatgcttcctcctgttcaccctcatccttctcatgttcttagtatcactaacaggaaatgctctcatagcccttgctgtttgtaccagtccatctctacacacccccatgtacttctttctggccaacttgtctctcctggagattggctatacttgctctgtcatacccaagatgctgcagagccttgtgagtgaggccagagagatctctagggagggatgtgccacacagatgtttttcttcacattttttggcataactgagtgctgcctattggcagccatggcctttgaccgctgcatgggcatatgctccccactccactatgcaacccgaatgagtcgtgaggtatgtgcccatttggcaattgtttcatggggaatgggatgcatagtaggtctgggacagaccaattttattttctccttgaacttctgtggaccttgtgagatagaccacttcttctgtgaccttccacctctcctggcacttgcctgtggtgatacatcccaaaacgaggctgccatctttgtggcagcaatcctctgtatatctagtccatttttggtgatcctttattcttatgtcagaattctcgttgcagtgctggtgatgccttcacctgaggggcgccataaagctctttccacctgttcctcacacctacttgtagtcacactcttttatggctctgtgtcctttacctatttgaggcccaagtctagccactcaccaggaatggacaaactcttggccctcttctacacagcagtgacatccatgctgaaccctatcatctacagtctaaggaacaaggaagtcaaggcagcactgagaagaactctcgacctgaaaaaaattatgtcaattaataggtaa

SEQ ID NO: 1232 - DNA, 1039 bp, Rattus norvegicus
  Genbank Accession No. AF036335
gaaacgcctcctcgttttgctcagcatggcacatttgagtatgaatattctcaacgatggaagtctttggatgaaatggaaaaacagcaaagggaacaagttgaaaaaaacatgaaggatgcaaaagacaagttggaaagtgaaatggaagatgcctaccatgaacaccaagcaaatcttttgcgccaagatctgatgagacgccaggaagaattaaggcgcatggaggaacttcacagtcaagaaatgcagaaacgtaaagaaatgcagttgaggcaagaggaggaacggcgtacaagagaggaagagatgatgattcgccaacgtgagatggaagaacaaatgagacgccaacgagaagaaagctacagcaggatgggctacatggatcccaagagaaagagacatgagaatgggtggtggtggaacaatgaacatgggagatccctatggttcaggaggccagaaatttccaccgctaggtggtggtggtggcataggttatgaagctaatcctggagttccaccagcaaccatgagtggttccatgatgggaagcgacatgcgtactgagcgctttgggcagggaggtgcgggtcctgtgggtggacagggtcctagaggaatggggcctggaacgccagcaggatatggtagagggagagaagagtatgaagggccaaataaaaaaccccgattttagatacttaggctttcattccagtttggttttgtcttcttgtttagataccacttaaattcttggcattttagtaagaaagctacctttttatggatgttagcagtttattgacctgatatttgtaaatggcctgtttgggcaggtaaaattatgtaacgcagtgttcaaaacaggagaaaaattttttcatttactttttttttaactgtataatgtttctcaagttaatggcagtgtaccttgtgccactgaatttccaaagtgtaccattttttttttactgtgcttcaaataaatagaaaaaaatagttatgaacaaaaaaaaaaaaaaaaaaa

SEQ ID NO: 1233 - DNA, 1884 bp, Rattus norvegicus
  Genbank Accession No. AF038870
caagcctttgctggagaccgctcctgtccagtccgcagctggcttcagcgccactcaggacaccggaaagatggcaccgattgccggcaagaaggccaagaggggaatcttagaacgcttaaatgctggcgaagtcgtgatcggagatgggggatttgtctttgcactggaaaagaggggctacgtaaaggctggaccctggaccccagaggctgcggtggagcaccccgaggcagttcggcagcttcatcgggagttcctcagagctggatcgaacgtcatgcagaccttcactttctatgcaagtgaggacaagctggaaaaccgagggaactacgtggcagagaagatatctgggcagaaggtcaatgaagctgcttgtgacattgcacggcaagttgctgacgaaggggatgcattggttgcaggaggtgtgagtcagacaccttcctacctcagctgcaagagtgagacggaagttaaaaagatatttcaccaacagcttgaggtcttcatgaagaagaatgtggacttcctcattgcagagtattttgaacatgttgaagaagccgtgtgggcagtcgaggccttaaaaacatccgggaagcctatagcggctaccatgtgcatcggacctgaaggagatctacatggcgtgtctcctggagagtgcgcagtgcgtttggtaaaagcaggtgccgccattgtcggtgtgaactgccacttcgaccccagcaccagcttgcagacaataaagctcatgaaggagggtctggaagcagctcggctgaaggcttacttgatgagccacgccctggcctaccacacccctgactgtggcaaacagggatttattgatctcccagaattcccctttggattggaacccagagttgccaccagatgggatattcaaaaatacgccagagaggcctacaacctgggggtcaggtacattggcggctgctgcggatttgagccctaccacatcagggccattgcagaggagctcgccccagaaaggggatttttaccaccagcttcagaaaaacatggcagctggggaagtggtttggacatgcacaccaaaccctggatcagggcaagggccaggaaagaatactggcagaatcttcgaatagcttcgggcagaccgtacaatccttcgatgtccaagccggatgcttggggagtgacgaaaggggcagcagagctgatgcagcagaaggaagccaccactgagcagcagctgagagcgctcttcgaaaaacaaaaattcaaatccgcacagtagccacaggccagcggttcggggcgaattcctccaggtccgggccacagtgtgcacccggaaggagaaggcatctctaaaccagcgtttgtgttgatgccggcttacacctgtgattggtgctagttagacaaaatggagtcacagatagcatttcacagttacaaaactacgctttagaattttacctagaaggaagaaaggagaagtccacagtaaatcctgaacacatttcctacgtgcctgtcgcattacaggcgcacaggagtcactgcagcgaagagaaagtcacccgacgtcaatctcatttcagatagggggataggacaccacctccacgagtgacatagaaccattcagggaccgtatcataagtgacacagcaaccatctatatctaagatgcttcccaagtggattccaagatcttttgagcaggacccttaggcagaaacaacacacaccagccctgtaaaacttaacagataactgatccattctgtaattctgtaatctctgttctgactgcttccattccatttcattaataaaaacatgccggttgaaaaccttcaaaaaaaaaaaaaaaaaaaa

SEQ ID NO: 1234 - DNA, 1076 bp, Rattus norvegicus
  Genbank Accession No. AF044574
cacacagcaaacatgacccagcagccgcctgacgttgaggaggatgactgtctttctgaataccaccacctcttctgtccggaccttctccaggacaaagtggcttttatcactggtggtggttctgggattggcttccggatcgccgagattttcatgaggcatggctgccacactgtcatcgtcagcaggagtctgccgagagtgtccgaggctgctaagaagttggttgctgccactggaaagcggtgtctccctctgtctatggatgtccgagttcccccagctgtcatggctgctgtggaccaagcgctgaaagaatttggcaaaatcgacatcctcattaactgtgctgcagggaactttttatgccctgccagtgcattgtctttcaatgcctttaagactgtggtggacattgacacccttggcaccttcaatgtgtctcgtgtgctttatgagaagttcttccgggaccatggaggagtgatcgtgaacattaccgccaccctcagtatgcgggggcaggtgctgcagctccatgcaggcgctgccaaggcggctgtggatgctatgacgcgacacttggctgtggagtggggtccccagaatatccgtgtcaacagcctggctcctggtgccatcagcggcactgagggtctgcggagattaggaggccccaaggccagttcgaaatttaagtatctttcaagtcctattccaagactcggaaccaagacagaaatcgcccacagcgtgctgtacctagccagccctctggcttcctatgtctcagggattgtgttggtggttgatggtggtagctggatgacgctcccaaatgacattgggcgactgctagagtttgaatcctcctctgctaagctgtagtgtttgaagagcacacccaaggcttcaagcatgttaaagcaacagaatcaactgaactacgtcctctaccccaagataccttttttgacacataaacattgattgccttaagaaagttgtactgaggaggccgtgttcttccatggggaggcttccctgtctcacatagtctatagtcacacgaa

SEQ ID NO: 1235 - DNA, 834 bp, Rattus norvegicus
  Genbank Accession No. AF051943
caactcacgcttgccctgatcaaacctgatgcagttgcccacccactgattctggaggctgttcatcaacagattctcagcaacaagttcctcattgtacgaatgagagaattgctgtggaagccggaggactgccggaggttttaccgagagcatgaaggtcgttttttctatcagaggctggtggagttcatgacaagtgggccaatccgagcctacatccttgcccacaaagatgccatccaactttggaggacactgatgggacccaccagagtgtttcgagcacgccatatagccccagattcaattcgtgggagtttgggcctcactgacacccgaaataccacccatggctcagactctgtggtttccgccagcagagagatcgcagccttcttcccggacttcagtgaacagcgctggtacgaggaggaggagccccagctgcgctgtggtcctgtgcattacagcccagaggaaggcatccactgcgcagctgaaacaggaggccccaaaccagcttagtaaagtcctgtcggtccctgaggactatgcagtgtgcagcctttcttttagggtcaggaaggccgtctgaagacactgtctttgatggaccccaccacctgccggaaggtttcgcagaccacagttctgctacggcagcccagatctatctacctcttctatgagtattcacagaggtccaggaaggaggtgatgcctccttcctcgagaaagagcttgcctgttgaccagtcaggaaaacgcagtgcctgcctgtgtaaccagcatccacctggcttccttaataaacttcgtgctatcaaatgc

SEQ ID NO: 1236 - DNA, 2549 bp, Rattus norvegicus
  Genbank Accession No. AF059530
gttgctttggggctaccgcgcgcccgcgctcgttcccagctccggtcccgcgctgtgcggtcgcgcgcttggtcggcggccatgtgttcgctggcggcggggaacggacaaggcgcggagctggggccggagcccttggagctgtcggacagcggagacgacgcgggctgggaggacgaggacgcggacgctgagcccgcacagggccggcagcacacaccctgcctgttctgtgacaggctcttcaggtctgctgaagaaacgttttcacactgtaagttggagcatcaatttaatattgatggtatggtccacaaacatggactggaattttatggatacattaaactaataaattttattagacttaagaatcctactgttgagtacatgaattccatatacaaccctgtgccttgggataaagatgagtacctgaagccagtgttggaagatgatcttttgcttcagtttgatgtagaagatctttatgagccagtgtctgctcccttcacataccccaatggactcagcgaaaacacatctgctgttgagaaattgaagctcatggaggcccgggcgctgtctgctgaggcggctctggctcgggcgcgtgaggatctgcagaagatgaaacaatttgctcaggactttgtgatgaacgtagatgtcagaacctgctcctccacgactaccattgcagacctgcaggaggacgaggatggcgtctacttcagctcctatgggcattatgggatacatgaagaaatgctaaaggacaaagtgcgcacagaaagctacagagatttcatataccaaaatccacacatcttcaaagataaggttgttctggatgttggctgtggaactggaattctctccatgtttgctgccaaagctggggcaaagaaggtgattgcagttgaccagtctgaaatcctctaccaggctatggatatcataaggctaaataaacttgaagataccattgtactaattaaaggaaagatcgaagaagtgagtcttcctgtggaaaaggtggatgttattatatcagagtggatgggctattttcttctttttgagtcgatgttggattctgtcctttatgccaagagcaaatacttggcaaaagggggatcggtctaccctgacatttgcaccatcagccttgtggccgtgagtgacgtgagcaaacacgccgatagaattgccttctgggatgacgtctatggcttcaacatgtcctgcatgaagaaagcagttataccagaagctgttgtggaagttgtagatcacaagactctcatttcagacccttgtgatatcaagcatatagattgccacaccacatctatctcagacttggagttttcttcagactttaccctgagaaccacaaagacagccatgtgcacggcagttgctgggtactttgatatatattttgagaagaactgtcacaacagggttgtattctctactggcccccagagcaccaaaacacactggaaacagacaatatttcttctggaaaagccttttcccgttaaagcaggtgaagccttaaaaggaaagatcacagttcacaagaacaagaaggatcctcgttccctcattgtgaccctgaccttgaacagttcaacccagacttacagtctccagtgacagtcatggtctccagccgccacaaagtctgaagcacacccaactgtctgttaaagcgggataaggcaatcagcaggaggggcaggctccacggggctgtagcatggctgctcctggtcctgcagctactgggtagtaagcccaaataaagcagagagctcagtggaggcctgtgccctccttcctcctactgcttctgctcctagagatcctagtcacagaagcctgcttggccagattagctgaagagacttcctctcctgctagactgagagtcatttgaattggcttacttttggaacagtaatagtcctggtttttaaattatatatatgtttcttactataaattttgtttttaataatgagcaacacaaagcagtgttttactgtagatttcctttctagaggaacagtttttagttacactctttgctgcaatatcaggatatcttaagactagggagccagtggatgggacacagcagcgtctctcacacattctgtttgcaggggctgtgctgcggtcctctccacccacctgcagctcagctgtacccctcagtgttctccagccatagcctagcaatgtggggaagtctaacttcagtgcacagcctaggtgtgacagactactcttcaggctgggatagaggtatctaaaatgctgcctttacagaccaggtttgtgccaaggccatgtatccatctgctagtactgtaaaatcatgatattcaggttgaaaaaatgaaaaatatccaataaaatgtgtaactattgaaataaaaaaaaaaaaaaaaaaaaaagggcggccgctaagtaagtaagacgtcgagctctaagtaagtaacggccgccaccgcggtggagctttggattgg

SEQ ID NO: 1237 - DNA, 7272 bp, Rattus norvegicus
  Genbank Accession No. AF061947
ggccgcctcggaggtccgtgcagggctccggtgagcgcgaggaggtgggaacacgcgacgcccgctctccattacgggcgcggtgggccgaagcctggctcgagacccgaaggcgctgacaaggaccttctggccacgcctgctcctccgcgcgccccgccgctgcgcccggaggcgcccagggtgggtcactgggaccgcagctcgaagccatccctttctgtgcgtcctttcattcaccttcacagcagcccagagagggactgtcaactggcacatcccccaccagtgatgggaagtgatcctccatggtggcgctgaatctctgaatatgattcgaattgcagccttaaatgccagctccacaattgaagatgaccatgaaggaagctttaaaagtcacaaaatccagacaaaggaggctcaggaagcagaagcctttgccctataccacaaggccctggatctgcagaaacatgacaggtttgaggagtctgccaaggcctaccatgaactcctggaggctcgcctgctgcgagaggcagtttcatccggagatgagaaggaagggctgaagcaccctggactgatactgaaatattctacgtataagaacctggcccagctggcagcccagcgggaggacctggagacagccatggagttttatttggaggccgtgatgctggattccacagacgtcaacctttggtacaagattggacatgtggccctgaggctcatccggcttcccctggctcgccatgcttttgaggaagggctccggtgtaatcctgaccactggccctgcttggacaacctcatcactgttttgtacaccctcagcgattacacaacatgtctttacttcatctgcaaagcactggagaaagactgccgctacagcaaaggcctggttctcaaggagaagatttttgaagagcaaccttgtctccgaaaggactcactccgaatgttcctcaaatgtgacatgtcagttcacgaggtgtcagtgaatgcagcagagacacaggccattgtagacgaggctctggggctgcggaagaagaggcaggcgttgatcgtgcgggaaaaggagccagacctgaaactagtgcagcccatccctttcttcacgtggaagtgccttggagagagcttgcttgccatgtacaatcacctcaccacgtgtgagcctcccaggcccagcctgggcaagaggattgacctgtctgactaccaggatcccagccagctgcttgccccctccatcgtggttactcctgtcagtgtggtccagccaagtcctgtttgcaccaatccaactgttgctgtggccgagcctgtgctctcctacacctctgtgaccacaaccagcttcccactgcacagtcctggcctgctggacacgggcactcctatgggtgatgtttccggaggagataaatctaaaaaaggggtgaagcgtaagaagactttagaggaaagtggggagacagcaaagcggaggtctgcccgtgtccgcaacaccaagtgcaaaaaagaagagaaggtggatttccaggggcttctggtaaagttcctgccgtccaggttaagaaaactggaccctgaggaggaagatgatccatttaacaactatgaagttcagtcagaagccaaactggagagcttctcgaacgtgggacctcatcgactgtccttcgattcagccacattcatggaatctgagaagcaggatgtgcatgcgttcctgatggagaacctgaccaatgggggcgtcctggagctcatgatgcgctacctgaagagcatgggccacaagttcctgctgaagtggcccccaggcctggcggaggtcgtacttagcgtctaccacagctggaggaggcacagtaccagcctgcccaacccattgctgagggactgcagcaacaagcacatcaaggacatgatgctgatgtctctttcctgcatggagctccaactggaccagtggcttctgaccaaaggcagaagctccacggtgtctccccggaactgccctgctggtgtggtgacaggcaggtttgggccagacttcccaggaacccactgcctgggtgacctcctgcagctgtcatttgcgtcatctcagcgggatctgtttgaggacggctggctggagtttgtggtccgtgtttactggctgaaggcacgtttcttggcactacagggcgatatggagcaagctttggagaactatgatatctgcacagagatactccagagctccacggctctccaagcccaggcaggggctgagcaaagggacattgtcatccggctgcccaacctgcacaatgactccattgtttctctggaggaaattgataagaacctgaagtctctggaaaggtgccagtccctggaggagattcagcggctgtttgaggcgggcgactacaaggccgtggtgcagctgctccggcccactctgtgcaccagtggctttgaccgagccaaacacctggagtttatgacttccattcccgagaggccggcccagctgcttctgctgcaggactctctgctccggctggaggagcacaggcagtgctttgaatgctctgacgtggccctcaatgaagctgtccagcagatgctgaactcgagtgactctgcggccaaggaggagtgggcggccacagtgacgcagctgctgctaggcatggagcaggcactgtcatcagacagcaggggcagcatcctgaaggagtcctcctctcccacgggccttgtccggctcaccaacaacctcattcaggtcatcgactgcagcatggctgtgcaggaggagcccaaggagccctatgtctcctccgtgctgccctggatcatcctccacaggatcatctggcaggaggaagacactttccggtctctgtgccaccagcagcagctccagaacccaacggaagaagggatctcggagatgcccatgctcccatcttccctcatgctgctcaacacagcacatgagtacctgggcaggaggtcctggtgctgcaattcagatggagcgctgctgcgattctatgtgcacgttctccaaaaggagcttgctgcgtctgcctctgaggacactcacccctacaaggaggagctggagaccgccttggagcagtgtttctactgcctctacagcttccccagcaagaagagcaaggccaggtacctggaggagcactcagcccagcaggtggacctcacctgggaggacgccctgttcatgtttgagtacttcaagcccaagaccctccctgagtttgacagctacaagaccagcaccgtctctgcggacttggcaaacctgttgaaaagaatcgccaccattgtgccgcgcacagagaagcccgccctgagcatggacaaagtctctgcctacattgagggaacctcagcggaggtgccctgccttcctgacggggcagaccccgcccctccagtgctgaatgagctctactacctcctggctgactatcacttcaaaaacaaagagcagtccaaagccatcaagttctacatgcatgacatttgcatctgccctaacaggtttgattcctgggcaggcatggctctggcccgggccagccgaattcaggacaagctgaactcaaatgagctgaagagtgatggacccatctggagacatgccacacctgttctgaactgcttccggagggcccttgagattgacagctctaacttgtccttgtggattgagtatggcaccatgtcctatgccttgcactcattcgcgtcccgtcagctgaagcagtggcgagccgagctgcctcctgaggttgtgcagcagatggaggatcggcgagacagcatgctggagacagccaggcactgtttcacgtctgcagcccactgcgagggtgatggcgatgaggaggagtggctcattcactacatgctgggcaaagtggcagagaagcagcagcagccgccgaccgtgtacctgctgcactaccgtcaggcgggccactacttacacgaggaggccgcccgctaccctaagaagattcactaccacaacccgcccgagctggccatggaagccctggaggtgtacttccggctccatgcgtccatcctgaagctcctgggcaaacctgactctggggttagcgcagaggtcctggtcagctttatgaaggaagcagcagaaggaccttttgccaggggcgaggagaagaatacacctaaagcttcagaaaaggagaaggcctgcctggtggatgaggactcccactcttcagctgggacactgccgggccccggagcctcccttccctcctcctctggcccaggtctgacatccccaccttacacagccactccgattgaccacgattacgtcaaatgtaaaaaaccccgtcagcaggcgacgccggacgaccgaagccaggacagcacagctgtggcactgtcagactccagctcaacacaggacttctttaatgagcccacaagtttgctggacggttctcgaaagctccttccagagaagaggatctctgggctcagtgctcaagcaggaccaagtggtaaagaccttccagggcccacagaggaaagaggaaaaacggaggagtctttggagagcacagaggccttccgggttgtagaaccaagcgtccagaagcctgtggcagattcctcggcctctgcttacatccccagcaagcccgcagtgtccacgccccctccgtgggatgggaagaagaggagtgaccccctaggggagccagtggctttccctcaggggctgccagcaggtgctgaggaacagcgccagttcctcacagagcagtgcatcgcctccttctgcctgtgcttgagtcgcttcccacagcactacaagagtctctaccggctggcctttctctacacctacagcaagactcaccggaacctccagtgggcccgtgatgtgttgctaggcagcagtatcccatggcaacaactgcagcacatgccggcacaggggctcttctgcgagaggaacaagaccaatttcttcaacggcatctggcggatccccgtggatgagattgaccggcccggcagcttcgcctggcacatgaaccgctccatcgtgctgctactcaaggttctagcccagctccgggaccacagcaccctgttgaaggtgtcctccatgctgcagcggacaccagaccagggcaagaaatatctgcgagatgctgaccgccaggtgctggcacagcgcgccttcatcctcactgtgaaggtgctggaggacacactgagtgagcttgcagaggggttagagcacccaggatccaaggcctgtggcctctctggagccaggatgaccaccgatgtctcacacaaagccagtcccgaggatggccaggaaagcctcccacaccccaagaagctacctctagctgatggctcaggaccagggcctgagccagggggcaaagtgggccctctccaccaattgccagtggccacagacacaagggacaacacagagcagggtggggagccgaaagacaaagagcgtcccccggtggggcccacagaacccatggacaccggcgagactgctgctcgccacccagacttggaaccgacgccacgtctgttgccaggccgccccccaagggaccggggtcccgagagccgctctgctgagctttccctggaggagctgagcatcagcacccggcagcagcctgccccacttgtaccatccccagtaacccccaccacagctgctcccactaccatgggggccagggcagcggggcaccccgaggaggcaccgccaaggcctaatcgaaagaggaaactcctgcaggacacagagtctggcaagacgctccttttggacgcctaccgtgtgtggcagcagggccagaaggccatggcctatgacctgagccgcatcgagaagatcatgtcggagacttacatgctcatcaagcaggtggacgaggagactgcactggagcaggctgtgaagttctgtcaggtccacctcggggctgctgcccagagacaggcctcaggagatgcacccactacccccaagcaccccaaggacagccgagagaatttcttccctgcaacagtggccccctcagcacctgacaccacagcacctgacgctctccagcggcccagtgactcccacctcaagcctgggttggctgctgccatcacctgccctccctcagcatcagcctctaccccagaccctggaattccccagccacacaggccagaggctgtgcccagcagggcccctctgagtcctgatggagaagaggtgtcaggagtgacagagggtcccagctttctatcccaagaaccacggcacagtcaccagatgaaaatggctgccactggtcccctggccgagcagcactgctggccagtggaggctgcttgccagacaggtgccgagcccaccttcagccaagccaccagcaccaaggtccccagcagtggaagtacccagacacctgagagccatcaaggcaaaactgagtccagcagagccaagtcccgcctcctgcccaacatgccaaagctggtgatcccctcggccaccaccaagttcccccctgagatcaccgtcacaccacctacccccaccctgctctcccccaaaggcagcatctcagaggagaccaagcagaagctgaagtctgccatcctgtctgcccaatctgccgccaatgtgaggaaggagagcctgtgccagccagccctggaggttctggagacatccagccaggagtcctcattggagagtgagacagacgaggacgatgactttatggacgtatgacgggttcacccagaggcagggcctggggtccctttggtccagaccctgggcaaggccagaagcctattgaggtatggttccctgtggtctcctaagcctgcccagccccctctttgcagcaccctgccctggctcaggctgtccagagcgtgctggtccagaggacggtacggcctgtcttaggcacatgcactgctgcggtctgcacagccgggatgctgccgccgccgccgcttctttttttaatgagatactgactttctctacaagcccgtgtgtactgaccaggcccacagtccagtgccgaggagacatcaggagcctagctctccccacaccctttttygtcattgttgcttctttttctaataaagatggaaaatggtaaaaaa

SEQ ID NO: 1238 - DNA, 623 bp, Rattus norvegicus
  Genbank Accession No. AF064541
ctccctgaaattctaactatgaattctgagccttcttggactgccaccccctcccctgggggcaccctgcctgtccccaatgctaccacaccgtggctaggtagggatgaagagctagccaaggtggagatcggtatcctagctactgtcctggttctggccacaggaggcaacctggctgtacttctgactctgggccgccatggccacaagccgtcccgcatgcatctgttcgtgctgcacttggccctgaccgacctgggcgtggcgcttttccagattctaccaatgtggctttcaccatctccatgcttctgggcaacctcagcagctgctgcaacccctggatctacatgggcttcaacagtcgcctgttgccacgttccttgagccaccatgcctgctgcacgggctctaagccccaagtgcacaggcaactctccaccagcagcctcactagccgtcgcaccacgctgctgacccatgcctgtggttcccctactctccgactcagccttaacctcagcctccgtgcaaagcccagacctgcaggctcactgaaggatttagagcaggtggacggggaagccactatggagaccagcatcttttagagaagattc

SEQ ID NO: 1239 - DNA, 2910 bp, Rattus norvegicus
  Genbank Accession No. AF079864
  misc_feature (1)..(2910): n = a or c or g or t
ggcacgagctttacttatgtcacaggcataataaaacatgacttcattatataaggggctatgcttaaactgaaagagaagtaggagagagttatggagatgtgaatggacctattttgagctgtgaggctacattttaaggtacctacttagattataagcctgatgtgaactccaagagttcaataatcatgactattcatacaccttgcctgctgtgtctagcagatcaaatgaggaaacactaaccttgcggctgactgtagaaattagatcaatttagaggagtgggaacacatgtttgttatcaagagactaccatgtgtcattgtgggaataggagcagagaccttggtcctttgagattgctttcttagacataaaagggggacgctggtgagagaagcacacaagtagacatgattatttcactcctctgtctgccagatccctagagcatcagctggtgttccagcagcttgttccccgagcctcctgagtagcattatagagaggtctgttccagaaagcgaaagccagatccagctgccctcctggagcagaacaacacaatttccaggctgtccctgtggcctctccctcttccagtctgccccacttggtgtcagcgatgagctcctgcaacttcactcacgccaccttcatgcttatcggtattccaggactggaggaagctcacttttggtttggcttccccctactttccatgtacgctgtagcattgtttggaaattgcattgtggtcttcatcgtgaggacagagcggagcctgcatgcgcccatgtatctttttctctgcatgctggcagctattgatctggctttgtccacctctacaatgcccaagattctcgccctcttttggtttgactcccgggagattacttttgatgcctgtctcgcccagatgttcttcattcacgctctctcagcaattgaatctaccatcttgctggccatggcctttgaccggtatgtggctatctgccacccactgcgtcacgctgctgtgctcaacaatacagtaacagtccaaatcggcatggtggctctggtccggggatccctattctttttcccactcccactgctgatcaagcgactggccttctgccactccaatgtgctctcccactcctattgtgttcaccaggatgtgatgaagttggcctatacagacacattgcccaatgtagtctatggtctaactgccattctgctagtcatgggtgtagatgtcatgttcatctccttgtcctatttcctgattatacgagcagttctgcaattgccttccaagtctgagcgagctaaggcatttggaacctgtgtgtcacacattggtgtagtcctggctttctatgtcccactcattggcctgtcagtagtgcaccgttttggaaacagcctggatcccattgtgcatgttctcatgggcgatgtctacctgctgctgcctcctgtgatcaatcccatcatctacggtgctaagaccaaacagatcagaacacgggtgctggctatgttcaagatcagttgtgacaaggacattgaagctggaggaaacacgtgacccttaccgttctatcacccttgtcctacatggcttaatataatgattaataattcatcacaccggcctaactccagtcacccaaaagcacattagtgctttaactgaatgggacagtgaactaaagtatggtttatcttcatcatggatacaatgtgaaatatctatcatgtgttttaaagcttgtgctataaaatgagacccattgataatactaaatgaaacaactaggatttgtgatttaaactaattgtttgtgatttgaatgagatatgttgaaattactagcaactttttttattccnacttcctttgttgtaaagctatctgtaatgtttaacttctgaattgtggaacatggagctgacagtatggtagccaagggtttcctcactcatttcaatgctattattcactacccaggaacatttatgagctctaaataatatggctcatgaatgtatcatgtaacgtgttccagtccctgcgttaagtacttttcagactttctgtgatcttgctcttttcccaaggaagataccattgttgcctgccacaacatgtgacaaagactttaatgagtaaagaaactttcttgaatgttctgtgccaagattttaaattaaattggataattgaatacatttgctttaccaccatgttatattgcttcctgtttaacatctgccatctatttcctctgcctattacaaatcctgctttctctctgccgtgtgctagcatggacgtctttgtgtttgtggtaagtgattaaccctgtcctggtggagggcaacaaactgttcagcatgacagagtagctgcttcttctcatatgaacagaggagatttaaattttttagtctcttacatatccttgattgtgtcctctttgtattgtgtcctgtagctgtcaaatctcttaaatgtataacataagatattgcctgattcttgacttaggtatcaaacaacataataatttatcttaaaatgttcagtattatttttactgttttaatgttcataagtaatgttgggagacatgagtgatttcccccagtcctctttaccaacagtgcaaagggcctgccaggtatgggttgcacaactataaagatgttgaatgaacttatgtagaatattccctttgtattgagtggatgatgaaaatgttcttagattagggtattaatgacacctacaaaataatgttaatatattcgatgtacgcataatgcttaaaatgctgagatttatgtagtatgtatctgccacaataaaaaatcatttaaaataaaaaaaaaaaaaaaaaa

SEQ ID NO: 1240 - DNA, 519 bp, Rattus norvegicus
  Genbank Accession No. AF079873
ctcattacggagatggttgctctcaacccagactttaaaccacctgcagattacaagcctccagcaacacgtgtgagcgataaagtaatgatcccccaagacgagtatccagaaatcaattttgtgggtctcctaattgggcccagagggaacaccctgaagaacattgagaaggaatgcaacgccaagatcatgatacggggaaagggatcagtaaaagaagggaaagttgggcgtaaagatggtcagatgttgccaggagaagatgaacctcttcatgctctagtcactgccaatacaatggagaatgtcaaaaaggcagtggaacagatcagaaacatcctgaagcagggtattgaaaccccagaggaccagaatgacctaaggaaaatgcagcttcgagagttagctcgcttgaatggcactctacgggaagatgataacaggatcttgagaccctggcagagctcagagacacgaagcattaccaacacgactgtgtgtactaagtgtggaggg

SEQ ID NO: 1241 - DNA, 7420 bp, Rattus norvegicus
  Genbank Accession No. AF084186
atggatccaagtggggtcaaagtgctggaaacagccgaggacatccaggagagacgacagcaggttctggatcggtaccaccgcttcaaggagctctctaccttgcggcggcagaaactggaggattcctatcgcttccagttttttcagagagatgctgaggagctggagaagtggattcaggagaagcttcaagttgcctctgatgagaactacaaagaccccaccaacttgcagggaaagctccagaaacaccaagcctttgaagctgaagtacaggccaactcaggagccattgtgaagctggatgagacaggaaacttgatgatttctgaagggcactttgcatctgagaccatccggacacgtttaatggagctgcaccgccagtgggagttgcttttggagaagatgcgggagaaaggaatcaaactgctgcaggcacagaagctggtgcagtatttgcgggagtgtgaggatgtaatggactggatcaatgacaaggaagcaattgtgacgtctgaggagctgggccaggatttggagcatgtagaggtactacagaagaagtttgaagagtttcaaactgatctggctgctcatgaagaaagagttaatgaagtaaaccagtttgctgccaaacttatccaggagcagcacccggaagaggagctgatcaagaccaagcaggaggaggtgaatgcagcttggcagcgactgaaaggcctggctcttcaaaggcaggggaagctctttggtgctgccgaggttcagcgctttaacagggatgtagatgagaccattggttggattaaggagaaagagcagttaatggcctctgatgactttggcagagacttagcaagtgttcaagctctgcttcggaagcatgagggtctggagagagatcttgctgctctagaggacaaggtgaaagccctgtgtgccgaggctgaccgcctgcaacagtcacaccctctgagtgccaaccagatccaggtgaagcgagaggaactaattaccaactgggagcagatccgaactctggccgcagagagacatgcacggcttgatgactcatacaggcttcagcgctttcttgctgacttccgtgacctcacgagctgggtgactgaaatgaaagccctcatcaatgcagacgagcttgccaatgacgtggctggtgctgaggccctgctggacaggcatcaagagcacaagggtgaaatcgatgctcatgaagatagctttaagtctgcagatgagtctgggcaggccctactcgctgctggtcactatgcctcagatgaagtgagggagaagctgagcatcctctctgaggagagagctgccctgctggagctgtgggagcttcggaggcagcagtatgagcagtgcatggacttgcagctcttctaccgagacactgagcaggtggacaactggatgagcaaacaggaggcattcctgctaaatgaagatttgggtgactccttagacagtgtggaagctcttttgaagaagcatgaggactttgagaaatctctcagtgcccaggaagaaaaaatcacagcacttgatgagtttgcaaccaagcttattcagaacaaccactacgcaatggaagatgtagccactcgacgagatgctctcctgagccgccgcaatgccctccatgagcgagccatgcatcgccgggcacagctggccgattccttccacctgcagcagttcttccgcgattccgatgagctcaaaagttgggtcaatgagaagatgaaaacggccactgatgaagcttacaaagatccgtccaacctgcaagggaaagtccaaaagcaccaggcttttgaggctgagctctcagccaaccagagccgtattgatgccctagagaaagctgggcaaaaactaatagatgtgaaccactatgccaaggaagaagtagcagctcggatgaatgaggtcatcagtttgtggaagaaacttctagaggccacagaactgaaaggagtcaagctccgagaagccaaccagcagcaacaatttaatcgcaatgttgaggacattgagttgtggctgtatgaagttgaaggtcacttggcttcagatgattatggtaaagacctcactaatgtccagaacctccagaagaagcatgctctgctagaggcagatgttgctgctcaccaggatcgaattgacggcatcacaattcaggcccgccagttccaagatgctggccatttcgatgccgaaaacattaaaaagaagcaagaggcccttgtagctcgctatgaggctctcaaggaacccatggtggcccggaagcagaagctggcagattctcttcgtctgcagcagctcttccgagatgtggaggatgaggaaacctggattcgagaaaaggagcctattgctgcgtccactaacagaggcaaagatcttattggagtccagaatctgctaaagaagcaccaagctttacaggcagaaattgctggccatgaacctcgcatcaaagcagtgacacaaaagggcaatgccatggtggaggaaggccattttgctgctgaggatgtgaaggccaaactgagtgagctcaaccagaagtgggaggcactgaaagccaaagcctcccagcggaggcaggatctggaggactcactacaggcccagcagtactttgccgacgccaatgaagctgagtcctggatgcgggagaaggagcccattgtgggcagtaccgactatgggaaggatgaagactctgctgaggctctgctcaagaagcatgaagctttgatgtccgatctcagtgcctacggcagcagcattcaagctttgcgagagcaggctcagtcatgccggcaacaagtggcccccatggatgatgagactggcaaggagctggtcttggctctctatgactatcaagagaagagccctcgtgaggtcaccatgaagaaaggggatatcctcaccttgctcaacagcacaaacaaggactggtggaaagtggaagtgaatgaccgtcagggttttgtgccagctgcgtatgtgaagaagctggaccccgcccagtcagcctcaagggagaacctcctggaagaacagggcagcattgctctgcggcaggggcagatcgacaaccagacacgcataactaaggaggccggcagtgtatctctgcgtatgaaacaggtggaagaactgtatcagtctctgctggagctgggtgagaagagaaaaggcatgttggagaagagttgcaagaagttcatgttgttccgggaagcgaacgagctacagcagtggatcaacgagaaggaagctgctctaacgagtgaagaggttggcgctgacttggagcaggtcgaggtgctgcagaagaagttcgatgacttccagaaggatctgaaagccaatgagtcccggctgaaggacattaacaaagtggccgaggacctggagtctgaaggtctcatggcggaagaagtgcaggccgtgcagcagcaggaggtgtatggtatgatgcccagggatgaagcagattccaagaccgcctccccatggaagtctgctcgactgatggtccacacagtggccaccttcaactccatcaaggagctgaatgagcgctggcggtccctgcaacagctggctgaggaacgtagccagctcctgggcagtgcacacgaagtacagaggttccacagggatgcggatgaaaccaaagaatggattgaggagaagaaccaggctctgaacacagacaactatggccatgatctagctagcgtccaggccctgcagcgcaaacacgaaggcttcgagagggaccttgcagctcttggtgacaaggtgaattcccttggggaaacagcccagaggctgatccagtcccaccctgaatctgcagaggacttaaaggaaaagtgcacagagttaaaccaggcctggaccagcctagggaagcgtgcagaccagcgcaaggccaaactgggtgactcccatgacctgcagcgcttccttagcgatttccgggacctcatgtcttggatcaatggaatacgagggttggtatcttcagatgaactggccaaggatgtcactggagctgaggctttgctggagcgacaccaggaacaccggacagaaattgatgccagggctggcactttccaggcatttgagcagtttgggcagcagctgttggctcatgggcactatgccagcccagagatcaaggagaaacttgatattcttgaccaggagcgcacagacctggagaaggcctgggttcagcgcagaatgatgctggaccactgcctggagttgcagctgttccatcgagactgtgagcaagcagagaactggatggctgcccgggaagccttcctaaacacagaagacaaaggagactcgctggacagtgtggaggctctgatcaaaaaacatgaagacttcgacaaagctatcaatgtccaggaggagaagatagctgccctgcaggcctttgccgaccagctcattgctgtggaccactatgccaagggagacattgcaaaccgacgcaatgaggtcctggacaggtggcgccgcctaaaagcccagatgattgagaaaaggtcaaagctcggagaatctcaaacacttcagcagttcagccgggatgtagatgagattgaagcctggatcagtgagaagttacaaacagccagcgatgagtcatacaaggaccccaccaacatccagagcaagcaccagaagcaccaagcctttgaggcagaactgcacgccaatgctgaccgaatccgtggagttattgacatgggcaactccctcattgagcgtggggcctgtgctggcagtgaggatgctgtcaaggcccgcctggctgcccttgcagaccagtggcagttcctggtgcagaagtcagctgagaagagccagaagctgaaagaggccaataagcagcagaacttcaacaccgggatcaaagactttgacttctggctttctgaggtggaggctctcctggcatctgaagactacggcaaagacctggcttccgtgaacaacctgctcaaaaagcatcagctgctggaggcagacatatcggcccacgaggatcgtctgaaggacctgaacagccaggctgacagcctgatgactagcagtgccttcgacacctcccaagtgaaagagaagcgggacaccatcaatggacgctttcagaagatcaagagcatggcaacctcccgaagagcaaaactgagcgagtcccatcgcctgcaccagtttttccgagacatggatgacgaggagtcctggatcaaggagaagaagttgttagtgagctctgaggactatggcagagacctcactggtgttcaaaatctgaggaagaaacacaagcggctagaagccgaactggccgcacacgaaccagccattcagggtgtcctggacacggggaagaagctgtctgatgacaacaccatcgggcaggaggagatccagcagcgtctcgcacagtttgtggagcactggaaggaactgaaacagctagcagctgcacggggccagcggctggaggagtccttggagtatcagcagtttgtggccaacgtggaggaggaggaggcttggatcaatgagaagatgaccctggtggccagcgaagactacggggacactcttgctgccatccagggcttactgaagaaacatgaagcttttgagacagacttcactgtccacaaggatcgagtgaatgatgtctgtactaatggacaagacctcattaagaagaacaatcaccatgaggagaacatctcttcaaagatgaagggtctgaatggtaaagtgtctgacctggagaaagcagcagctcagaggaaagcgaagctggatgagaactcggccttccttcagttcaattggaaggctgacgtggtggagtcctggattggtgaaaaggagaacagcttgaaaacagatgattatggccgagatctgtcttctgtccaaactctgctcaccaagcaggagacatttgatgctggcctgcaggccttccagcaggagggcattgccaatatcactgccctcaaagaccagctgctagctgccaagcacattcagtcgaaggccatcgaggcccgacatgcctccctcatgaagaggtggacccagctgttggccaattcagctacccgcaagaagaagttgctagaggcccagagtcatttccgaaaggtagaagacctcttcctgacctttgccaaaaaggcatcggctttcaacagctggtttgagaatgcagaagaggacctcacagacccagtgcgctgcaactctctggaagaaatcaaagccctccgagaggctcatgatgccttccgctcatcgctcagctctgcgcaggccgacttcaaccagctagccgagctggaccgtcagatcaagagtttccgagtggcctccaatccctacacctggttcaccatggaggccctggaagagacgtggaggaacctacagaagatcattaaggagcgagaactggagctgcagaaggaacagcggcggcaggaggagaatgacaagctacgccaagagtttgcccagcatgccaacgcgttccaccagtggatccaggaaacaagaacgtatctcctcgacgggtcctgcatggtcgaagagtcgggaactctggaatctcagcttgaagctaccaaacgcaagcaccaggagattcgggccatgagaagtcagctgaagaagattgaggacctgggggctgccatggaggaagccctcatcctggacaacaagtacactgagcacagcactgtgggcctggcccagcagtgggaccagttagaccagctgggcatgcgcatgcagcacaacctggagcagcagatccaggccaggaacacaacaggagtcactgaggaggccctcaaggagttcagcatgatgttcaaacacttcgacaaggacaagtctggccggctgaatcatcaagagttcaaatcctgccttcgttctctgggttacgacctgccaatggttgaggaaggagagcctgatcctgagtttgaggccatactggacactgttgatcccaacagggacggccacgtctccctgcaagagtacatggctttcatgatcagccgtgaaaccgagaatgtcaagtccagtgaagagatcgagagtgctttccgggccctcagctccgagggcaagccttatgtgaccaaggaggagctctaccagaacctgacccgggaacaagctgactactgtgtctcccacatgaagccctatgtggatggcaagggccgcgaacttccaactgccttcgactacgtggagttcacccgctctctctttgtgaattgat

SEQ ID NO: 1242 - DNA, 345 bp, Rattus norvegicus
  Genbank Accession No. AF087437
gcagtaaaaagttcacatggtactcctgttgttgccatccctctgtaaatagtgaatgtttcttactagttctgcactgcttctgtctgtcttaatgctggcgttaagatcatatactccttttctccggtagtgcaggttttgaaaattacttttaagttattgatgcaatttcatattttttcataatctatatttaagatgacatcattgcatcattttttctaaattcatctccattaaaacttgccttaagctaccagattgctttgctattagctttactgtacatctgtatgttttatttactttcacattaaaattctgtgtagtgaaaaaaaaaaa

SEQ ID NO: 1243 - DNA, 708 bp, Rattus norvegicus
  Genbank Accession No. AF087697
atgccagtgctatcagaagactcgggtttgcatgagaccctggcactcctcacctctcagctcaggcctgactccaaccacagggaggagatgggcttcctgagggatgtcttcagtgagaagagcctcggttacttaatgaagattcacgagaaactccgctattatgagaggcagagtccgaccccggtcctacacagcgccatggcccttgctgaggatgtgatggaggaactgcaggctgcctcggtgcacagcgatgaacgggagctgctacagctgctgtccaccccccacctcagggctgtgctcatggtacacgacacagttgcccagaagaacttcgatcctgttctgccccctctgcctgataatatcgacgaggattttgaagaggaatcagtgaagattgttcgccttgtcaagaataaggagcccctgggtgccactatccgaagggatgagcattcgggggctgtcgtggtggccaggatcatgcgagggggtgcggcggatcggagcggtctggtccacgttggtgacgagctccgggaggtgaatgggatcaccgtcctgcacaaacgtccagacgagatcagccaaattctggcccaatcccagggatccatcaccctcaagatcatccctgccacccaggaggaagaccgcttcaaagagagcaaggtgttcatgcgtgccctcttctag

SEQ ID NO: 1244 - DNA, 1147 bp, Rattus norvegicus
  Genbank Accession No. AF087839
gcagaaagtagtcatgacagcctttgcggatcgcacggttgtaaccatagctgtaagtgacatgcatggggtggggtggggtcggggtcgggtgtggggtcactcattcttctgtagtgagcttcaagtctgagaaggtaaaacatacttgtgttgattgtgtatttctttcttgtttcacattatatatattttcaatgacatcatctgaaatataaggacaccagctgatcacatgctaagtgtctgggctaatgtttggaaggaacatttcagaaagaacgctcctaagttccattaccaatttagctaatattcatgtacattttccctatttctatcatttaaagtagaagacagtgggagacctgacagccggggaaggtgatatccgtacatccaatagcaatcaggtccttgagtcaattagccccttgtcgaatttcttgcttgtaagggcattagttttctgtcccttcctcttgatctttgttatcattgccacccaccgaagactctatttcgtgatacacttgtccattcttcctgctcattctcttctctctccacctctctctcctccagcaccgtgtctcctctattatggatgcgggccttgttttagtcttttctgagggtattttagtggagtgcgatactggtccaaacctgctccagcacaagaatggcctcttttctactttggtgatgaccaacaagtagaccagcaagatctgctcctccaagtgtctcgttctctggtagttgtcatagcagaatctgctgagtaaggcagagaggaggcttcgattagagggagggctgggggaggaactaaccccgggtctaactgcacaagtcagctcacccaagtgcttgcattgtgtggcctcttatgttttcaaagacagcatgtaggaagcaaaaccaggctcacctgtggcctaaggacaagttaatctgaggctgttttctagtcacccttaaaatttctgtgtgttacctgcccaaagatggatttcagggattactgagtgtaactgcggagagccctgtgctttgagggacacttgctactcttggaagaaagaccactctttgaagtgcatctttctcaagctccagagagcgatttcccatgggcccc

SEQ ID NO: 1245 - DNA, 669 bp, Rattus norvegicus
  Genbank Accession No. AF091563
  misc_feature (1)..(669): n = a or c or g or t
ggcaacatgtctctcctggagattggctatactttttctgtcatacccaagatgctgcagagccttgtgagtgaggcccgagggatctctcgggagggatgtgccacacagatgtttttcttcacactttttggtataagtgagtgctgcctattggcggccatggcctttgaccgctgtatagccatatgctccccactccactatgcaacccgaatgagtcgtggggtatgtgcccatttggcaattgtttcatggggaacaggttgcattgtggggttgggacaaaccaattttattttctccttaaacttttgtgggccctgtgagatagaccacttcttctgtgaccctttccaacttttcctgggcacttgcctgtgggagatacatcccaaaacggaggctgccatctttgtggtagcaatcctctgtatatctagtccgtttttactgatcatttattcttatgtcagaattctggtcgcagtgctcgtgatgccttcacctgaggggcgccataaagctttttccacctgttcgtcccacctacttgtagtcacactcttctatggctcaggatccattaactacttgaggcccaaatctagccattcaccaggaattgatagactcttggctctcttntacacagcagtgacatccatg

SEQ ID NO: 1246 - DNA, 663 bp, Rattus norvegicus
  Genbank Accession No. AF091570
ggcaatatgtccttctctgacctctgcttttcctctgttacgatgcccaagttgttgcagaacatgcagagccaagttccatccatcccctatgtaggctgcctgtcacaaatatacttctttctgttttttggagacctcgggaacttcctgcttgtggccatggcctatgaccgctatgtggccacctgcttcccccttcattacatgagcatcatgagccccaagctctgtgtgagtctggtggtgctgtcctgggtgcggactaccttccatgccatgctgcacaccctgctccatggccagattgtcattctgtgaggacaatgtgatccccactttttctgtgacatgtctgctctgctaaagctggcctgctctgacacccgtgttaatgaggttgtgatatttattgtggtcagcctctttcttgtccttccatttgccctcattatcatgtcctatgtaagaattgtgtcttccattctcaaggtcccttcttctcaaggtatttacaaagccttttccacatgtggatctcacctgtctgtagtgtcactgttctatgggacagtcattggtctctatttatgtccttccagtaataattctactgtgaaggagactgtcatgtctttgatgtacacagcggtgactcccatg

SEQ ID NO: 1247 - DNA, 2304 bp, Rattus norvegicus
  Genbank Accession No. AF093139
attccatcctaatacgactcactatagggctcgagcggccgcccgggcaggtccaaggcgtccgggtgtttggtggcgtcaggttctgcgcctgagcccgcccctgtacctgcctgtgccatggcggacgaagggaagtcatacaacgaacatgatgaccgtgttagtttcccacaaagaagaaagaaaggtcgggggcctttccgatggaagtgtggtgtggggaatcgtaggtctggaagaggtggttctggtatacggtcttcccggtttgaggaagatgatggagatgtggcaatgaatgatccccaggatggcccccgagtgagattcaacccctataccacccgacctaaccgtcggagagatacttggcatgatcgagatcggattcatgttactgtacggagagacagagctcctcaagaaagaggaggtgctggcaccagtcaagatgggaccaccaagaactggttcaagattacaattccttatggcaaaaagtatgataaaatgtggcttctgagcatgattcaaagcaagtgcagtgtccccttcaaccccattgagtttcactatgaaaatacacgggcccatttttttgtggaaaatgccactaccgcttctgcattaaaggctgtcaactataagattcaggatcgagaaaacggaaggatatctatcatcatcaactcttctgctccaccctatattgtacagaatgaactgaagcctgaacaagtagagcagctcaagctgatcatgagcaaacgatatgatggctcccagcaagcacttgacctcaagggcctccgctcagacccagatttggtggcccagaacatcgatgttgttctaaaccgtagaggctgtatggcagccgccctgaggatcattgaagagaacattcctgagctattgtctttgaacttgagtaacaacaggctgtacaagcttgatgacatgtccagcattgtacagaaggcaccaaacttaaagatcctgaatctctctggaaacgaattgaagtccgagtgggaattagacaagataaaagggctgaagctggaagagctgtggcttgacagaaaccccatgtgtgacaccttcctagaccagtccacctatatcagcaccattcgcgaacgatttcccaagttattacgcctggatggccatgagctaccccctccaattgcctttgatgtcgaagcccctactatgttaccaccctgcaagggaagctattttggaacagagaacctaaagagtctggtcctgcacttcttgcagcagtactatgcaatttatgactcaggagaccgccagggtcttctggatgcctaccatgatggcgcctgttgctcgctaagcactccttccaaccctcagaaccctgtccgacacaacttagccaaatacttcaatgacagcagaaatgtgaagaagattaaagataccaccacgcggttccggctattaaagcatacacgtcttaatgtcgttgccttcctcaatgagttacctaaaactcaccatgacgttaactcctttgtggtagatataagtgcccaaacaagcacattgttgtgtttttctgtcaatggagtcttcaaggaagtggacgggaagtctcgagattctttacgtgctttcacgagaacgttcattgctgttcctgccagcaattcagggctatgtattgtaaatgacgaattatttgtgcggaacgccagccctgaagaaatccaaagagccttcgccatgcctgcacccacaccttcttccagcccagtacccacactctcccaagaacagcaggatatgttacaagcattttctacccagtctggcatgaacctcgagtggtctcagaagtgccttcaagacaataactgggactacaccagatctgcccaggccttcactcatctcaaggccaagggagagattccagaagtagcgtttatgaaatgatctcaagaaaagtccccttgtaaatagcccttggataatattgtctggctgtcatctgcggactcctgtccagcccgaggccacmctgtaactgtgactggggaggaagggctgcytcatccktcctcacctaccttctggaagmcttagcagaagacttccggaagattgagcctctatggtgccaggaagccaaagcttactttgtagagctdgacrctaaattaccggaaggacttaggtgctctgtgtacttaaccccagsattccctttactttttaagataaagagtgatattgtagtgtgtgtcccaaaaaaaaaaaaaa

SEQ ID NO: 1248 - DNA, 931 bp, Rattus norvegicus
  Genbank Accession No. AF099093
  misc_feature (1)..(931): n = a or c or g or t
agctccaccgcggtgngccgctctagaactagtggatccccgggctncaggaattcctttcccttccgggcgtgacgcctgagaggaaagccgagcggagatctcgcataggcagcgaggtgcttctcgggtctcccaagaccggcctcccgcggcttcggcgctccagtcgcggggcccgggttcctcaacacacntagcttcagccaccgtcagagcttgtcccccatccgtcgaagtcccggcggcaccgggcttcttggtggggaggatgacggagctgcagtcggcactgctactgcgaagacagctggcagaactcaacaaaaatccagtggaaggcttttcagcaggtttaatagacgacaatgatctctatcgttgggaagtccttattattggtcctccagatacactttatgaaggtggtgtttttaaggctcatctcactttcccaaaagattatcccctccgacctcctaaaatgaaattcattacagagatttggcacccaaatgttgataaaaatggtgatgtttgcatttctattcttcatgaacctggagaggataaatatggttatgagaagccagaggaacgctggctgcctatccatactgtggaaaccatcatgattagtgtcatttctatgctggcagatcctaatggagactcacctgcaaatgtagatgctgcgaaagaatggagggaagacagaaatggagaatttaaaaggaaagttgcccgctgtgtaagaaaaagccaagaaactgcttttgagtgatgtttattcaatagctagtaacttcacttatttcagggtctccaattgagaaacatggcactgtttttycttgcacctctacccaccttattgctgggacttctgttgtaacaagttggcaaactctggctggaactgggctgcaat

SEQ ID NO: 1249 - DNA, 553 bp, Rattus norvegicus
  Genbank Accession No. AI007645
aacttcaaagatatttattcatatgtgtctgagtgtacacgttcatgttcatgcaccatatgtacacagaaactcgcagacatttaaaaaaggggggagggttgaatgccccgggactagagttacagacagttgtgagccaccatgtgggtgttgggaaccgaacccaggttctctgcaagggcagccactactcttaattgctcagccatctctttaggtcctattagaatttttaaattggactcttcttcagttaatcttgaactcattagcaacaaacatattaatccataggaatctggtgagtttacttctgttagtctatcattttgttttgctttctcccaataatacagatgctccttcctgagaatttcctaaaatccctatctctttgcaaagttaccttttccatctcttattccttcttgcccatgtggcatttgtgagtgatcaatttaccaggtaaaataacctagtccataatgttacctaaaatgggtcacaggcaactagatggctttaagcactgagacacatgaagaaatgg

SEQ ID NO: 1250 - DNA, 442 bp, Rattus norvegicus
  Genbank Accession No. AI007656
ccaaagtagaaatttcaacaattacacagtaacaaattccgaaatatctggggccagtgagaaggctcagtgagtaaaagtacacgctgtggaatgagagaacttgttttctgaattccacatgtacccgcattcacatcatacacgtatttaataataaaattacatgtatgcatgtatataacctatgctttaatccactcactcacaggagtcatttctcagtatatgtacatatgtgtgtgtaggttatattggtgagtgcaagaggccagaggagttggacccaggagctcaagttacaaacagttgtgaactgcttgacatggatgctaggaattgaacttaagtactctctgaagagcagtgcatgctcttaaccaagaagccatctctccagtccctaaggctgttttaaacacctcattaggttttctacatg

SEQ ID NO: 1251 - DNA, 564 bp, Rattus norvegicus
  Genbank Accession No. AI007666
cggctgctggagggaggatggggtgatgcaccgccgggtggtgcgcggcgtgcgcggcggctgcagggtgcgccgtggcggtgggtagaggcgtcgagtgtgccagcccgccacaggccgacgggtggaagccggcgtggtgacccccgtaaatctcgctcaccagtctcttcatctcctccagcgagttggtgagcatcaggatgtagtttcgcgccagcagcagcgtggcgatcttggagagcttgcgcaccgacgggccgtgcgcgtacggcatgacctccctcaggccgtccatggcgatgttgaggtcgtgcatgcgcttgcgctcgcggctgttgatcttcaggcgcagctgctgcagctcgggctcagtcatctgcttcttatctttcttggtggaagacgtggccgccgacgacgtggacgaggaggtgctggaggaagatgacttgaagccaccgccgcccagtttgtccccgggatgcgcgcccgccgtgcccatggctcctcgcagctcggagctcaactctggcgggcagtcgctcggcgtggatgaggaca

SEQ ID NO: 1252 - DNA, 537 bp, Rattus norvegicus
  Genbank Accession No. AI007668
  misc_feature (1)..(537): n = a or c or g or t
gacaaggtgaaaagcagcctttaattgtggtgaatttacacatacaaaatacaccctccatgacgagttaccaactctttaaaaaacaagactctttacaattaataatttatagaaaagcattattctttagaaattatacttgctatacattattgttttctaaacattggcataaaatgaaggctaagaatgctacttggcaaaagtacttctagccctatgttcatggaaagttttaaataaaggtcaagactattactgtgctctagctgcttgtggaaggtcaaaaaacacagctaagctatctgcaatcatgggttggagctgacctaatgtgcaagggctcaagccatctacctggtgaggactgtgggaaaggacttggcaggttccacctcctgactggaatgttaccaaatgtttccaggcttcanagggctcatgttgacaagtacaacttcccacctacagctccttaattgctacctgtataagaggcagagagaagctttggaatccttcaatcccaccagt

SEQ ID NO: 1253 - DNA, 239 bp, Rattus norvegicus
  Genbank Accession No. AI007672
aagctaaaattgcacctcactaataggaataagcttgcggccgctagagattttttttttttttttttttttttgaataaataagcattaagtttattgaatcatgaataatttaagactggtacaatcgtcagatttattctctatgacatggggcagatctccagcagattgttctcaaacccaaaaacctgatgacacatgagaattaaatagggagagggaggggtggggggcag

SEQ ID NO: 1254 - DNA, 398 bp, Rattus norvegicus
  Genbank Accession No. AI007808
catgcactaggaaaaatgggtcatatgaaacactgttcttcatagcaaagaccttgtctagaacgtaacacaggaggcgagctgggaactgggtctggtcaaagacctggaaaccccaaagaaggtgccatctccagggctagtgacagtcccagcaccttccaactccagcagcctccaactgtagacggttcagggcagctgcccctcacatgggggtacaagggagttggtaacaaaggaacacgtggactggggaggaaccggaggctgatgagtggtggtccagcccctcagggcaagcctccagggccatgaacgagcccaagtcctgctctgcccagcacagaccaactgctccatggggctttcctccgggaactcataaggggcgctac

SEQ ID NO: 1255 - DNA, 577 bp, Rattus norvegicus
  Genbank Accession No. AI007820
accctcactataaggactaagcttgcggacgctaaagtttttttttttttttttttttttttttattttgcatacttttaatttcagaacaaaataaaacaaacaaaaaaacacaatacacaacacccaaccctgctattctgtgggaggggatcttcctgccttaaggcacaaggacaggatagaagagattcttgtagacatgagcagagagccaggtgggtcagggccagtcaaggctgttgggggagccacagggatactatacagagggcgggggcttcccaggagcctttaatccacttcttccatgcgagaggcatcctcatcaccctccagtggggggatctcatcgggaacagcagcactgggctcttctgcagtgacctcatcttcatcaatgcccaggcctagtttaatcatgcggtagatgcggttggagtgggtttgggggtcctcaagtgagaagcagaggagagcagagcattctcaaacagcagcaccaccaggtctttgacagctttgtcctttttgtctgcctcagccttctgccgcaaagtctccacaatggggtggg

SEQ ID NO: 1256 - DNA, 519 bp, Rattus norvegicus
  Genbank Accession No. AI007821
cctcacttaagggaataagcttgcggccgctaaagttttttttttttttttttttttttttttttttggttcttcagaccatctttatttttgtaacatctttcataaaaaaatctatacagataagcatgtttctagatctgaaaattcatttattttgtgtaatagacttagattgccattatagcaaattcctatgtccatcagcacttcatttagggaagtgttcacaaacatcttttccagaatttggggtcagctctgacattgggaatatcactcccatgctgagaaggagttgaagcaatcctggaaggcataactgccatgccctctactccattgtacaggagatgataaatactacttttattgaagcaatagtagatctggctgaggatcataaccccagtctattgccatccataaataccatccactatctcttatgataaatgttattattttattaatatattaacacagaaacttgagtttctagtactcaaatcaacactt

SEQ ID NO: 1257 - DNA, 569 bp, Rattus norvegicus
  Genbank Accession No. AI007824
cctcactatagggaataagcttgcggacgctaaagttttttttttttttttttttttttttttttagtattactttgacttgtgagtctaggttaaaatcattcggaggattttttattctccgaggtcaccccaaccgaaattttttagttcatatttattttgttttagcccattaggttgtttttatataagttgaactagtaaattgaagctccatagggtcttctcgtcttattgggagattccagcctcttcactggaaggtcaatttcactgattgaaagtaagagacagttgaaccctcgtttagccattcattctagtccctaattaaggaacaagtgattatgctacctttgcacggtcaggataccgcggccgtttaactttagtcactgggcaggcaatgcctctaatacttgttatgctagaggtgatgtttttggtaaacaggcggggttcgtgtttgccgagttccttttactttttttaatctttccttaaagcacgcctgtgttgggctaacgagttagggataagtaattttattgttgggttagtaccta

SEQ ID NO: 1258 - DNA, 545 bp, Rattus norvegicus
  Genbank Accession No. AI007857
ctcactaaatagaataagcttgcggccgctagagtattttttttttttttttttttttttttttttaattttgaaatacattttattttcactgttctgcactggagagatgacatccaaggagtaggggagacagagatgcctgaaacttctacccttgctgtgcatgggtcacatcgttcttctgggtaccagggccatgcctggacaccacacagttcacatcggactctgggccaggctaaccatccccacagcagtcacctctggcaggccccgacacagctgggcattctccagaaaaggtcctacttgtcctgcagagtcccagtcccgggaaggtcggactgcatcaggaccaaagcagggaaccagtgacaggagccagaccactgaggacagggaggagggccaagggtgaaggcccaccccttgctcacagaagggacactacagggcagtaatgggaggaaatggctagttagacatataagtggtttctggagaactgtactgttactctggatggtgagcgccagactcaa

SEQ ID NO: 1259 - DNA, 533 bp, Rattus norvegicus
  Genbank Accession No. AI007875
caaacaaagtctcctttattaaactcatctgtgtgcacacgtgtgcacccaggcctgtgcatacatgtgcataagtgtatgcatgcgcatacacaggtgtacattcaggcctggggcaccaccccatagagctggtgggggagtaacttctgcttctcattacaactgtagatccagcggggccggacgaaggccagggaaggattttccatcagggcctcctcaaagttgggatcccactcctgggccgtgatgacaaactggacccggtcgctcatgtagtcctcgagctcaccattgaaagctgtcacatatcggatgagcttcctcctctcatccccagggaactcgccgtacaggaagaagtgcttgccctggaagaagtctgggagctctggaattggcaggtcagcctctgagggagcctcgctgtctgtgttctcatctgtggagcctgcatacgggtcctcgccattctcctctggggctgggggctgcctttgctccctctgcttggccaccctcctcagttc

SEQ ID NO: 1260 - DNA, 570 bp, Rattus norvegicus
  Genbank Accession No. AI007881
aacaagcataataacctttacaacctcttttcttcgaggttttactatagcacttctaacacaccccggggcagcacaaaattctgcacagcacacacccaacagctggttttgtgatgtctgcggggcgagggagaaggctgaaaacagatcagaacagtgcgggaggaagtccactgccaaagagcagccgccaagagctggggatcttccatggcaagacagaggccacggggccgtcactacatgggttgattatctgaagccattcattaagatactccacaaggctgactgcatctgggatattgtccccttctgaaacaaatttcagcagaactgccatttggatttctttacaacagctttcctcatagagtgtttttgtgattccacctccgggaatgcgaatgcagaactcagaatcactcatctcggggatgcaccgactcttttccatttctagccagtttaggctctttagtttattttgagcactcttttgcaaacaaggtgtaagaatataccgatagggagtactgcggagttgtacatcagtacggtgatatg

SEQ ID NO: 1261 - DNA, 605 bp, Rattus norvegicus
  Genbank Accession No. AI007884
accaagaatagcttttattaagacctccattagaaaacgtcagacttttaacaatactccggaatagaagatgaggaaggggaataaccatgaactcagcagcgtgtagtgcacggatttggctcattaaacccgtcattcctagaattcatagcaaaagacggcgattgctacgagtggtgggtgaaacaggagtgctgtgtttctggatactgtgcacgtcacaatacttagatgtcctgggtgacctctgaagagaagcatcaaccagtgattccaactgtacaagagacgcgcacttggaaaccttgtgactgtgagaaacatatttatacctgtcttagtgggatccagagaaacaacacgttatatataattaaaatggagaaataatagtttctcctggtgtaaaggtacatttggaatttcaaaataaataatagttctaagggaaagttgttctatttttcaaaataagataaggctgaaaagtccttatgatggatttcacatttgctttcacttttactgttaggtacagctacgaaaccaagccacacgggctcggggctgtctgcccagttaggggagccacccagacagca

SEQ ID NO: 1262 - DNA, 510 bp, Rattus norvegicus
  Genbank Accession No. AI007920
acaaactttattcaatatcctgtatttaaagtacgaatatatatgtatatacatatacatacatatatacatacatacatatatattgtacctcagaccatagcattctgctcagcttaggaagtggctttaaagaggtgttctgactccatgctgggctcccacggggacttgtttggggcaggtaccactgagtacaaagtcaccagttatcatggtagtggatgacatgggagtacttaaaggtccctggcaatgactggctttgtgacatgggtccagatcttggacaaggggctggccagcacaccgtgagagtacatggctccatctgctggccatccttcaactcacacaggatgtcagcgatgagtctggaaaagatctgaaagtctgtggtcagtctgggcctggacctgaagcacctatcttcagcattggacacgcaattcttccctgtctgaacaccacagacgtgattttatcgttaggaccccgactgctactgca

SEQ ID NO: 1263 - DNA, 508 bp, Rattus norvegicus
  Genbank Accession No. AI007942
  misc_feature (1)..(508): n = a or c or g or t
tgtcacaagtctcaagtttttattttcagaacagagtctggttttatttttaaaaagaggggggaatgtgatgaatgctgtgaggtgctgcttctctctctcttctgggctctaatccccagccctgcacccccatacccggctacttcccagggcatgtttaacaagaatagtcttagttggatgaagcagaggctaaagagggttcctaaaccccaaaattctaagccagccctgggaggcactgactcaaagaaatttttagaaggaggggtacaagcctttagagagagaacagactgaataagacttaagggttgggggtgtcgctcagcaggctgaccagtgtttgccaagcatgcttgaggcatgggttaagtcctcagcactacaaagtaatcaacttgtgtttaaaagacaggtaccatttgacgcccaggtactaggccctctgcttccttgctcagaggctangagtcgacaaggctaaattctgagcctagacttc

SEQ ID NO: 1264 - DNA, 434 bp, Rattus norvegicus
  Genbank Accession No. AI007981
cacatgaacaatttacatttatttgttgacagccgtagtcaaatgcacttcaaacacagcacatggtagagtctgtttgcacggtggagccactgcttgccaacgcactggtggttcatgagagtaacttgaggttcatcctcaggctgaggccccagctccaggctgacagctgacaggtgcctgtcccttctggacggaaggcgcagggagttactcctgtttctcgtacttgtgctttatgtgtttccacagtttcccctcgttgatgaatcgtagaccgcgtctgcaccctgatcgaaggcgcgctcgaagaacagggcgctcactgcgatggtgagggcgaaggtagaagtcctgcggaacagcaaggagtacaaacgcgaagtgaccgtcggcgacgccatgttgcctcgctgacgaaccctcgtgcc

SEQ ID NO: 1265 - DNA, 605 bp, Rattus norvegicus
  Genbank Accession No. AI008020
cgcaattgtttttttttttttttttttttttacaatgttattcatatctctaggctttaataaatctttgcataggtaaatacattcatttacaactacctgacaacatagaaacagacaagaaaagatagatcttttgactctcccccagataactaccctgaggaaacccttagtgagagtcaccattagaacgactacactgtaagtcacgcctgaaagagtccgtgtcttccccttcacggggtcactttatagagctgcccttggtaaaacccacacaagctttaaaggacttcaaaaccaggagtgtgtcgagatagacagagtgttctccaacctgagcttaggaattaaggctatttctagtcatgccgttatcaacttgtccaataaattaatacaacctgggaaaggctgactttttctcacagaatagttttagtaattaacatattttaatatgtgatagaaaggtaggcgtttgagatgtatttactcaggccctgagctctcagtcatctaagctaagcccagggacattagggcaggtgaccctcatggagcccgagcttgtctgggaaccatggtcttgccctcgtgcc

SEQ ID NO: 1266 - DNA, 489 bp, Rattus norvegicus
  Genbank Accession No. AI008066
  misc_feature (1)..(489): n = a or c or g or t
caagtttgcggatgagtttattgaggtggaatctctgctaacttcacagaagagaagctacttgccaaaatcaaggaggttctcaagaacttcctacgttagaaacaaatgttcaaaagcacagcaagctgttccgattcccagtgacgaggctgaggcaagcgactctgcatgtttacttcaagcttttgaagagtttgtgggccacacagtgatcccgtgcatgcaggaagtcaaagagctcctctgtacaatcctcttctgtctgtgatcgggaagacacgcgcctatcacacgactctagtcgttcccgggcttttacacacttctccaactgctcacagtgctctctcactgttgtcagggggtccactaattcttcctcttcttcctctttggggtctccggagccagtgagcatctttcgttcatcctctagtcncatggcggagccggtttgggattcancaccaagagcaacacctcgtg

SEQ ID NO: 1267 - DNA, 493 bp, Rattus norvegicus
  Genbank Accession No. AI008074
gccgctgtcatcctcctcatcagatcccacatcctcaatcttaggcttctcctcatcctccttatcttcctcctccttctcccctttctcttcctctgcctcatcatcactgatctccttctcgcgttccttctccagatagagggtgatggggtagcctatgaactgtgagtgtttcttcaccacctccttgaccctcctctcctctaagtactctgtctggtcttctttgaggtgaaggatcactttggtaccccggccaatgggctcaccgtggtctgcacggacagtgaaggatccaccagcagaagactcccaggcatactgctcatcatcgttgtgcttcgtgatcacaaccactttctctgccaccaggtaggcagagtagaagccgacaccaaactgcccaatcatggagatgtctgcaccagcctggagagcctccatgaacgcctttgtaccagacttagcaatggttcccaagttatttatg

SEQ ID NO: 1268 - DNA, 496 bp, Rattus norvegicus
  Genbank Accession No. AI008160
  misc_feature (1)..(496): n = a or c or g or t
aaaagcaaaatgagaactttattgatctgaaactaaagggaggctctccatttcttggcaggacttgcgatggaaaatattttcccatctttctctagtttcctcaagtgaagcaagagattatgctccgccatcttatgtaaattctctggaacgttcttgtaaatcattttcctaagttcgctcactgagaatgattcctcaaggttatcacggaatacggtgataatttgttcttctcggttatttcggtgagaaatatattccagaattttagcttcggcattatggatcactgggccatgtcctggatatataatgttggctttgacttttagtaagtcttttagggagttcatgtaatcagagaggtcttcaaatatcgttgtcccttctcctaggatgcagtcnccagaaaagatggcattttcctcttccaggagtaaagccatgtgatcatcagtgtggccaggagtgtataagactctgagcgtgg

SEQ ID NO: 1269 - DNA, 438 bp, Rattus norvegicus
  Genbank Accession No. AI008205
caagtaacaaaacctatgaagtcctgtgtttcaatggacagtgatagaacactctgcaatacaaaatacagtgtacagaaatttctacaaagtaaacctaaagaaacacacttgatttttatgcttgtgcatttaagttagaaaattttactttacatttaaaaaaaaaaaaaccttcacatattattagatgttgaaactgacactttcatgtaatttaccctactgtttatttggtttacaatagcaagtatcccaaattgctattttcccatttcttttcaacttaaaacatgtgctataaagtgaaaaaaatctgtagtgatgtacagtgtggagtgaaataagacaccgaagaacaaacgaagctaattctctatctgaaaaagtaagtttatgaaaatataaaaggaactaccaaacatatttgcagtcagg

SEQ ID NO: 1270 - DNA, 237 bp, Rattus norvegicus
  Genbank Accession No. AI008258
aaaagaacaatctccgtttattaaacatgatttttctgtttcaccacacactccagaaaaaaaaagggaaatggacccgggagtgggagaaaagagggggtgtggggggatgggggtggggaccaagagtctgggagcaggagcagaaaggagaacgagtatacaaacagcataaaaaatgagtaagaagatcttctccctactcttaaggtggagggtggggaaggaaatgagggg

SEQ ID NO: 1271 - DNA, 234 bp, Rattus norvegicus
  Genbank Accession No. AI008309
aagacaaaaggtttttttattcaaaaaatgccaagtataaaaaaaaaaataagatctcttttattcccctgtacagtatctctcagagaaaaaccagcgggctacacgctgctcaaagcacaaccccagagaggatccggaaggcacaccacaccggaactgcctttctgtcttaggtagcgaatccactctggaggactgtacactcgggttccgtcaaagtccgtgtagact

SEQ ID NO: 1272 - DNA, 545 bp, Rattus norvegicus
  Genbank Accession No. AI008380
aagggtctgagggcatgtgaaaatacagcgcaccaatgaaacaaaatgtcaaaaaaaatacaaaaaaatataaaatagaaaaatgtatttacaggtagtctgttactatgatcagaaagcacaaagactgctataatacatgcactggttcaagaggcggttactaaaaactgtgaggaagaagcctgtaaaaagaaaagggtcaaaaagttcaaacttttcatccctaattttgctacactgatcaaaagaaggagcccccacagcccacgagtatcagttcaacgcgcccacagcttacaactgcacgtgactcacacaggagacggcagcttatgcgaggaagccacggtaaactgttctacatgctcaaatgacagcaagcccgtctgctacacggcatgatcttagcaggtttagtggctgtttactcataggtatctatgtgcacgtatatatatatatatatgtacgtatgtataaaaccgtgtcctgctcactgccaacacggttggacacagtcattacagcagattcttaggtgt

SEQ ID NO: 1273 - DNA, 539 bp, Rattus norvegicus
  Genbank Accession No. AI008396
aagctttaaagagctcgttatagtacagtgcagtggttacaagttaaagacacaacacggtgctgcagagtctgtctctcacgaaccctgtgcaggaccctgagcactgttctttgaagccagcgactttgggctaccacccacgttcagtgccttctcactggacagcaagcctactcaaataagcttcccaggcagcttttctgtacatctcagctgcttccaggcggtttgctgctgcgagtattccccggcccacaatgatgacatcagaacctcgtttaccaaccacttcttggggactattgtactgctggccaaggtgatcccctcctgtctctaactgaaccctgattccccgtcacccgtggtcaccatggtatgcacggcgactaccatcgaaagttgatagggcagacgttcgaatgggtcgtcgccgccacggagggcgtgcgatcggcccgaggttatctagagtcaccaaagccgccggcgcccgacccccggccggagccgggagggggctgaccgggttggtt

SEQ ID NO: 1274 - DNA, 435 bp, Rattus norvegicus
  Genbank Accession No. AI008416
tcagtaaacaaccaattcgattttcctattctagccatataagccagctggactttgtaaggaaaatgttctgaagcgtcaccgtcaaggactacagaaaactgccacccacagataaactgccacagtaagtgactacagcgtggctctgtcactcataccagacaaccccaaataaatactttatgaaaagaattaaagtctatcaaaaccacttaaaatagaatcttaaatgcagaaatcttaattttccttcagttgggccagaaaccaccacagaccctacggtcagggttccaggaagctgcccggcgggtcatgggaataacgccgccgcatcgccagtcggcatcgtttatggtcggaactacgacggtatctgatcgtcttcgaacctccgactttcgttcttgattaatgaaaacattcttggca

SEQ ID NO: 1275 - DNA, 428 bp, Rattus norvegicus
  Genbank Accession No. AI008441
  misc_feature (1)..(428): n = a or c or g or t
gccaagccagcctaaaaagtttattacaggtgtgtgatcgggcggatgtcacgtgaacatccaagtgtgccagtaagaaaagacccaagagagcctctgcccacccactccttggctcctcacctccccagacttactcattaccctaagttaacgtgtcctgtttcagttggagtcttaggaaatcaaatcaaatcaatccccaatagtgcagacctttctaccaggcgcaccagaggagtgaagagtgtccccacacactcctactgggtgtaggacatcagaacccacactcatgatccacggtccggctgtacaaccccacccacccctctgtgtgcggggagcagcaggctctctgacccacatggcacagctcagtcagggagcgggccatcacgcagtggagcacaaggtcagttcctgng

SEQ ID NO: 1276 - DNA, 454 bp, Rattus norvegicus
  Genbank Accession No. AI008504
  misc_feature (1)..(454): n = a or c or g or t
aggagacagctggtttattgacatagctgaggatccccactctcatctctgggactgaagctccacccagggctgggaaactcaccagtcaccagccacggctggtggaaatagccagagatatctgttatcacaggctctttgggcgggatgggacatttgaagtcagaacctatgtctggtgcattcttagatctcaaaggagaaagaatacagcatactctataccagcaggtcacccaaggcctcctgtcctggagcccctgactaggtcgttcctanggtgctagcagcatgaagggagtgggcaaatctgtaggcaaggacatcaggctggccagccgagagctcaggcccatcctgcagttagggcacagcacgggaatgtgaacatagaagcaagcaacacaggggagagcaatggaactggggcctagcatcctatgggacagga

SEQ ID NO: 1277 - DNA, 500 bp, Rattus norvegicus
  Genbank Accession No. AI008511
tcctctgtcatttgtcacaggaggtccctgcttggcaatgacatttgtgagttaggataatgacgttccttctctcctttttttttcctttcatacttcagatttaggagaaaaagattctgtttccacgtgagaggaactgtaagcttttatcacgtaaccagctgaacaacacaccaaaagcagcctagggatgagcaccgcgctttggtagcgattaggttttattcacctggtattaaaactattcactatttcaaaaatccggaacttttaagaattcatttcaaaggcagcatcaaaaactgaaaaggaagggaaaaaaaaacaacagctaataatcggcttctccgcacgcgtggagctcgcgaaactggagccccggagaagtggctctgctcagccgcccgcccacgccgcggcggtccttgctttccccgcatgcgcccgcaggcagcgtgcagtcctaagcccggctgtggagaagctcactctctctc

SEQ ID NO: 1278 - DNA, 486 bp, Rattus norvegicus
  Genbank Accession No. AI008536
cactagaacaaaggaatgtttattacagcattgctaagctagcttcctccataaataaacctgtacagagtaggacataggactgtgatatatacagaggggcagaggacacagcattcgagccaggatctgtccccatctccaggctcagtgttctaccattttcaagtatattagcaaggccgctgcaggaatcctcactggagtagaaacagcaaagccctggagcatgtctcagaacttaggggtccattccaagttcatcctatgacccaggtccaaaagtgccagccttctccgccacctcgagagctagcttcaggttttggtcaaatagctcacatctgataggcatttccaaggagtagaatggattcttgagggcaaagtctgagtaaatttcataaatttttcggagaagagaactattccagcttgcctaggatctgccaggaccacaaacttgatccctgtcagtgtttggaa

SEQ ID NO: 1279 - DNA, 612 bp, Rattus norvegicus
  Genbank Accession No. AI008642
aaaagcaaccatgttttaattatgggctaaaaatgtctaatacattaagcatgaattataaaaatccagaatctaaatacaatgctagagaatttcaccatgggaagatgaaggagaattcttttctaagtacattatgattaacagactagcaaatcttatccggaatggtaaggccaaaatagtaaaaccacacttttcctataaaaagttacacatcatctcctactgggacagctatcatacataaagaaacacagacaatgtgaccgccctactgcacgaccgggagtgtcaggcagcctctccttggagggtctaatcatcatcttcctccccgtcatctccatcctcgtcctcctcctcctcctctgagtcgggcgcttcattgtcctcctgatcaaatccgtccaagtatgtgatttgttgcagcagttcgaaaatactttctctgtaatcttccaggtttgtgatctcacagttaaacaagtcaagacttttcaaatttttaagattttgcagagcttctactgtactgaggtctttaattttgtttccactcagattgaggtaggtaagatttggacatttctctgccaggacttccaagcc

SEQ ID NO: 1280 - DNA, 533 bp, Rattus norvegicus
  Genbank Accession No. AI008687
aagaaaatttaggtacagaaaaagtagggtatgaaaatagtgttctccttctggcattctaactaaattacattaaggtttgtgtcagtctcacacataattaaactcccttgttgatagaatgaaaatattcacaaatcacgtgagcatcctgttgtaaacttgcacacagcaacagggagtagctttatataggattataacaaacctttacagattaaatgaggtattgcacagattaatttaaaaaaaaaagcaaaaaaggcaacaaaaatatacagcaaattggtagaacatttacatgataattttacagatcaatagacaggaagtagtgtttagtatttcaccttaaaaatatatatataatatatagatcagtcttcccactcatcatcatcctcaaaatcttcttcatcatcatcatcttcatcttcatctgaggaatgaatggctttgctccttttctgcatcacttccatcagcgcacccacaattcctgaagtgggcgccggggttggtggtgtggactc

SEQ ID NO: 1281 - DNA, 419 bp, Rattus norvegicus
  Genbank Accession No. AI008736
ccatgttgtggagagcagccatgtctctgtgtctctcatgacaaaaggggcctggctgttctcctagcaactcctcatccatccaaaagattcatcatccaccattcatccagtcagggagtgtttccaagcacctgcagagcgtaaggccacgagtgagtgtgagtgttcttggagctgtgggatgcgcaggctgaggggcacggtctgggaggggagtagacgtgcatgtgcccccaggaagccaagcacagtgtaggttaaaaaaaaaaaaaaacccgtgggagccggatggtccagagcaggcgcctccctcagagtgctaccatctcaccttccgacgtgacaaaacatcaagaaacccccatcccccgattaagccgccccgtcaaaattccccggcgtccacccacgcaaca

SEQ ID NO: 1282 - DNA, 485 bp, Rattus norvegicus
  Genbank Accession No. AI008740
gagacaatcacttatttattggacaaggcaaggtcatttaaagagagaaaaatatatccaacaatgggtttattggtgttacaggcatcaaggctcacaaacagtattcgatacatcatggaaaccggtcacgtacagtcaagaagatgctgtcatgtcactcaaaagtatgccccaagtgcttcggaagaattattagggagttacgtgcatacttgcccccagttcacaatcttcattccctgcagctgagctattagcccataggatttggctagttccctggttataaagtgtgttcctgcattctggagaactttgatcagtatatgtctcctatttttgagtgtcactgaaatcatgtcggctatacgttacctagcactagatcacttccctggttttcaactatcctaggcagtaatggactatcacacaatactgtaaacagaagtctactgaacacacttagcactgtttcaatg

SEQ ID NO: 1283 - DNA, 448 bp, Rattus norvegicus
  Genbank Accession No. AI008773
gagcctgagcgggtgattttattgcgtgccgcggaggatagatgttacatgggggaccccggatggtgtttcacatgcaccttgatggatgttttgttgagggtgtttcacatggggcttcgtggttggtgtctcacccgggagtccacgggcaggtttgacgtgtgatggcctggctggtgggtgtttcacgtggcattgtggcagatgtttaaactatttgcacgacgggcagttattcaacgtggctcttgtatggtgctccggaggtctagtgcttcttgtggctcccctgggtaggtgtctcttgcggtctcatggcccacgggtgtccaggcgtggcgttagtatgccaggtgtggcaggagccagcagtgtctatggcagcgcagctggtgaccgtagtctggccatttgcaggtgatctccgtggtggacttcggacaaa

SEQ ID NO: 1284 - DNA, 479 bp, Rattus norvegicus
  Genbank Accession No. AI008787
aaaagtcaagaacttattttatttattttaaaataaacattgaagtttccccattatccaccaccctacaaaactttgaatgtggaatgttcaacagcctaagcagttttagtaggctacaaaaccagcaaaaaactccagttgtctaatgatgaatatctgagaatagttgttttgagtggctgattaccggcttggaaaaaaaaaagtttgcaaaaggctaaaagtaaaatttaatttctttacagaaaatagcattaaggtggtaagtagcctttgcctttaacaagtggaactgattctgcaaggcgtagatggagtgggacaagtggcattcagttcacaggcacacagctcgtgctcaaactgctagcacagatcccagcacaggacatctggttaggtcactgctgaactttgcatctctgtcaaacggtacactctctttatgcacctacggcagagtcaacactttgagc

SEQ ID NO: 1285 - DNA, 478 bp, Rattus norvegicus
  Genbank Accession No. AI008838
aaaccgacatttctgtaatcaacaacaactacttagacagacccactgctgtctgattatgtccataggtcaggggtgttctgcttacgcatttggtgcctcataattaagttcagctaacactagggcctatagtttgctgtcagtgagaccaggtctggtcttgacagtaaagccaccatcaaaagctgcattgagaacttcatccaggcggacagttgtacttttgttccaaggaagctccaccataagttccaaataatttctagtcagagcatattcaggcattgactgaggcatttttttgagtctttttatctgcttgacacagactttatgagcctgttctggcatactagatgttcttatttttttctccagcatgacaatgtcatcattatcttcctcttgctcttcatcttctaaagctcctgggatgtgtgtaatcctctgatggggcgtattgctataacccttt

SEQ ID NO: 1286 - DNA, 494 bp, Rattus norvegicus
  Genbank Accession No. AI008865
aatttaaagagaagcctataggcttagtcctagcttctatgtggacattaaccaggttgaaagtgcagagccgggagtccccagcctggggtatcagctcacagaaaggggcagcaggatgccatgggcaccaggaggcgcttgtccaacaacaaaccaggaggacaggcggacagaacataggtgtttcctttcgctcccccccagccctctgctttcacagccatcacggactcaagaggtgccctcctcctcacataagagcgcatcacccacgctcactcagttctctattttaaaaagtacccagactgcccaaagatagcagaagtaggagattaaagaaaaaatctggaaccacaaagttgggagtttcagatgatctgggagtttggctgcttaaggggtggaacatggggcaggtgtctcagtcatactctgcagtttccgctttcagctcctcacatcggggaggtagcacactccgaggtcag

SEQ ID NO: 1287 - DNA, 440 bp, Rattus norvegicus
  Genbank Accession No. AI008888
acggtctctaaaaatatatatttagagagatagttttatacagttttctgaaaataattgtttggaaagaaacaaaatacaacgccgtttgggcatcacaaaggaagctgctcacagaggggtatttacttcgtggtcccaaacacggattccaaaggtgaagtatttggcaaaggggctgcagaatcagaagtaggttagctcatcgtgcttttctttgtcggtctggtaagaggacaaggtcaaaggcttgttctcatgagggaggggttcaaacaccctcaagtgcacacatttttcttcgccgacatcaaccttgatgaagaagttggtgccggccactacctgtctcctgaaggatatggctttaaagacatcaaacttctgatttgctttctcttcaagttgagacttcaccttgttggcgatctcctgcgtct

SEQ ID NO: 1288 - DNA, 452 bp, Rattus norvegicus
  Genbank Accession No. AI008890
agaaactaagagcttcaacagtttatttcttctccaagatgtgaccaaatggttttattgcatttactatttctgggcaatgcactgagcagaaaaagaaactgttataaagtcttatagtctttgagggtctggactacaggcttcttgatgtgaaaaatcaggagagagagcaccagaggccttgaattcattttcccagacctcctgactgtgagggctgttatagctcaaggctgcctgcagtcaggtccagccacagcgacattgagcctggccgacaccagtgtgcgggaccacatgtttggttgctttaggtttcctaacaacaaccattcccagaatctcaggctttgaacttaaaggccatggatgaagattctccttggcagagagaggacagcagtctgaaagcagacaaccgagctcaacacgcagaggaatgcaagcac

SEQ ID NO: 1289 - DNA, 382 bp, Rattus norvegicus
  Genbank Accession No. AI008894
gaatgggcatcaccgtttattgtcgtttgtgttgggaactgaacagagcacagactgtgaagaggaggaggaaggaaaagaggagaaaaagtatgtttctgaagatttcatttctttaaaacactttatggtttcaaatcctttttcaccccaaaggaaatttaagaattcaagtatgtggcgtagggagcggtagtacttctgctcgagtgcgcctacgtggttacgtggtggtgtttgtccggatatgcagggtccatgacgcgcagcatcagctgaatgagaacgccataaaaattcagacatcttcttaggaagctctcgtcaagtaagccagcgttagcacaggccttgcaccgtaccagtttcttaagctgagttt

SEQ ID NO: 1290 - DNA, 467 bp, Rattus norvegicus
  Genbank Accession No. AI008919
gctttgaaaattgatttatttattcattggttaatgtacctaacaacattgtaaaccaaggccaggatatgctcctgagatatgtgactagatcctgggtagcctcggccctctctggttgctagccctacccagagctccctccgcttcatgaaacgagtccgcaggctgggcgaggcctcattccgaggaaaaggcagtccccgcaagggcctggagcttccttcccgaattctgggcagcctgtaacctggctcacaacttgtgtggggtcaagagctgctattgcaaggtcgcctgtgcctggctctttcccctggctcaaatgcttgcctaacctatggccaccttccctggcaacctgcgtccccagggaagaggaagccactgcttccattacacgccttcacagcgaagggcctgccaagcccttgctcatgtcagtaaggagactgcttctcaggcac

SEQ ID NO: 1291 - DNA, 415 bp, Rattus norvegicus
  Genbank Accession No. AI008931
aatcaatctagcgtgacctggctcatggggttattgcaagattaatgagatgcggctggtaagtgttgggtaaagctcggctctgcttgttatcgagaataaaaatgatcaaaggaagtcagtggcagagacagacatggactccgctgcctagcatccaaaccactaatgctgccctctgcccactggggtgtggaggagatggggcacagcctggggctcagcgtgtgccgtccataaccgtgaagctgagcagcacagctcccctcctccagcctccacgagctcatgggaaaagcggggaccttaccccaaagccaggcagcacttggagtgaccgtgttgtgtccagaggatcttcagttctgccccctgtggtctattctgaaggtgcagcccatcatggttgagaaac

SEQ ID NO: 1292 - DNA, 632 bp, Rattus norvegicus
  Genbank Accession No. AI008974
  misc_feature (1)..(632): n = a or c or g or t
cctgtcagccgacagtttattgaaaggaaatcttgctttatccatgaagtcacttccatggaggtagctgtgataaagtgtctcttccccatgacaacgcatagcgaccaatccctactgaaagacctgcccgagtacaccaactgtcctggtggaatgacactctggagcaggaaaaacaaatttctaaaaggcatacagtgattgtcttctgagctttgcagctggcaacatgtatgttttcacacaagatatttttaagctagcgaaagaaaatactcaagcaggattagttcttaaagcaataaacaggggaataaaaacatcatgtatatataagaaaaccaaggcatgctcacaggtttgagccaagaaagacctggagccctaatccccaccttgtcccaggatgcacctgtcatgatcacagggaagagatgagtctgggatttacaaacctctctctaaacctcagtccagtgttgtgccgctggctgtaccacacacaccgnacaagccccgactgctcccattccattacggcacaggagacatgttctcaccctgcctagcctgctttggtggngggaggcggcggcagggaactctacaagtgtttccagtggtgacct

SEQ ID NO: 1293 - DNA, 558 bp, Rattus norvegicus
  Genbank Accession No. AI009002
caacttgctcagtgctttattgaaccaaggccccaacagaggatgcattggcgggccttccagcatgaccttttcatatgtagattctgaacccaaaagttgcttcttcctccctcccctatgacaatatttctttaatatttccaaatgctaagtgtaaagactttgtacacacacacacacacacacacacacacacacacacacacacacactcctgccataggccatcatgcttaccaaaatacttcactcgatttgtgtgcatacatgtgtacaaggcactgtgcatccatgaccatccaacaaagggcctagactctgtcactagtacagcaacacggaaaaaccatgcatactcaggaccagatatggaaagaaggacagagagggacagggagggacagagaaggaccaaaaagtgaagctcagtgactggttcattgcccagcaacaagtgctgaccagcgaggctttagggttcacagcagtgaggatggggctcccagaggctcctgaatcaggcctttgctctacctctgggggtcttaaaggaaa

SEQ ID NO: 1294 - DNA, 536 bp, Rattus norvegicus
  Genbank Accession No. AI009021
caggataaggatgcaaaagagaagaaagtccaacagagacagacagtgatatacaggtaaaatccccagtgtgttctcaagttttcccagttcaacagttataataaacacactttaccagttgccaggaaaagtttcaattaaatataaaacacccatttgtaaaaattgtgtggaaaagtcctacccatcaggatggagaaaatactctgctgccaggcatatggaagctgtggcatcatgcataaatcaatctcactaactatcagatgaaataaatgcacctctaaacctttctaacctggatgtttcccaaacgcctcaggaaggaacccttttactatcatatatttatcagcatctgatgctttgaaacaattctcaaaaccctgtttgtgcacataaataataaaattctaatggtgagtccattaacagtctattttagtgtactagagaaaattagtgacgatacatctcaaatattttaatttctttatagaattacacttcaacaaaatctatggttatacatt

SEQ ID NO: 1295 - DNA, 486 bp, Rattus norvegicus
  Genbank Accession No. AI009026
aaagaaatttgaagtctttattgaaccaattgcatgttaggttacaaagctatttcacttttccaaaatgctgtttctctttgtagaccaatctggccacaaaaggctacctggctaagtattagccagaaacttctaaatcccagtgtgatcttcttgtggcatttttccaacaaataatgcagaccaaatcacaagatggccacctcactggtcacatggtccttaggttaatgagcagaggctgacaggctgtctcctcactcttccaagaaccgcccccaagtgcacactgcagaaggaaagtttgttttgaataccacaggacagaaggacaggcagctcataactccagtggaaaaacatataggagagctgagtggcaacagcaggcactgtgataacctgggctgtcaaagtctctccgttactctggcatgcagttggagatcccatggctatgagcagccacagccccctcgtgcc

SEQ ID NO: 1296 - DNA, 410 bp, Rattus norvegicus
  Genbank Accession No. AI009062
aaatcagaacaaatgaagtagcagcaaaagaaccattcggcaatctggcttcactggtcctcagacaaggagggaatgcagccagagatacatctctcagcctcagcctctcaaaatctcacttgggccctaaagtgcatctgcttggtggcattgttcttcatcccggtcttcagcatccatttcgacttcatcctctgtacatactgcatgtcccgttcacgcatgaaagctgctcctgtgctgcccgtccaccccagggctcggtactgctggaggaccctgcccacagccttttgatttctagcaactgtcacagctcttggcaagccgaatcgttgtttgtagaatctcatcatggaccgatgacccaccctggcaccagaggggagttatcagctccatggttt

SEQ ID NO: 1297 - DNA, 557 bp, Rattus norvegicus
  Genbank Accession No. AI009079
gcactgcgtctggtttcgggttttattttagaatttataaaattccagtgtcatccatattcatgagcctttacacatgtttgcatataatctccaaattccaaagttaaggccaagggacggatgtagctatggaaacacaggacatggaagacattcaacaaggaggaaaagacactccccacccctgccctaggctcctcaatgtcttggaggctgcagagaggtgacctgggtacagtcaatttcatagtccttattaacaatcagagaaaaggagtgagaccctgaacagcttaggatagggctaacatctacagacttagcaataaaaggagatgtacaagatcctgtggtgagaatttaaactttaccttctggtgaagggagagactggatgttgtaggatgacaatgaagatgaagagggggctggaggggcatgagggaagcaaggtgtccccaatctcatgcagatgagagaagagccagctgcaggtaaaggcaggagccctctccccgcctcacccacctgctccagctgccagcctactgagc

SEQ ID NO: 1298 - DNA, 549 bp, Rattus norvegicus
  Genbank Accession No. AI009098
agaaaagaatattttattgaaacagtttctcaattaacaatggaacaaagtacaatttgattcaaacctgtccaaccagcctgaactgctaatgaaagaactcaaacacacaggggggaactgtgtaggacctttaagtctctctgccaatgtggcaaaaaaaaaaaaaaaaaaggtggagaggggtgggggtggggtagaaaagacaaaacaactgacatcaggtttgctttgcccctgcactggggtggccctacctcctgctacaggtgcaatactggaggacaggcactctaggcatggttatagtgggcaaggggctctccttcctggcaaaggacactgtcaagttgaaccctgacccctctttctttacccacaaagcttgcctgagagtgaggtggcatttttacattcacaccatgatctctgtcccacagggtcttgggaaaggggctcacagtagatagcacatttttggtcagcccagggggaagaaggaaagagcctgaagggtagattttacaggaactggggatgaccaggatg

SEQ ID NO: 1299 - DNA, 458 bp, Rattus norvegicus
  Genbank Accession No. AI009115
gggtgaaaatcatggcaaactttattggcataaatcacaggagttgaaatgggaaaagccaggttagaggtttaaggtaaggaaaaaaaaatcaaatgatcatatatccatgacccagagaatggccctccaggtaccccagtctcttcttggaggggcctggagcaggtaggtcactgtaaacagagcagtaaggcctgtgggtggaagtgtcggtcggtgtcgtctgcagcgcccaagctgaccttgagctgggctgctgctagcccaatcctgactgaggacccttgtctatataaaatgttattgctggataaacctttctcggagacccggggcagtcacagactctgggaaactgggtgctggcacccagggtgccttcagtggcctgtgggtgagtttatgctggcactggctacaagggccccgtgtccccaatacactatggtaatgag

SEQ ID NO: 1300 - DNA, 564 bp, Rattus norvegicus
  Genbank Accession No. AI009131
aagggttacaaatattcagattttattataaataaaatactgttttctttttaaacataaaaaacgccaagtgttgcgctttattaacctccctgtggggaagactgtaaagttaaggcaaacagctaaggtgaaggcacatttaaaagggccacagttagagggaaattccatggaggtgggggtaggataaaaacaatctcttctgggtgacacccggcattccacagcagccatcctgtccattttattacataaaatacagattattggaactatacaatagaataatgaatggctgtgtcgcaggagtgtagtaaggtatcatcttgtaaataactttcatttttaaaaataaaattctttttaaaaatataccaacaacgatggagaagacaaaccaaaacaccccacccaccagcgctggagtagagctgacccaaaggatgctggtggcctgtcagccattttcttgcaactgtgaccagaatgttaaagtggtgacctcataatagaggaactagccaatcagcactgagcttggtgaggccctcgtgccgaatt

SEQ ID NO: 1301 - DNA, 486 bp, Rattus norvegicus
  Genbank Accession No. AI009132
cctctcagtactttaatgctgtgaacatcagacctcggcagaggcaactacgagaagcacatccgtggttcctgcacggcgccctgcgtcacagcaagcccagcttatactccaccatcatgtgtggctcgcccatcagttcactttgtgatggatcattaagaatatcctcaaaaccaatggtctcgtcgttgcccctcaaaatatccagtgagaggtttgagctcggaagaaacggaagacgctgaacctgctgcacagccttgaactccatctgtaacttcaggggagcaaacaggccctggatattcctcagggtggaaaagttcatcttgtcctggttgagctggaaatttttttctgataattcaagagggtgactgggcaaaagttcatttttcacacaagaaaaccctttccggagaagatcatgactctcgaaaggcccactggctgagagttctgtaactggaatactgtccttca

SEQ ID NO: 1302 - DNA, 632 bp, Rattus norvegicus
  Genbank Accession No. AI009142
  misc_feature (1)..(632): n = a or c or g or t
caagatccagtcactaaactacacccattatttgattttggagcgacttttcacaagccctgaaaactaagcctaagatttatgaattttcagaactcgttttccatgtagtcttacatggaaacatgctctgtattctgcatgtgctgaagagtcatagtttagcagacacctatgcaaagcgaacctgcctaaaggtcccagattgagcttcctcagacctgtgtgtttataatgttacagttgttctttaaaccatcatttccccaaagcacttcccatacaacaccatttccaagggacacagtgttctcatatggggggtgggtaacttaggagctggttgattaaaaatatttacaaaatagcaacttaagatatgttaggcccttgttggagtcactagtctcctcaaaaattctggtcttcatggatcataatcttgaaggtgggggtgagggctctatgccttgcacttcttcataatggggcatctgtgaaactagtggattttataggtgatgcttgaggaaataccaccataggacattgacntttggttggtttcctattttaaaatgttgaagagtggaggccagcttcaaacctgtaggaaagtgctgatgcatttg

SEQ ID NO: 1303 - DNA, 493 bp, Rattus norvegicus
  Genbank Accession No. AI009156
cacctcctaaaagccagaacatagccatccttctggaaagtcatttcattagaaacagtgagtgtgatgcaggacaagaggctcctgctgcactgtggcacagctgtgcttttctcagttcctcagggcaaggtctcaccaaacctccctccatacatctcctgagcaaacctttccagagtacagtgaagaagcagggacgttgggagaataatcctggactgactctgctggcctctgagctggcttcgccctggcaggcagagatgccactgtggaggtgtggagtcagaagcacaatgctgcatgcagtctcggacaaaccagagccacatggctggaaagaactcaccccaaagctctagtctgtccgagggtctgctctgtggttatcagtggggaagacaatgctgacaagagcccagaggaaacagggctctctctgccctttggccccgtcacccttgaagtgaccctgtctggtgccctggtt

SEQ ID NO: 1304 - DNA, 540 bp, Rattus norvegicus
  Genbank Accession No. AI009178
gggtatagaagtttaatccatttctcttacaaggaggtaacagtaaatagtagaggggtgatcatgtattatggcttcaagggacctcatgcacagggcagcagatgaccagccccagaacctgcccacccacccccaaagctaccacagtggttccggtgaattgagtgctgaaaacagacacctcccagtaaacactgccagggttgaggaaagtgaggcgttttcctgcccatcccgaaccagatacagcaatgcaaggtggtgaatctctggaaggagttttatgtagttctctgacaaccctactctgccctcagggaggagcatggctcctgtagtgggtgggcttaaccgctctttctcactcagttatgtggaggattctgggggctcagctccacctcctccctcctcatcctctggggatgatgatgggttgaagctgtggggaccatctctgcccatccgtgctatgaactctgaaagagttcttctgtaagaaaccaagaggatgccacatacttcttccttatccag

SEQ ID NO: 1305 - DNA, 506 bp, Rattus norvegicus
  Genbank Accession No. AI009194
gactcaggggtcaaaaatggcagcatttggtcagttatgaaaggcacctcattgaaaaatatatcacagtgttgtcgggcaatcccagtcccaggatttgagggtgagaaggacaatctttggatgacttagcttaagacatgttagcttgttccctaaccccttcactgtagaggaccgaacccagggctttccagtgccaggcacacacgctgagctacattcctaggcctcgttcagttatttaaagggtcccatggatgatgaaggcaaggctgtaagactctcgtgagctgggtggctgacagctctgtcaccagagcaggcaactcttaagtcacaagtgtgggatccgtctccccctgcgccccacgaccagcacccattggctcaccccccatctcttccatatacgcaggggagtccttatggaatgggggccaccgctggtcaacagtccctcctccgcacaggacacaggcccagtctgactgctgtgtccttgg

SEQ ID NO: 1306 - DNA, 525 bp, Rattus norvegicus
  Genbank Accession No. AI009198
agataactaaaaaattagatgtccagaagccgtcagtgtacaatgaaagagatcaaaccagttactttatcatgtatttcctcttcttcacaactaagcagagaaaaaaaggcattcttcaagggaaatgtcagaaaaataggccaatatatttttcttctccatgacagaaacagctacaggagatctggggtaaagtggacactaagttggcttttcatcacggcagcaggctttggcaggcactaggtgaacagactcctcctgcctgcaccgcacgctcagccagttccctcacaggcaacactgtagtggttcgtgcactggagcaatccatgccccaacagtctgtcccctttgccacaggcagagtaactgaaggccgatgccggtctctgcttgttcagtccatcaactgcatggcatctgcggcacacgtctgacgctgctcaggccttcacttcaggagttgacgaatagatggaatctgaattctctgaagcaatctcttccagctcttcttct

SEQ ID NO: 1307 - DNA, 459 bp, Rattus norvegicus
  Genbank Accession No. AI009208
ctgcaacactttatttagcgtattggcgtggattagctgaagttaacaatcgccaggaagccaggtcagctggactgcataatactcgtcttcatttattgacattacttagcaatttattggacaaaggtcaaacttttgtttttattaagcacattccacagtacaaagccgtcatgataatatctgtacaatttaacaggttcaatagctgttcagacacatatttatttcaaacagataattggcaaacataattaattaccagttagaattagactaccccagtgctttaacacattaatatagcagtaatttacagttgttcaattacggttagcaaaataaaagtccagagtacagctgggagttactactgtagtcccagaaactggaattccttgggtacccaagtcccctgctataattagtaggcaaaattcaaaggtcgtgtgcata

SEQ ID NO: 1308 - DNA, 475 bp, Rattus norvegicus
  Genbank Accession No. AI009222
acatataccatgttataatccttcactgtttgcatgattctattacataaaaaccatttcaaatgcaataaattttgctgctataaaacaacaaaataccctcaacttataaaaacacaggaacagctatatttatgaccatttacacaagagaaaggtattgactacatcacagcttctatacatatcagttgacccacttgtctacaaggtctaggtttactttaattaacagtgaaagagggtaatatttatatacaattgtttcaataaaaataaagcagttgtaaaatgtaaacttaattttcaaaatactctttaaaacactttaacaatgtccacatagatgactgttccattcaaacgactaccaccttgaatgccaccgttcggagatggcatttcttgagtctagcccgtgataaggaacaggctttccgtacatagtgtagtactcgcttttcaagcgctgcta

SEQ ID NO: 1309 - DNA, 852 bp, Rattus norvegicus
  Genbank Accession No. AI009273
taaattaagcctcactaagaggaatcggcttgcggctcacagctataaattaagcctcactaaagggaataagcttgcgggcgcacaactttttttttttttttttttttttttttttttttttttagattcccaaggttttattggctcacatatgtgcgtttgaaggatcacacagccttgtaggggagtcaggcctttctaggacaccttaaaaatgtttgagtcagtagactccaacgagctagagacattattgatacagggtaggtccttcccaggaagtacatgacaagagctttaccaattttcgaggcgggaccacagccaaccatatgcttcagtcttacactaatcactggggcccggagctcctgaacacccaacctgtaccccatcactgcaattttctaacctggcaacgcgacaacttaaactgctgctctctgtggataggactgaatgctgtggccttcagatagactcttctggacactcaaacctgggcagttttgtgtaactcacgtaagcattacccctctgctctggtcacatgtttccaaggatacgcttcccaaagtgggcacacactgctgttttcctccaaagggctggcaccaactgccaggtattcaacaagtaggcattatattctctaccccgggtgaggctgtaactagggtgacccctcaagctgacttacggtggccaaatccttcacaaaatgcaaaggccctatctaaccaaagctgaagttatcacaaatcaacttctttacccgcaaaggcagcctcaaccccagcgaatcgggcccaaggcaattccaaaggagccttaaatccaccaggcaag

SEQ ID NO: 1310 - DNA, 858 bp, Rattus norvegicus
  Genbank Accession No. AI009274
  misc_feature (1)..(858): n = a or c or g or t
cgcgggcatcaagcgataattaagcctcacgagnaggaataggcttgcggccgcacaactttttttttttttttttttttttttctgtaggcacagccatagcagtttttaatttgcctaaggacaacccttgatttagagagttgtctcaagtaactgtccctatagtacacatgcggccagcatgaagtgttggtagctctcattcaggaggaatacgacctgataagcatacacaatttccaaacagccacatcacggcggtacacgcagcagcttctggaagtgcttctgggagatggcgaggggctgctgggtgcacagccctcacctcagtggcagctctgcagaagtatcaccgggggctcctcttgggtctggataaacggtccgaaaggttaggtttactctccgttctctggactggtattccttgggcactcggtgctgccagtcagcttgcgtggctccttccaggattagcaacgtcccgtgatccaatgggagcgtcactctctccacatgagtatagtctccaatctcatcaagtggggggttcatcctcagctcaaaaatccgatggaacaaaactgagtgatcaatgacagggcatctccccaagaagggtcattaccgctgtggaatccagactgtcattccgtccgggaaacgttcacacaaggggttaaggggttgccattgtcgccgcatgcgggccttccagtcaaagaaaagagcacccctcgatccaaccccgttcccgggaatctgtaaacgggcaaatgattgctcctaggtgaataccggttaaaaacttgcaaaggtgggaagggattccaacacgcgatacggggtgtg

SEQ ID NO: 1311 - DNA, 498 bp, Rattus norvegicus
  Genbank Accession No. AI009350
aatatagaaaaggagcccgaggcagctggaccagtagtacaaagcaccaggagttaacactattctggtgaaagggttggctttataaaagtgaaggaggaggcaggaactgcccggcttccgggaccaggcccagcctagtacccagaggcttagagcaggacctggaatgagattcactggagggggctgatgggtaatttttgaagctgagtgagttggagaccatggtgaccaatgataggcatagaggttcaggcagtgagaagcatttctgtggctgataaagacagagaactgctggcttaaagctcctcagtgagccttggggaggggctctcagctctagggccaggtagaaaatgctacagatacttgtggactttgtgaatccagacatgactctagggtgggagggtctttccccttctccacaggagccacctttgctatgactacacatggggctttaagggcccaaggcacagaagaggctca

SEQ ID NO: 1312 - DNA, 437 bp, Rattus norvegicus
  Genbank Accession No. AI009362
gaaaggaaaactaacatttattgagcgcctatgggtatgtgtatatatgtgtatacatacatacacacccttatacaatgtatgcctggtcttgtgcaaggagttctcatctacaacattccgtttgatcctcaccccaaccctgtgaggtaggtattatcctcacgtgtcaggtgaggactacgaggctcaaaaaggttaggtagtttgttcagggacactgaactagagaccagtgagctgagactgagttttaagtctccggcagttctatcctatcccggttctttcctacccccttgagccctgtagcccatggctccccaaaaagaagcctgccccatcctgctctgcaaggatgcagtcagttgaggattaagacataaataaaataaatagcagggtcaggttcccaaaagtgaggacgtttccatact

SEQ ID NO: 1313 - DNA, 468 bp, Rattus norvegicus
  Genbank Accession No. AI009376
ggatttcaaacattttatttttcttcctgggtgctgcttggagttgtactataggaaccaaaaataaagaaaagtaaacaatttccttaaagagcatttccattccttatcagaactaaaatcggatcagtggcactatacaattccacaccaaatacacatcaaagagctcttctcccaggtagcatttgcatactgtattcatacaactgtattcaactattttaaatcattatgactccagatcatccaggatacaaacacactcaataatgctgctttaagaaaaaaaaagataaaaaccactagaagatagaggaagtggggtcatgtctaatttctaaaaacatttcaaatcttgtttgttacagaagtagaaaatcaacttttgagctggatcacctatgcaggagtaaaacactgctcataaagtaatctatatacactgcaaatttagcacaaatgatt

SEQ ID NO: 1314 - DNA, 508 bp, Rattus norvegicus
  Genbank Accession No. AI009456
ggtgctattcacaatatacaacataaagaatcagtctagaaacccatcaacaaacgaaggtctaaagaaatgtaatgaagtatcattaacctgtgacaatgaagggaattctgttatctgaaggaaaatacatagaactggaggacgccatgtaaaacaaattaagacacaatactccaggaaggatatgctttcttttatatgtagaaatacgtgcaaaacgaaatgtagaaagaaggacataaggggctatgaagggtgatgaggggaagatgttgagacaggacagaatagaggataggtatccttcatatactggaatgtcactgttaaattcagggatgcatacaattaatgtgctttaaaatgacgatattacaaagaaaaattgtagagcgtgagatgatagctttaatggctttttttccctcacaatcctaatcccattcataagagctgtacactcgtgatgtaatcagcaccttttaccttcatggtcaaatggtat

SEQ ID NO: 1315 - DNA, 478 bp, Rattus norvegicus
  Genbank Accession No. AI009460
gggtgggaaagagaactaggaggtggttgtacataggacttccaccctcccagaaccaaagaagacatgctctgccaccaaataactccctctgcccaagtgaaagcccaaaggcaggtgaacacagcgcagggcaagggcgactgcagtgaatagtggctagagtgactcagggaagggagggtccagggcacaggaaggaaaatggggcttcttggggataagacaggtatggggatgctcattgccatgggagcttctggctggcaaagtggcaagctcagggcaccataatgcggtatgggctgcctgggatatgctcatcaccccacttgaccaccaatgtgtattcccctttgtctttgagcaggtaggagacactattaaggcgactgcccatgtgtttcaccaggatctcttcacaaggtgtccttgggccatgcacgcccaccagcaacatgttgttacctgctttgct

SEQ ID NO: 1316 - DNA, 531 bp, Rattus norvegicus
  Genbank Accession No. AI009467
aagcaaggaaacatttatttactacactcacacagtaatcatcaagcatcctgatgtttgcccaggtagcttaaaatagcaaatattcagtccccgcagaagaactgtcttcggttttaagccaagtcaaagaacagaaaggaaaactcatcactgctgagcactggcgctcaggctccactctcggatctgggacgaagaaacacaatcccaagtcagcttcctttctactcggcgtcactcagttaccagtcacggaacacaagctaaggtcctagcagcttatctgagacaagtttaactaactctaagatcacatgacttgacaagaaatgtacaaatgtttgctaagaacttaccgttctgtcaatcattttaaagagtccatgaaatatacatagcagtatttttgtaaccagaaactacactaattagacacatcatttagtttgttaagttctacctgaaaacatgccattttaagtaaaatcctaaacacataactcttaagttctatggtttaacaatcaa

SEQ ID NO: 1317 - DNA, 511 bp, Rattus norvegicus
  Genbank Accession No. AI009492
ccataatctcttatatacacatgaatttcacagtgtggttgccagtccttttttgtgaatgctatagacaaggtccaatggtgagactctacaatgagatgtggtcaggaggaagtgatgattttcaatcatctttctttccttcaagtttaatatcctttaattggggagagaaagaagtccattttcatcagctgtatctagaattttacagattactggagattcaaccccaagaatatactggcaggagtgaggctcaagcatatatacagtaacagcatgaggagaatctgattctttacactttagttttacagtcacctgtctgggtttgtcagttatatcacaaatatccccatttccataaaaatgtgacaccatcctgactgtctgggtgccatcgtcttgaagatgataagctctagcagtgtttttcttagcccactcaacatgctcttcttggttccatgtccccacaactacagaagttttcccattatctttggcc

SEQ ID NO: 1318 - DNA, 413 bp, Rattus norvegicus
  Genbank Accession No. AI009493
gttcacaaatgtcttagtagctttattcaaaatattcccacactagaaataacccaaatatctatcaagagatacacagattagccaatagtagtatattacttagtataataagtatatcataataggaatactgctcacccagaaaaaggaacaagctattgataaatacaacagcacacatgtcgaaacatgttaagctaaataaaacttcaacacaggagtgtacctcatctgacacagtcctgaacttcaatgaaataacagaacagacaaaattaatcctgagagatagagtagatgaatgactacctggggtgcatgaggggggagggggtgacccactgactgcagaaggagacagtgcatgtgctggtggacaatctgatctggcttgactgggactgatgttg

SEQ ID NO: 1319 - DNA, 510 bp, Rattus norvegicus
  Genbank Accession No. AI009501
ggctcttttcagtttattgcatgaaggagttacactagtccaagttaaaagcggaccccaaatgattacattatacaagctgtgaggtttttaaacttgtgacaagggacagaagggaaattctactcattgcaaggaaatcctcacttaagcttcagagagccacaagcacttaaaacccatgaaccttcagctgatcgtccttagccagtccaatctctatcaggaactggcatatgttcttgcgctggtcaccctgtagctgaattacttctccatattctggatgctcaattacagtaccattgcaggcaaatttcttcttaaacgccttcactagtttctttttatcgtaatcatcagcgatcccttggacagttgtaagggtcttcctgccgtttctctgttgaattcttatatggatataatcctcagtgccagcaggaagcaggtcatcacccttacttgcatcaacaaaggggtcgaaagaatggaggttctggatagcgg

SEQ ID NO: 1320 - DNA, 523 bp, Rattus norvegicus
  Genbank Accession No. AI009601
aaagaaagaatgcatttataaaaagaaaaaagacaagcaggtctgatacattctttctcttcttcctccccccacatttattattttaattctgaatttaattaacttaatatacatgtgggaaccctggcaaattatgacaggctcataaaactagttacaagtagtccagacaagttagccaaaacaggcttcacataaaaattatatataatatagcaatcattccttacctatgcatcctgaaaaaccggttttccttgtaatgctttatctctttgagttcaatgcaaatattcctaaagtatggacatctttatacacaaagagacaatgtggtaggacaagtgacctcctctattttaacttttcttatgggaaatcatgaaaaatgtgctttaaacttgttctggaattcaaaatagggcctaatttgcaaagtaaaaaaattccaccaaattcctgggttgagctaagttgtttggaaagagtaaaggatttcctgtgcctcccaagctctgcc

SEQ ID NO: 1321 - DNA, 597 bp, Rattus norvegicus
  Genbank Accession No. AI009602
gacatacaaaaagacaatatttattttacttctgtataagtagttcaacagaaagcctcctagttgaagacattactgaaaacattaacattattgtatgccatcccttcagtgcccagattcagaaacatcatctgaatgaaaggaaaggaatgtaggaatgtccgctttatgttggatttacgtatgtaagtggggaaaaatctatataccttcgtcaatatatgaacttacaagttaccaataagcaatgtactgatatcatgaagagttcttaaggcctggagattacttttgtctgttaaaacaaaggtactcctatttgctgtctgtccccttcccccctgctactgtacttctgaatgagaatttgaagcaaaataggatgtctttgtttccatgctgtaagactgtcagcattgacggtttccagagcatttcaaaacatgctcttcagctccatcaacacaggccagtagtaaacaatggctctgtacaaggcatttacgatgctttccttctcagaactatgataccccggggaaggagtatttcacacttatgcaagaaagcgaagtcttgtttctactgactaat

SEQ ID NO: 1322 - DNA, 625 bp, Rattus norvegicus
  Genbank Accession No. AI009644
  misc_feature (1)..(625): n = a or c or g or t
aaaaaaaaaaacttttataaatattggggttaatggcatatactaccataaacaaaatatatgttcttctacagcatcaaaaggaatgttcacacgatgaaatggcacttaggtcagatcctagcatttggtagcaggccacaatttccagataactcttagctacaggagttcaaagccagccaggacaacatacaggtctcaaatacaaacacaatccttagaatcactcattaggaaaagtttccttgcaaagcagtaaggagaaccatctgccttcccatctccaaatgtcttcttctgtggtgctgaaggaagatcaagttcaggaaacatacaacacttactgggcaagtgttccactactcagatggacacacaacctgcaacctgacccctattcattcactatcactatctttctggggtgctacttctgcagaagcacaagaatgttccctgaaatattcagagatccaacatgttagtctgttttttataaggaaactcctttaatcgtgaggtanagcttcttagggggatacctgagtctactgtattaagtaggaancaagggaagagggaagtggctgtcagtaaaaccagctgctaccaaaagacatga

SEQ ID NO: 1323 - DNA, 597 bp, Rattus norvegicus
  Genbank Accession No. AI009663
acaaaacatatatttagttatattgaaaacaattgtaaccttttctatagtaaatacattttcgaggagcaaatggttaagcttgagaccgagctagtattaatgataacaacatcttcaaagtatgagaatacaaactgttttcaaaggcatatgcttcccaaactgtttgttacacagcattctcataccacctgcagtgaggtacacaggtaagtgtaagatctgaggaacttgtgttgtctttaaaaacagatactcctcactacctgagagggcaagtgaggatctgtactgacccatttcgtacaatgtatctcatccccactggggcaagtaaccaggtaacttaaggtaggattcggttaagccagacgagtatatccatccattccccactcactcatcccccagtagttgttcagtgattactctgcctgaggcactgctctgataaaggagacatcaggagcagggaagcatcactctcatccatctacaagcttacaaaacaatgggaggaaccgccaagtaactaggaagcagcacaatggcacacagtacggcccgagccccgactcaagggggtgaggttca

SEQ ID NO: 1324 - DNA, 149 bp, Rattus norvegicus
  Genbank Accession No. AI009675
cctactcaggctttattaaaaaaccaaaaggtttagggccaagggagggaaaaagggcctggtcaaaaggcaaccccggcaggaggcggctaaacggtccttggaggtcaccccagggctcacaaaggcaaggaatttgcccaaaaagg

SEQ ID NO: 1325 - DNA, 495 bp, Rattus norvegicus
  Genbank Accession No. AI009676
caaatcattggaaatattcaacaataaataaaacagcagtggctgaggaaggcagatttgctaacatcattggaaatgcgttcagaccaatcaggaggatgacaagatgtgggcaggagaaagcaaagtttaaatgggcaatgctgggccacaggaggcaaggaaggaaaagcttttgggcagaaagtgcttggaaaactttggctctgaaggagacttgggaaatggctaaactgattgtgcctggaggtgcaggagggacccacatctacctactagggtggtttgatcaggctcttgggaaatagttaaagtgattgtgcaagggtctggggtggaggcaggagttacccatgttcacccagtagggtgtgcaagatccggattagactctggagaaagggttaaagctgttgccatgaggcagactctgggcaggaagagtcaaggaacaagctaaatgagcagaagggttagggaggtaaggatggggtt

SEQ ID NO: 1326 - DNA, 296 bp, Rattus norvegicus
  Genbank Accession No. AI009685
aaagactcaaacatgctttaattatacaaaattgcgcattctggttcctagggttctgaactgaaagggctgggtcttcggggttgtccctgattgtccgtgccagttaaaggtgggttactggcatggaggcaccagcaagggaagtattatatatatggagtgggagagcctggagatgggtagtgggggaaggagggtattagctccccttggagcctaggatcactctgagggacagtacccggtaagggggcctccggtctgcattgggaacaggtgtaactgccaagcat

SEQ ID NO: 1327 - DNA, 572 bp, Rattus norvegicus
  Genbank Accession No. AI009732
caacagctttccagagctttattgacctcgcacgacaatatgcgtgctcaggaatccaccttcattgccatattttgtagcagaaacacagaagccaggttttttaagaaatgtaatgcgtatatgattacaggttttgccaaagaatagtataaaacaccacatacagaacccggaaccatgccaagcagctcaggaaggagcccactatctcccagtctgcacaggtgattccacatcactgggacagcaataatggggaaaagccatcacggacgccaacgtggggcacgcctgcaatctcagcactcatgagggccagcacggaccacccaaaggacaacctgtcccagaagccagagctcagcagtcagcctgcctcactgctcttctaggtgctcattttcccagactggtggcatggttgccatgatacgacactgtggagggacttctgggtgatgctgagcttgcccacagtggccgtgatgtgaaacgggtaccagtgctgttctgagacaggtcctgctctgaataaagaactagaagtgaacacatgaatacagcttgca

SEQ ID NO: 1328 - DNA, 546 bp, Rattus norvegicus
  Genbank Accession No. AI009747
aaagaattttaatacaaacttaatataaactatttcagtccctcttaacatgtaagacactgactcaaaatacttttataccgtttttttttcaagtattgcacaatataggtacaaaattaatatttacgattacattttcttccataatatatagcaaaaatctttaaacctttaacagaaaatacatttttttgaaaaagcaaatattcgtacattttaattccaccactaaaggaatatcctgtacacaattttcagaatagttgatgtctttaagatggatattttacaatttcagtaaaaaaaatacaacatgaagccgctgccacagatcactgtagtaaaaagatagaaatgcaataccgtgtcgtagaaacaatatatatatgtatatatatatatatcctctgatagtttacaaactttgtactaaattaaattatacaattagaaaagaccaataaacccacttattagtgccaattttttatatatatatataaaaaaaaatcagccatgtccttgctatatcttaaatactgg

SEQ ID NO: 1329 - DNA, 547 bp, Rattus norvegicus
  Genbank Accession No. AI009752
aaaattataaaattcttttatttcaattatatgacacttcagtttgcctcaaattttactgaggttttggtcattttgcattccactctaccttgtaacagtagtatgaattcacatgattctgtaacgtgtcaacagcagtcatacagtaatcctctggtgattgtatatgtgctaatacttttagattcaactttacagttattttctaaatgattctttatatagaaaatacatacttccttcaggcagataaaacaacaactttccaataagaaaaatatcgagaaacaacaaataaaaatatctataccagatgcaaaattttgaattattacctaatgggtccctttgcacaagaacagccttttgtaatttttaagtagacattcaggcagaaggataactttaaaattgaaaaaaaaaataatggctgtttctcttcagtactaaagtaggaaatataatttcaacatgtcattagcagagaagagtaaaaaataaaatattcgatataaaatgaatttatcacatcacccgcatcttt

SEQ ID NO: 1330 - DNA, 567 bp, Rattus norvegicus
  Genbank Accession No. AI009761
caaagatggttccttcagtagtcaagttacgcacacttgacactgcaccaaatacagtgtttcttgtcgggtttttcttgagtgcacctccatcctccaggtttcttgttaccagtcgtgctgttacagacaggcttgcaggatagaccggttggtccttactgtgactcaggtccgactggtctctctgtggcaaagtccgttccacctgcccgtaaagacatttgtgaagggcccaactgttatggtctatactataaaatgtttctcagcacttttattataaactggaatttggcctcgtagatggttacagctagattagtcatttgacctaatttgccgtggctgtctgtaatctcaacacagataaggtctccaaaaagaagaaataaaaaaagaatcaccccgcaaaatgggagaagtctgtccagctgcagaaacggccacctgtggtttctctgctagtagcaaggaggccagcctgacctgttctgtaagggctgtagttgtaggttaagggtgggcttcaaaaggcttgctgctaaagcgttgtcctggaagggg

SEQ ID NO: 1331 - DNA, 400 bp, Rattus norvegicus
  Genbank Accession No. AI009781
aaaaagactcaatagatttatttggggcataatcttaacacaaagtatagcttctcaaaatttatatgccatgggataaatttttaagaatttcctttctatgcaaacacctagttttaatcatttaagagttgaaatgaaaactgttttagtccagtctatgctgcaaaaacagtgacaagcatttcaaaagtggtctacaaaaatataaaacaaccacgaatacctgatttttgtagggtctgcttttgaaaattagttttgcatttagtgtttaataaagtatttgataaagaaaaatgtgtaatatttgttgtggctcaatcataatacccaaacatataatacttgtatcatactgcaacataggttagcgtttaatggaaaaaaagatacacaa

SEQ ID NO: 1332 - DNA, 504 bp, Rattus norvegicus
  Genbank Accession No. AI009805
gtggtttcctgtcactttaattaagacacagttgagtgcacagcctgcattgccaggcctgtggcctgcccatcctgacctttggcccagaagctcatgcttccatgaggagtgaaaagggcgcctgagtccacagtgacagattattgctgacctcttcagtgtgaggagaaaggccacaaggcccgggcgcgggccagccctgagtgttctcccgagtttttaaggcagggagtgggaagtaagtgtccagccctttccagcctccagttctggtggcagacagcatgaggccacatccctggaactggctgggagaaggaatggggacagtggtccctgtagaccagctgtggggaagagagccaatccgcctattcagtcctgaccacaagagtcctggtcatgggtgtaggtggagaggacacttgtgggtgctgcccagctgcagtcccgaggcacttaggtgggcaccatctaggccctggtgctagttggccttga

SEQ ID NO: 1333 - DNA, 513 bp, Rattus norvegicus
  Genbank Accession No. AI009810
aaagtcccaggatgtttattacaaaggtaaaccctgatccttgagactggcttatcggtaggatttctggtaccgggcacgggcaccgggaccgccaaacttcttggattcgcagcgacgggggtcagctacaagcagggtccgatcgtactggatgaggatatctttgatctccttcttagaggcttcatccacatatttttggtaataagccaccagagcttttgagatagactgccggatagcataaatttgggccacatgaccaccacccttcacacggacccggatatccacaccagcaaatctctccttgcccagaagcagaacaggctccagtaacttgtactgcagcgtgcgcggctcgatcatctccaggggacgtccattcaccttgatgagcccatttcctcgtttgcagtgggccacagctgtggctgttttcttgcgtccgaagacttgaacggactgcagcggacccttggacggcatagctacaagtatgaacacgag

SEQ ID NO: 1334 - DNA, 502 bp, Rattus norvegicus
  Genbank Accession No. AI009815
gagcagcttttgaagtttattaaaacaaagtattagcaaacaatatgcaaaaacaagtttcttaagagttatggctttgagaagcacagtatatagtaaaacctagtacatttttatatgtatcaaaaggtagcagggctgaagcacactgctagtttagtcttctaggacgtgaagaaagcagaaccagtacttgtgagcagacttgcggtgcggccatccctcggctccacatcctcatgtgaagtatcgtcctcggggagggcacactgcagctggccgcgtagagagcacagtgcccaaccgccatgcctacgactcggccaagcagcagctcagccaacggtagcgcaagagcacagccgctcttcaagaccttccttcttcgaaagggctcgggactctcaggcctacctggagtgttggtgtggctgacaccggttcacagtaggaaagtcatggtttaaggcggggcggggcaagcatgtgcccagctgcacac

SEQ ID NO: 1335 - DNA, 383 bp, Rattus norvegicus
  Genbank Accession No. AI009825
gccttcataagaatttttattattatttagaaatgcagttatatacatagaacaattaaaattaaattaaactttgtacaaatattaaaatactatcttcatacccactgcaatgtacaggataccaaaaaatatatatataaaataaaataaagcaaacccagattgacatcctgcacagtcaattaagcatgtgttgttttaaaccatgacgagtaccattctgcaaaggatcccatagtggtgcacagcctcaagaagccaggccagtatggatacagccatgcaaccctcaactacttcctctccctactccgcattccccacggtgagctctgctactgggagaggacagggtagggtgtgtgtgtgtgggggggggg

SEQ ID NO: 1336 - DNA, 104 bp, Rattus norvegicus
  Genbank Accession No. AI009950
ggcaatgcacacctttaatcccaggtcttggcataggtaatgagtctgaagccagcctggtcaacacagtaagttctaggacagccagagctatatggtgagac

SEQ ID NO: 1337 - DNA, 457 bp, Rattus norvegicus
  Genbank Accession No. AI010023
caatgagcagcagttttattcttacatcagtgagggtttgtgcaagattccatataggtttcctttaaccacaattacatatctgaaaatatattaagcacatacattatttaaatagagagatagatgaggttctttgttcaaacaatactggttgcagtgcaatagcgtgggtagaatgctgtagtgtgaaaaaatacatttactgccattttgctagatttgcggagaacgtaaatgatttcaaaaccaggaaagtgctctattatagaacataagaggttcagttgctcagtttatttacattatatatattatgattcacacagatgatggagcagctaaatgcacctctgtggactttagactccaaagcacacagccagaaccaacttccgctctaacccgtgcatacagggcgtgtgagcccggaactgttccctgtgtggagggagtt

SEQ ID NO: 1338 - DNA, 244 bp, Rattus norvegicus
  Genbank Accession No. AI010025
catgtgaaagatttattggggtaggtagtgggtggaagagaaaaagagccgtcttccaagacctgggcaggataagggtgcactcctttggccacaggtgatgatgcggcttctgaccctgagggcctgagagcaggctggttctggaacgtgggtggctgttggttacaaacatccctccctcttatttactggctacggtgagaaattcggatggggtgatccatgaggccacacaggatca

SEQ ID NO: 1339 - DNA, 396 bp, Rattus norvegicus
  Genbank Accession No. AI010027
gcatacgtctatgtaagcatataccacgtgctggggggggaggggtctggaaggccagaagagatcgtcaatcccctggaggtggactcaaaggtacttgtgaactgccaaaaagagtgctgagaatccaactcgaatcctctggaagagcagccagtcctctcaaccaccgagccccctctccagcactcaaaactgttatttaaaaaaaaaatcaataattattgggccgggagtgtaggccagtgggaaggtccttatctattcatgaggggctttaggattcccagcctcaggaaacaaagaagcaaaaccgaacacttatttcaggactgatctgtggcaacgatttgaaaaaatgatcaaatgaataaagcatgcaaaaaccaggcatgg

SEQ ID NO: 1340 - DNA, 565 bp, Rattus norvegicus
  Genbank Accession No. AI010104
gaagttttcctaaattttattggcactgaaatagaacacagattgagcataaacccctccaaaacaattatttaaaaaacaaaaatacacaaaaaacctgaatataaaccctaaccttctccccagcctctgtgggagttggttattgcccttaatgcagctagattgcccccacaattccaggtttgaatttagccaatataggacagctcaccgagtgtcaatataattcacagcaatgcatataagattccccaaggttaagtaaaaggggtatgggctgagggaggctctaggctagggatactgcatggaggaacaagataaccttttgggaactaaaccctggggaaaaggcagacaggaacaataaaaccaaatactaagtacattttaagtggattgtatgacctatagtaacaggtaaatcactaatactgaaatcttcttacataatgtttttggcaaaatatcatttttaatatagtatattcttctcagatgtggggtgagggtagtaaaaaattatgaagcttaaatgatcctgtcccaagactaatatctt

SEQ ID NO: 1341 - DNA, 478 bp, Rattus norvegicus
  Genbank Accession No. AI010147
aaaagaacaagtgctgtttacgaactgcccttcgtacaaataacatccgttatacaaagatacaagacccaggctatgcacaattccaggcttggaggtcgcaggggaacactgcctctagggctgaggatataaaggtttcagaaagaatgaaacatgagccctgggtttgcaatctgcggcttcccttccttgctcccccaggaagggactgctacatggaaacaggctgggatggaagaaagggagccagagtccttcagtcccagaaagcgaacacaggagagaggacagcccgcagtccccaattcttcagtaggtcaagacaaggtggtctgctgggaactagacacacctctaatccaggaggaagtggctggaaggaacagaggggctccctggtcccaccttcctccatcctattgggcacctttacctaggaaccctgcctgttggcccactgcactcttaggtttga

SEQ ID NO: 1342 - DNA, 492 bp, Rattus norvegicus
  Genbank Accession No. AI010169
atcttttaaagtagtttaataaactccacaaaatagtatcaggtgcatttaactatttacataagtcaatttccaaatctcccattcaaataaaaggaataaaaataagatttctgctaccaagtcagcagttctttcctgaaatgggctggtaaaataaggtactttacatgagaggaaggaattaatctaagaggtattcatatttggctaagaaaataggtcccttttagagttatagagatgagggaatacaaaatgacactttctacatttttagacctctgtttacggttcctaaggagagaagctgatcctgtttcccactcagagcaaatcatcaaagacgcaacaggaggggttaatttttacttcctgctgtggaagtttgggccagaacttgcttatcctgcatacagaactgcacaagacacactgcatcgaatcctgactaaggtttgtggctctatactctggggattttgacatttg

SEQ ID NO: 1343 - DNA, 447 bp, Rattus norvegicus
  Genbank Accession No. AI010191
actgagaaaaagtgaatttttaattatcttgtgaatctacttagaaaaacacacacaagcaatgttcacaactataaatttaaaccttttgcactaaaaaaaaaaaaaaagcaaaaaaaaaaaaaatcacgaaacaaacacaaaaccacaggcatgaactgtaaacctgtattaattatcaactagtcttaaggttaattcttaccagtaattcagtattttccttcttggcaattgtaatgttttagcaccaaatgatctcccgcagaggtactagtaatgctggctgccagttcgaggagacggttcccacacagccatccacttacagcacacacagggtctcgtggtgcaaacggtgtcacactctgacccccagggcaatggaaacaagacagaggcacggggtcacaaactttaatgtagtgcattcgcagggaaggccag

SEQ ID NO: 1344 - DNA, 572 bp, Rattus norvegicus
  Genbank Accession No. AI010256
gaataaacaagtttatttgtaaatttagtcaacatacataattgacctaaaaacttcaataggatacttttaaaaaccacttgaaggccatctctataaaagggatttttttgccaggatagtaaccaggtgtaacctaacccatcttcattggcagagtccaataagctcaagctgtactcttacccccatgtttataaactccacaaggaaaagcaaaccttgtacagttttcccccttaaagattaaaaacaaaaccaaactcagtctaggtgtaagaccaaacacaatgaaaagctcactaactagattaggaacagatgatgctggtgtgaatagcttgttgttttactctagagcccttaaagaaaatccccgttagtgttttgtgttaccagccagagggtcaggggttagtgaacatgtggtagaatgaggacttatgcaaggtttaatacgcatagcattcttctactttgttaaaaacaaatgcagtctagtcagaaataccaactggactaaattacacacaccttaatgacaagactccccaccacttgtgaatgtaaaa

SEQ ID NO: 1345 - DNA, 630 bp, Rattus norvegicus
  Genbank Accession No. AI010261
ccaaggacagtcacgaggaccacgatacttccacagagaatgcagaggagtccaaccacgacccccagttcgagccaatagtttctcttcctgagcaagaaattaaaacactggaggaagatgaagaggaactttttaagatgcgtgcaaagctgttccggtttgcttcagagaatgacctcccagaatggaaggagcgaggcactggagacgtcaagcttctgaagcataaggagaaagggaccatccgccttctcatgaggagggacaaaaccttgaagatatgcgccaaccactatatcacaccaatgatggagctgaagccgaatgctggcagtgaccgcgcctgggtctggaatacccacgccgactttgctgacgagtgtcccaagcctgagctgcttgccatccgcttcctaaatgctgagaacgcacaaaagttcaaaacaaagttcgaagaatgcaggaagaaattgaagagagagaaaagaaaggaccaggcaaaaatgataatgctgaaaaggtggctgagaagctggaagccctttcagtgagggaggccagagacgaggctgaagagaattctgaggagaagcaatgaatcattctgtctgtttcctttccttttct

SEQ ID NO: 1346 - DNA, 561 bp, Rattus norvegicus
  Genbank Accession No. AI010277
atatacatatatttatcaaatataacaaggtcatacaaaagcataatataattcacacatacaaaaggctgctgtatttgttgtcccttttacatcctatcttagacaaacaatggtgcagagaatgacaggtttgcacaacattctgaaaactaggttgttggtttttgtttttaacaaaacagacctggtcatctacaccttctctcaaacttctgaaaagaggcttactggggtgtaccctttggatcaacttaaataaatcttcactccatctgaaagaactatacattttcagtggttgaaagtcaggtagaaaaagaatttaaaatgacccataagtcaaaacatttcttataaaagaaagtttaaacaaacccaggtagcaaaaaggggaaatgtactgaatttaaaaacttctgaaaatagcatctttcctggaccactgtacaaaatgtgttcagaactgttggaaacagtttatacagacaagactacgggattaaaaaaacaaaacaaaactcccaacccctaccaaatgtattaaatccatttaaagtc

SEQ ID NO: 1347 - DNA, 376 bp, Rattus norvegicus
  Genbank Accession No. AI010293
gccaggaaaatccgacttttatttcttaaatactgtgaaggaaggggggaaatggtcccctggtgagaaagctaggggtcatcagcaaatgcccggtgggcattagggaagcgctgggggctgtagttgggatcttcctgcagtcgtttttgaatatcagaccggagctgctgcctgtagctctcctgaacctctggtgcctccaggtcccggctcaggctctcggggcttgtcaggggccgagctccggctgccttagctgcccggctcactgcctctgagagtagcagctgggggccctcaccctgcattgtctttcgtctcttggcaggcatgccactgaggtaggcatcactcaagggcggctgaggtttca

SEQ ID NO: 1348 - DNA, 547 bp, Rattus norvegicus
  Genbank Accession No. AI010295
  misc_feature (1)..(547): n = a or c or g or t
ggaaatcgggcctctgactcacaaccatgttccccccagaatcaggccccaagtgtcctaaaacctgttctttgccttctaatttaagtaagcttccacacatgcatgaccagagaaggaatgttttgccccattagtgaaactagaaaggctcgctttaagaggaaggatagcttatcccaaggagagagggcctctacatgtgggctggtaggaggggtagtagtagtacctggcacagaagcactgagttgctgtcagtgtcacagtcactcccactgcaggcgctgtgtgtgcaaggcccggcaataggcccaactacctgcagccagggcccaacgacagacatcctcctttggcagcagtagcagcctgtcctcttccagccggctcaagaggcccgccacacccagcatggcacccccccacattccataagtgttggctgtgaaaacagctacaatgaggatggtcactgcaaccaccagcagtactgcctgcccagctacagagcatncttcagggccaaggtggtcaccaaccactg

SEQ ID NO: 1349 - DNA, 543 bp, Rattus norvegicus
  Genbank Accession No. AI010301
catttccaaatggcatagcacacactattaaagaagtacactcagagataccaaagtctcatccctttgtgcagatgaagtgctggtgtttgatgtgtttctgtgtaactctttggcaggtaagaataaaataggttccctgacccattatcttataaggccacataaagcgaggattaatgaattaaagtgcattctaactgttaagccttcccatggaggctcagtgtcactgcagtcaccaaaagtagaacactgagattaaacacacatcaaaaggctctaaaaaatgccccttgatcagagaggtctcctgaaatttaaaaagtgcttgagaggaaaaaggaaattatgaattaactttcctgtttccttagaagaaattaagtaacatgaggaaattgtgctaagattctaccaagtagtgtctgtttctgtgaatgtgagcagcactcagtctttgtattgcactccctgggtctgaggagtcaaagatgtctctccaaagaactctcctctctgcctccttcccaaaacctgtga

SEQ ID NO: 1350 - DNA, 494 bp, Rattus norvegicus
  Genbank Accession No. AI010316
aggggcagatgcttttaatttcagcgctggggaggcagaggccagcttggtccacagagaaatcctgtcaacccaaccccccccccaaaaaaaagaaaagaaaagggaaaatgttcgagacttaagggccttgatagggagaagttttccccatggaaagaaagggtcagcagctttcaaaaggcttcctgttatcactgtgtgagttgtaaaatctctgggtactcttcaaaggtcccctggtcctactataagacttggtgtcactgtcttcaggctcaaaagggaggggcatgaaagaaatatggactcttctgggggtgacgctcttggatgtttctacaacgtactggtgcccactaagaatgccacttccattactgaccccaaaagaagacaactagtcctcaccccacctgactccagcttttggcctcctcttgccagccttctccctctgcgggtcacctatttgggacacctcttattaatac

SEQ ID NO: 1351 - DNA, 515 bp, Rattus norvegicus
  Genbank Accession No. AI010339
  misc_feature (1)..(515): n = a or c or g or t
aaagtaaactctttttaattgaacatttctgtctcctgttattctgcggggtgagaactgtccttccttacgcacaaggaccgtctcttcgccatcaaactgtcggtgaggggttaggctacgagcaagcccacagcctcttcagggtagggagctcagaccgtgattgtatttgcactgtttgagggcctcgctgaagccctcacacagggttaggtcgctctgagtggtggagcagtccaggaactgcttgatctcataggcgcagggccccatctgcagggggtgagaggcaggacgggcaggggcctgctggaccgcaggctgggcaggctctgagcttcccccactaaaggcactggtcagggcgctacccatgacatgccctacagctgagcccacagctacgcccgcggcggtggatgccatctgagccataagacccggctgtcccnaggtggcaggtgcggnggcggnggctgaaggtggtgggtgcgcangaggatgggctgggc

SEQ ID NO: 1352 - DNA, 412 bp, Rattus norvegicus
  Genbank Accession No. AI010416
gaagagaaatcatgatttattctctttaatatccatttaacattttgtcacaataataataaaaatagtatcttttcaaaatccacaaggatccagggaggagcttgtctccatctctttcccctcacatttgggaacttctggcctagtcccaggttctttggcttcctgccaccaggtccagcctatcttgatgcctgatgcacatagtcagtaaaaacagggtcccagggttggggcggggtagtcgggtacgtgggggctttgggagctcgtgaggcgggcagctgtggtggggtgggaggttacagaagaacgggaatatgtctgtggaatggaaaacatgtcatcaagccctggctgccttggaagagaggacaggactggagcaaggaacagctagcctcgtgcc

SEQ ID NO: 1353 - DNA, 533 bp, Rattus norvegicus
  Genbank Accession No. AI010423
cagatgaaaaaatgaatgttttctttattatgccatctttctaaatcaggttactctgggcaaacatacatagaccacaatgattgactcctcccaacaaccgacttacagttaggctgtgtgtggaatttcattcatgtcagagcccacaatgaacggtggaggggaggagttaagaagaatttagacaacatggttttctttcccaagatgccacttggaatacagatcttacacacccagccactttagttcataggtgaatggtatcaaatatccaaaggatggtgcaaggcagggagagaatttatataaaattatctaaaactccaaaacactacaaaagcatcttaagaaaaaatataatcaaagtaaaagcaatggtgtttatttcggtgaaattattttaaattagatatattaagctctcgtgtctcccaacttgatagaaaagttcctttcatgagaaatcaactttaatggcaaaatttttacatatcagcaaaatctgttatatttaaaaccctcgtgcc

SEQ ID NO: 1354 - DNA, 605 bp, Rattus norvegicus
  Genbank Accession No. AI010435
aacagcacctgtaaaaaaatgaagacagtattctaagattctaagatatagatgtggactttggaatgttagattgtcaaaacatcaactgtatcacatcagttaacaaacagaaggcaaggcaggctaaacaagggcagaatcttgttaactagaaatattaatagcagcaacttttgaaagatgattttattaaggtcattgcacttggtcatttattgctacagcacaaggccattcaattgtaacacttctcaattctgattgcaaagattgtctcattccgctcatacatttcaagtttaaatgcaagcataaaacattcatcaaaaaaatctacagagcacttagaatggatttcttgtctgtgatcacagtaaggagtgtaaggagtcctctgtcagaccaacccatcctcttcttgcatcctctgattttctgtgaagtcctggacagttggatagaggtaatacctttatagaaagagcaagcttagtggtcacaaacacagcaaaataacattgaaatcactagacacttagtggtactgtgtttcaaagaccagcaaatctgaactgtacattcactagtaatttggcaatgac

SEQ ID NO: 1355 - DNA, 627 bp, Rattus norvegicus
  Genbank Accession No. AI010445
ccacagggatgaggccatcaccaagcggggagttggcagtaggcaggtaggcatgactctggagcagcagctgagagctcacatctcaatctacaaactggaagcacagagagctcattttattataatgaaatagctggcatcttttgaaacctcacaatgtcagcctccagtgacttacttcctccagcaaggccacacctcctaatacttccccaccctaaaaaagctaccaacaggagacagagtattcaaatgtctgagacttatgggaggacatctcattcaaaccaccacagggatgttgacttagataaaatccagggttcttggctcttacacagaaagaatttcaggagaagccaatatgaaacaaagttttgaattattaaaaacagataaaagctagggaaatgatctagtgattgagagtctatatgactcttgtgggtgacctgaattcagttgccagtatcagaattccagctccaggggaatcccatctgtctggtctctgaggacaagggcattcaggtacacatacccacatagacatgcaccatatacataattaagaacaacaaaaggtgcttgaaaaagaataaatcatacctgagaacatgtggg

SEQ ID NO: 1356 - DNA, 530 bp, Rattus norvegicus
  Genbank Accession No. AI010449
gttacgtccaatgcacataaaacaggacaacaaaggggcttgaggattgcctaaaccacaaactaccattgattaaatctcaagatgcctcctaatcagttctctaaggaaacggacacccagaaataggagagctaggaccgcagtgactcgctctgcccgttagccacagatgacggcaggctgccatggcctgggatcccgtccttggaacttctcacaagaaatgaaaccaaatcaactctttggatctcaactgtctatgaagatgcttttttcccatggcttctgtctgagggacctcttgtgctttgtggcacccagccgatcatgtgggagccatgggtgggggtgcagtagctctggactgcgttcagtctaggatgtggcagggcaaggggtcatctgtgttagagttccctgtacctggagaaacacccaaacccctttcaccttcacttctgaaatggtaagactaatgaaaaaaaataatcacaaaagcgtaatatctagtcaaaagatgaaatatt

SEQ ID NO: 1357 - DNA, 612 bp, Rattus norvegicus
  Genbank Accession No. AI010453
  misc_feature (1)..(612): n = a or c or g or t
gcagaagcatcaggccaggccagcctgagtttaatattattaggaaggggacccgatccagaagggatgtgacttctgaggacagtgattaacgtgtgggatctatcacttttcccacaaagagggggctctgagtttctgattcaactatcatgaaaatgaaagggtggtcgaacttcacttgagggggcagagacatggggacggcctccaccacagtggctcctgcagcctctgttcccctctcatctaaggtcagcacagccttatgcacagcctggctaagcttcaggggggcatcctctgtgattccagagagatcagcatcattgttgaagacccgggtgatgcccagtgagctcaggagtgtcttcaagttataggttccagagatggacagtttggggaagtagagaatggctgaccttgtttgcctgtttagcaggaaccgggaaatgagatccttggngagagtttgctccagatgctgcatcttgccatcatcgggcaggaggaagatggcagtggcgttgcccaggtaatccatcatcagcacccagctggacagtgtgctgcaatagggcatgtcaaacatgcccaggcggttcatca

SEQ ID NO: 1358 - DNA, 152 bp, Rattus norvegicus
  Genbank Accession No. AI010461
aaacttgccaaggaactgaattatatttattttcaaaacagtaccacatattgaagaaagactataatttctcccttttaactaaaaatccaatgattcagatgaggcttttttccctggctataggagactggaatgaaataattttaagt

SEQ ID NO: 1359 - DNA, 439 bp, Rattus norvegicus
  Genbank Accession No. AI010470
aaaatatgcaatatatttcgatatcgtatacaatttaaatatggcgtgatagcacatgtcttgttaatttagaatatagcttttgaggggcaaagtctatagttgatcacatttaggagctttggaatcctggctcctggatggaactggtgatggaggaagcccctgagctgagggactggtcttgttgcagggaaatgagctgtacaaccatcttcatttttagaatgttcttgaaaacaccttattttcctggctactccttggtagatatttggaataaagtagtcatgctgattaacagtgtatagagtatgttccaggtcatcctgtagctctgagacgatgcttgatttggtaaaacagtgtaggtagttaccatccccgcatgaatatggtcagtcacatggcagtggagtaaccaggttcccctcgtgcc

SEQ ID NO: 1360 - DNA, 590 bp, Rattus norvegicus
  Genbank Accession No. AI010480
gaaaaagaaaatcagactgttttattgtcattatcaacagcccatagtttggaagggatgctgatgctgacacaacaccctccaacaagcaaattagactctcaagtagttcaatgacatgatgctgaataagttaggatgctgctgctgctgctgctgctggaggctcgaggctcacactcacttcatgttcttcacaaagtcctcgcctttcttgatggaggctttcagctcagggatggcctcggcaatcattttctcctcaaaaggagtgattttgccaatgcctaggttcttctccaggccttttttccccaacagcaagggtgtagagaaataagtgcactctgtctctttggactgaacaaaagagcactcgatgactccttccttcccattcatggcgtccaccagggagaagacaaagcgggctccagcataagccatggacagagtggcagagcctgctccagccttggccttcacgacttcagtgccagcctcctggatcctcccggtgagtgtggccagctggtcttggggaaagtcaaccttgggggtacactgagagatcagggggatgatcgtct

SEQ ID NO: 1361 - DNA, 394 bp, Rattus norvegicus
  Genbank Accession No. AI010542
ctttctttgtgtagactgtgggtctgtgtctctttaattctggaaaaatgttctccacttagaaaaaaaatgggcttcaaatttggtaacaaaccttatttacaagagacttttagctgtgaaaatgcacattcagactagcaggagaaaaataacaatgcaattctttcccaggaggcttcggtgtctctttgaaaatttaaattaacacaaagtagcaaaccttgaattaaaaaaaaaaatcactgtataaaccttatcttttaaaaagtctcctcaatatttttttcattctatgacattctacaaatccttgacttttttttaaactggagacattatgccctagaatttccttaattgcactttaaatatacttgaatttacccaccct

SEQ ID NO: 1362 - DNA, 477 bp, Rattus norvegicus
  Genbank Accession No. AI010568
ccaagaaaataaatttattgaactttgaggggaaaaatccacagacataaaagaaagttaaatacagactgcaggacacaactagtcacatggtgaataatggcttgtgtggccagcaaagtaccaaaaatgacattctgggactgattgaggtatttagctatttttggctatagcaacgtggtcagcctatggtgaaatggtaagatagttcatcaaaacacacatctttaagctgaataggttctaaattgatgatacttcatatgaactaaatcatgtacccattggggaaaccatagcagcaaggtatcagaaaaaaatctattaaaatctactacagaataacacagtgaaccttaaacacccaagtctaaatttttcactgtctctcctgcatgaaagagatttaaaaaccactaaacattaaccctgtttccccacaaaggtctctgcaaaatggtaaatatcattgaa

SEQ ID NO: 1363 - DNA, 105 bp, Rattus norvegicus
  Genbank Accession No. AI010584
gacggctatcaagtgcgttttattgaatccattgtggatagatgaatgttacacctgcgtgtcgggaggggcaaaggggcaacgagggatgcagctgcacatggt

SEQ ID NO: 1364 - DNA, 419 bp, Rattus norvegicus
  Genbank Accession No. AI010707
  misc_feature (1)..(419): n = a or c or g or t
agaaggaagaatttattttaatctatggttccagagggttaagagtccatgatggggttggagagatggcattgtggttaagagcacactgactgctcttccaggggacctgagttcaatccccagcaaccacatggtggctcacaaccatctgtaatgggatccgatgctctcttctgacatgtctgaagagaacagcagtgtactcacatacatttaattaatttaaaaaaagagtccatgatggtggagtgtagggagacaggcttctagtgacatgctccctccagcaaagccacacataagcctccccaaacactgccaactgggacctggtatcctaatatctgagctcattcanaccaccacagccaggagcccgatttcttcagagcctttactcgagatcaaagctcgtc

SEQ ID NO: 1365 - DNA, 380 bp, Rattus norvegicus
  Genbank Accession No. AI010755
ggttgtgcaaaactattgtatttacaaaaatggcacaaaagtgaatgcaatagtcagtgcacatgcacgcccattcacatcttcaacagagaaagctgtccccacacactgcagaaccgaggaagaacactagcttcagtgacagctggtaagcactggagtcacacaagtcacaccagagcgggcaaatatcgcccagataagatgctcttgttaaagctggaacagcaggtttaaggccgtcaagtccaagccatcaaatcttttgcagcccatttacttgtgtttggattatgtgtcttgtcttccaacttgtggtcttaaacttctgtcttacaaaattcaaaaggaagatgcagaagaaatcaacacaacagagg

SEQ ID NO: 1366 - DNA, 404 bp, Rattus norvegicus
  Genbank Accession No. AI010885
aatataaaaccacttgaagatgagttactccaacttaagaagtgctttcacgtttggtcacttggcttcttcttttcacaagtcttttctagatgaatttttggagatgaaaatggaaactaaggccgcgtccttctcagcatcaggcaaagaagtcaactgctgttctggcgagagctacttcagtaaatgactcagctggtcttgcaggtcaggcgactgttcaacgttcttctgaatagcttcttgctggtactgaaggtgtgttgttattatcgccatcttccttaaactatcttctgagtgcaagatggcatcttcctgtagcaccatatttcgagctgcctgccccagcagctcagagcttcgcgagcctttcagcacctgcttggtgagcgcgatta

SEQ ID NO: 1367 - DNA, 501 bp, Rattus norvegicus
  Genbank Accession No. AI010944
gacataattcacctaaatagaatagatttggatataggtagtgttggccaggtttatttaaataatgcccttcagttgctttaactttatttcctgaatggtataatcctagaaatatatactattcacttatatttgcaaatgaaatgcaaattggacatatacattaaagggatctagcacatgacaggctcatcaaataaatagtgcaaatacaccgaatgctattatttttttctgctcaaactgcttattttactctttaatattttcaaaatttacaaatcagtatcttagacaagctaaagaaaattgaaaggagcaaagtccttttacaattacactgccttgcctctgtcttgtgcttaccaaaccagcttctggaacattcatcatttagagcagcgatgcttttttcctgttccatagccattcccattatttcacttgtgtaatcttttcctatcaatgacatatatccaacaggataatcactgggac

SEQ ID NO: 1368 - DNA, 364 bp, Rattus norvegicus
  Genbank Accession No. AI011003
actggaaaatacatacagacctttaatggaaaaagaagagcaaatctccatacaataaaactgcatagtccatttttaaaaagaaaatcaaaggcagcacagtatgcatgcagctgtttgtgagaaaagagtgtctgtccacaagactatgcagctgacatggagcttcctgggtcttcctgcaagttcaatgtgatcagtggaatgtgctgctgtacccaaagccagagcagtgccatctgcccaggactctcctaatgggagacgaggtgactgaagggcctgtggtggaagctgctgtctagtccttcccactgaaagagcgaatgcaacaagttgcaagtctgagacaacgctgcagtcc

SEQ ID NO: 1369 - DNA, 485 bp, Rattus norvegicus
  Genbank Accession No. AI011020
atatacgtagaatttatttaattaaatataactatataatgtatataatcatttgtataattaaatttaacttttattttaacttttttatctttgcaaaataagtggctggaggaaaaatccattttacaaatcaaaatctcccctctggatttaaaataacgtttcaattaagcgcacagagtacatattatgtatgtctggatttatatagaggtaaactaaatttaactttttaatctttgcactataattataataatttatataattattgatataatttaattttaatctttgcacaagcgctttgtaaaaaagtgtgaggatttttccgggaccccccctactctgtactcacgactggcacacaggcgcagtagattccttgcaaaacatgttacaggaggtgcacactcacgaactttacacaacgcgcacacttgcacgtatcacacagggtacacattcacacatgtcacaca

SEQ ID NO: 1370 - DNA, 463 bp, Rattus norvegicus
  Genbank Accession No. AI011058
aaaaacgcgtggcctttatttggctaaatgacaaaagccaaaataattctgcacaaagcattagacagtaacgtgatacactgaactcagaggctaactccccactgacgctggtgatgtcatgggtgactctttccaacagtgttttctgttcaggagcctcaaagctaaacgcccgaccaaccaactaactgttcagaacagccagtttctccaatggagtggaaggtgctcacgtcaaacctagtgagacccagctggggccgtccgaatgttaatcctggcattcctgttctcttccccaatctcatgccaacaaaaagttctggcaagctgaatatatttcttttttcttttaggagagttaacttttaatagtttaagtccaagaacatgtcctacttattttgaaaaatagaagctagggaccattctttatcccatgatagtctattctgtgaga

SEQ ID NO: 1371 - DNA, 196 bp, Rattus norvegicus
  Genbank Accession No. AI011177
aaccctcactaaagggaataagcttgcggccgctcacttttttttttttttttttgttttagggctttttatggagttggtagtgttctacttgtttagtttgaataataaggtggagttagttgattttgatagtctaggcgattgattaatgtatgagattgatgatgttggggttatgttggagggggggatt

SEQ ID NO: 1372 - DNA, 490 bp, Rattus norvegicus
  Genbank Accession No. AI011285
aagatttctttgatagtaacttttattagttgtacaaagctcattcagtctattgctcatttaggatgactgttgacaaatatagcacatggggcaatttgagccacactgaattacactccagaagaaaaaaatgacatgctaaatcaatgtattttaaaatttcagataaagattttccactgtaggtaccaaattacaggtactagtttttgttttggtttttactaactttaagacattataatgtttaatggtaaatattactaagtacattttgatttataatatttcaacaatgttttcttacacttatttagcctgtttattgacattcacgtaaaagagcacatagtccaaatgcaactcagaatggtgacctctaaaccttctgttaaactaccgtagtaatttatacaattaccatagtaatttacacagttaagaacaagacaaagatcagagcaagtgatggcttacttgattttac

SEQ ID NO: 1373 - DNA, 452 bp, Rattus norvegicus
  Genbank Accession No. AI011350
atcagaatattttatttcaagagttaacactttaaaaaaaagtagaaacaactgctatttccctgagtgtaaagaactaattgtccaataaaaaggcaattacaaaattaagcaattagaggtacataattttccacatttaactgtattctattacaaatgtattcttaaagtgtttttgtattttggaacgtcaacatttcacagaacggaaggctcactgtggacctgtgccgcggttaggattagtcggctctgtctttatcaaactccagggcgatctttaaagcagtgctgttgaggcccacagactgcatgttgcatatgattgagacaattattcccctcgggggaaccttgttgtttacggcctctgggtccagttcttcagggaggaccagcagcacactgctggcacccacggcaccttcagtgtgtgaggcgtagtgccg

SEQ ID NO: 1374 - DNA, 389 bp, Rattus norvegicus
  Genbank Accession No. AI011387
gaataaaacacatttattttagaactgtaattatcccagaactaaaaacatcttcattattcacagttaatacaacagtcaatgaactggtacattaataaacagtaaactactacagtaatggtaaataaagtatggctacaacaaacacggatgaattatgatggatgacagacacaaaacaatgcagacaattctttacacacagttcagaagcaggcagaactaaactgttctgtttagatttgcaatatataccagggataactccaaaagaaaaaaatgaggcaaccgttaatacaaaaagacaacagtaattattaagggtatttaaaatgtttgtgactggagagggattcggaaggaattggataccaatgttttactga

SEQ ID NO: 1375 - DNA, 566 bp, Rattus norvegicus
  Genbank Accession No. AI011448
gagctttgacagggaaccctttttattttgtgataaaaatgttttcatataaatttcatcttaaactacttttagaatgaaactttaaaaagtaaaaacagtgtgcatactcctttctacatttagtcaggaacatgcagtcattttctggttactgagtttctcatacaaacagatacaaagtcacttttcagggaaatgtacacaaggacgttgccatagtaccacgacagacaagggtggggcctcaggacatggacatgtgtccttccaaacagtcctcgaagtcaacgtgctggttagagtccgggtcctgaaatcgcatgcgaacagaacgttacacctttggttcttttctatacaagacttcaagtggccaagtttaacaaaaagatataaccaactcgtgctgtcggctttcattaaaatctttaacacagtctttctttccttcaatcccccccaccatcgcctaagaaaacgatgcttaaaacaaaaacaaaaacaaaaacaaaaaaaaacaaattaaaaaaatatcttcaaaggcaggcaggagtcaaagggag

SEQ ID NO: 1376 - DNA, 599 bp, Rattus norvegicus
  Genbank Accession No. AI011474
acagtgaaaatggtgaggtcatttttatttcagtacttgacaaaatacccataaagttcaaaacttagaccattatacaaaaataggtctctacaagtgacatgttgtcttcatcaccagtagcaaatctatgaagcagaaacttgtaacttcagtagctttgtaagaaaagcgcaggacaccgcacgctatgcatccggcagcattgccatttgaaaaagtttaatcttttcacccttccgataaatacacaaagtttataatttaatcatttaaattagcattccacaatatacatgtaatttaatgattactgtgcatgaacacacacaatgcttatatacacaaactccagtttgtcttcatgtgctgctgaggatttgtatacaatcataagctgtgtatgtattggtcccgttgaatattcacaatacaaaagcacaaaagagccattgatttacaaaagggaatccatttaatattcaataagtatttcaaaggattatctcctcatgccaaaatgaaattgagtagtcgaccctgactgtatagctccaagtcgccttttcagtgcctctagccgagtgacatagtctgtc

SEQ ID NO: 1377 - DNA, 522 bp, Rattus norvegicus
  Genbank Accession No. AI011492
ggtttgtggtttgtttttttttttttttggggacagcttatggtgaaattcatttgtagatgccagcaagcaaacagttcacagaacacttaagctttctgtgctcctttcagtgggaccctaactgggacttactacattcattctgtcccattaataggacagctttgaagactgtcagatggggactccagccagagttgaggacccttcatacataagtagagtggaatatatgagcagacacaggtaataggacattccagcacctgctatcaccccacgtagggcgggggaggccaccacatgtgctctggtcgtgtctcagccgctgggtctcttgtgtactcacggcattgtctggatggaagacgtatgaggcgggtgagttgtctaagattagcacccgccgcaggtctcggcccagcctgctcaggtcctttacgtagtttccccgatggaagacacaggactctcgaaacagcctggcacggaaggctccccacttgtccagcagatcag

SEQ ID NO: 1378 - DNA, 689 bp, Rattus norvegicus
  Genbank Accession No. AI011510
aaaaatttaagagctcatttatttaaactttactctcattcaaggcaccttccacaatggttgaccaggtctctgggtactgtggcccagcaaagctgacacataagatcagcacacagggttgagaaacaaacaggtgacatttccaatcgtttatctgaaatccacagggattagctcaatgatcctccgggtacatgagggaatcgtcaccattttagacatgaaaggttagagaatttacatggtttttttgggtgaccaccttggggggtgggggagacaaaaagccatttaaacccaaccactgggcaccggagtcactactccctccagtggcatcacacagaaccatgcgacaagtcgctggcagttcgttagattaggaatgagaatccagtgcgcccggcacctccctccgtggccactttgagtaggtatctggcattttctcaggtggcagtaaatgcgcctcacagtatagaaccagcagaatcgggacatttgcagtctagccctgctccctgggaagcaacatggaccctgaaaggaagcaggacagagccggcctggtactggtgcctgcccctgagagtgatgagggtagcccttggtgacagctataccaacttcatgcggacccctggcaaatgtccttgaaaggaaaccccacatgctctcaagccact

SEQ ID NO: 1379 - DNA, 160 bp, Rattus norvegicus
  Genbank Accession No. AI011547
cagaataaaatgcagttttattatgatataggaaagactaaaagccatcagggaggagtcaaacagcccctcaaaatgacaagggaaaggaaagttacataaacgtcttggtaataaaacttcccgttgtcatcacctttgcagtgccggtggaggactt

SEQ ID NO: 1380 - DNA, 405 bp, Rattus norvegicus
  Genbank Accession No. AI011556
cacacggaggtgctcggtcacagagaaggcacttaattaggaaggtcatctaatcccggccaaccatatcctctcccttcaccaactcccttggcacttgtttgtgggtccacttaaccctcataatctggggagagagcctaagggcttgaactccagactcagcaggtatgggagtgggtaatttgcgcgcctgctgccttccttggatgtggtagccgtttctcaggctccctctccggaatcgaaccctgattccccgtcacccgtggtcaccatggtaggcacggcgactaccatcgaaagttgatagggcagacgttcgaatgggtcgtcgccgccacggagggcgtgcgatcggcccgaggttatctagagtcaccaaagccgccggcgcccgaccca

SEQ ID NO: 1381 - DNA, 426 bp, Rattus norvegicus
  Genbank Accession No. AI011678
cggcacgacagactttattttggcacttaaacaaatttgctttacagcagtgacaaaatatttgccagtattttttccctggcatagatattccaagcaagtcattctacaattagggtttcactgttttgcacagttagaggtataaccactacattctcagcctccgtgattgagggcattgtgcagctttggaagggcccatcatttcctcttaattctaaataaggtgaattacggctataattggacagaaattaaggccattaaggattcagacacaacactgttccaagtgttactttagttttgtttgaatgagttctgtgacaagcccagggaaggtgctcaaagtagtcaaacttttatcgaaagttgactgtatgttggaaaagttgcggttcttgctgtcttctttctacttcc

SEQ ID NO: 1382 - DNA, 351 bp, Rattus norvegicus
  Genbank Accession No. AI011706
gaagtctcaaacaaaactttaatttcctgtacatactcctgtcaaatgaagttatttcctgtacaccacttttgccaactggtcttctatttcctttcatttgacctagatcggctacgagacctagagaaggatcgagacggcttgtgatttctctcacgagacagagacctttctcttctcctatctctagaaagagacctgctccggcttcgcgaaaagcttctccttcttggggattagttttgggtttcaacaagaagaaatggtgaggtgaggctgccggactgacggccaggaagaatttgctgaaaaggttttgccagatgttgcgttggatttagttggttg

SEQ ID NO: 1383 - DNA, 616 bp, Rattus norvegicus
  Genbank Accession No. AI011709
gagagaaacaacaccacaaatgagtggctgactttattcatccagctcttggcagatccttttggtatggacagatgttgctgcagcttccggcatgggcctcgagtgcagggggtagtttggggaaagtccagagggcacggcagacaaacgccatgcttactgggctcttcttgcaaacgaatgtggaagattagaattatgttctcacaccaccagcttggcttaaatacttctctgacaaaaataataataataaattatcttcaactcagaaaataaattgtgttcagcagggtgacaggagggtccattcgtcgcattgcaccacagggctaccaggagaggacagacaggcaggataccaacacaggggtcacagggcacagggcccgcctgaagtgggtaaacatgtgcctttgtctccaggcaggtggcagccctggctgtgtcatccacaggagacggggcctccttcctcctcacgtgcgcctggtcttctgattcttggtttgtctcttcatgtcttctgggccactgctgtcagaggccgcctggccaaaggctctgactccctgaagacgactcgtcagttgcagcagcaaagggatgagct

SEQ ID NO: 1384 - DNA, 439 bp, Rattus norvegicus
  Genbank Accession No. AI011734
actatagattaagatttaatatataatttacttcacatataaagacaattctggctactatttgggtatggtaatggtctggggtttgtgaataactgagtcacagtcaggcctgggcagacaccatcttgctcatgcctgagaaataggctttctctctctcgctcatcacttcgaagtgtaagggcctcctgcagaagttgcattcagctgacgaatgtggcttcagttccagcccgactcgcttccacgtgagcagttttgagcatagaacagcagagatttccctgccttctgcagaaaggcctgagggactcgggataagaatgggcatctgcgaacgacagtctccatgtctgcaaagtgtcccgggtcctgcgcgggctctcgacgagacggcggtgggcactcgagcggaggacgctaaaccgaccagtgc

SEQ ID NO: 1385 - DNA, 643 bp, Rattus norvegicus
  Genbank Accession No. AI011738
actaaaagtttgctttatttatttttttttgtgaagtcaagtgctagctattaattacagttagattttgttttcgttcttttcaaatgttatcagaatattagcatcaccttatcagtaatcaaatacactaggtttcaatgtttctgtccacatctagaatgttcaggtgatcaggaactctcttactggattcctttagatttgagttcttgattatatttccagatccgaaacagctgagaggctcctgctgaccccacaaagaaattaacagcgaacaaactccaattttttggtataattacaagtgagtaccttgaccaaataaaccctgtagccatcagcacagtggattgagctgtgctgagtttctctgcaggtctggccatgtcagctaatccagcacataccaatccccacttcattatcggagcccagaaaaaaactgttctggggcctgccgggtggttgtatagcggcctcaatttctttggcagcaacaactccactttatccatgagtcggtggtaggtggcccgcaggccttgggcgccggcagctgccatctcggcggcctaaggatccactgcagctgggtgggaacgccgctgtgtccgcgttcctggctgacaatgaaagg

SEQ ID NO: 1386 - DNA, 468 bp, Rattus norvegicus
  Genbank Accession No. AI011746
gaggcctaaagcccaaatcctgcaagctgggctccaggcccaggccttcctcagggcccacagagcccacaaagcccagggggcacaaaagggaaccccctacacacaaggggatccccaacctgccgccccacctggcacacaggtcaaaagcccctttggggctggtatcaaatctagcttaatccttcttgctcccgtgttgctggctggggaacttttgatgcaccactcggagggtggtgaaaaaattgccaaggaagaggaacggaagcaggaaggtgaggcctttccacatccaagactgaaagccctccacagggaggtccatggtgtgtcattcgcccagggctcacaggcggtaaaggcacccgttctggtagtaatactgcaaaaactgcacaaaactctggtacatggagaaagacaggaactggttccggaacttctggtacatgagtccatttg

SEQ ID NO: 1387 - DNA, 614 bp, Rattus norvegicus
  Genbank Accession No. AI011749
acacaagtttatttggcattggatgaaatggttctcacagcatcttaagaaaagatcaatgccaacccgaccaaaaatacacccaaactaaaacctttaatgaaaggaatatgtaaaaacaggcattgagacaatgtacagtatcaaattccacttcaaggcaggtcagagggcacctgacctctcagaagagtggcaaggcaggcctgggaaaggggcctcctaggagcctgtccctctggggccttgtgggatgggcaaggaaacaccaacatcagcaaatcctggatttgggattattcaccagtaactggaatcgcaatagtgcgaacagccccaaacacaggccttccatgcaccctgaaggcatgggggacggggacccccgcaatcctgacaggcccaccactgcagcaccagcccactttagaccaccctctccacctgggcctcctattctcaaccccagcagccatttggtccccacttaagttccagcctgtacagtcttctgaggcactggtgtgtggtccttagggttcttttgggtggcctggcaccaatacagttcccaactgttgctctggagcatggctgcccagtgcctagcactt

SEQ ID NO: 1388 - DNA, 523 bp, Rattus norvegicus
  Genbank Accession No. AI011754
aagtcataaatgccattcaaaggccttttattcatatacattacagagactatgtaatcattttttttaaatccctagcttggatttggataatccctttgggtccctggtgttttccagactaggtggcccagggtatcagtccttggcctttagcacgcagtcacaaaagtgcttggggggatgttggctgtttatttagacacagctgtgtttgaatggagagtggaaaggctcatttttatgcttgctggctggttcaacaccctcaagactcagttcggccatcggctactgtaggttcctagtatagctgccaggactcttaaaagtcatcgtcatcacagatgtcaaggtacacgtcaaaggcctctctgttgcagtttccatcaggagtgaagacatatttgtggaaggtcccatctacgcagatggcgattacagaattgacgtttttggaagtatttcgaccaaaggcgcagatgcaggctgactcagcaggcacagtaaagctggccaggct

SEQ ID NO: 1389 - DNA, 542 bp, Rattus norvegicus
  Genbank Accession No. AI011799
ctgacagcttttcctctttattctcaccccgctgacatgcaaacagaaccgaaacagtgctgctcaaaaaaaataacaaaatgttttatacacatttccatatatacaaccgaacaacattttacaggttatcttttgcacagcaaaagaaatataaacattcggctccaagaacacagatatatgtacaaaaaaaacaagtcaaaaatacttcacaacggtgcaaaaatattttacatagcatcatggagtaggagctttggggcatgaggaaggtgtgtatttctaaaggaaaattccttttgtgtgtgtgtgtgtgtcttagatattagatttctttaactgtaaacaaaacacaactttcataccccgccctccgccccccataaaagagttatctgagaaatttggcatactttcaagagtttgagtctgacgtaaacagcccaagctctcatatccaaatgaactgggggcaggtaagcggcattaaagcccaacattatgaaagtgactttgttaatgagatattgaagacagat

SEQ ID NO: 1390 - DNA, 517 bp, Rattus norvegicus
  Genbank Accession No. AI011806
tattcaagtatctgaaaacatcctacaatggaacttagtagatggctgcttgtattgtaccatggaccacgcacatggtgttttcagaagacttgagatgcagtgatgtttaaaaactgtacacctgacggagaaccaaggaagacaatgtttcatccggatccagaggcgcatcagattcaacagcagctccacttggcaaacagctgttacatgatggtatccaaggacagattgttgacaatggacaaactcagaaatgcttccccaaaggtggatggttctttaaaaagtttcacaacccttgcaggaaaacactgatgcccaacacgctgattctaagtccaggagactgggtcttctcggttccacacagcaggagtgccccaataagcatgtatctgtgctgtaataaaagggtcctttggactggacagaagggacgggagcaaatgccatcagtcatagtggatggcagtgtaaaagatgatccaaatgacctacgggagacacaagc

SEQ ID NO: 1391 - DNA, 533 bp, Rattus norvegicus
  Genbank Accession No. AI011812
aagagcaataatctttattgagtttttttaaaaaaagacaaaataatattaaaactcaactgtcacaagtaaacaaaacagtgacttaggttagacaacgttataatgtacgcccaaaccatgtttgggtgtaataccccatgatacagtacagtgtttggacccattcccactcaggagcaatgagaactggacactgtagatgtcagcactgaacacagaaccgttatggagtctacggccgagcctctgctcttcgcacctattggtgtctcctttaacgtcgtagtgcacatctgcgtttgctaacggagtccagaggtccaactccaggttagccagtttccactgatcaggatttctatagcttctgctgggacacggtccttcagaatgaacctacctcactttccacttctaactctatggcctcctcctttcctcctctctccagggcacagctctctcaccttcaaatgctgctcacacagtgctgaacgtgaggcggtaacttctgacaaagttgcagttta

SEQ ID NO: 1392 - DNA, 384 bp, Rattus norvegicus
  Genbank Accession No. AI011843
gacttgctcactccagagaggaatcaagggggagagggcctcaacgtcacccactctcccggatgtcacgagcttccaagcacacaggataaggtacagtggctttctcttaagagggacatgctggatggtgtggtgaaaacagggtccccccgcccccacgctggctgactaatggggtaacagttactttcccaagccagagtgaggcaagacgagcctgctgattgtgaaatggacttctgttttctctgccagaagacaaggatccaagagtcgccggcatcagcccgcctccctcctcgaaggtcacaggtcatcaccaccctgggctggcacagaaggatttaaccagagcagatcatacagtgactgaggctggag

SEQ ID NO: 1393 - DNA, 493 bp, Rattus norvegicus
  Genbank Accession No. AI011920
gaagattcaacatttatttaggttaacaattcttcagcaggagtgcatggggagatggatatcagactgacccccatccctacaaaccctgttttgtccccagacaggatactaagcaggacttcctgatgaaaacgggctgacggccccaactcatgcctcctgagtctgggagaagaacttggacttggatttgagaaatgcttactgagagccaggcacgatgatgcgtacctacaatccagaggcagaggcagggggctcactagttcaaaaccagcctgggcttcatagtaagttgaaggctacatggtgagattaaaaaaaaaaaatcaagatcaaacaaacaaacgcttcatagagaagctacgagggaggatgctctcagaaggtaagttgcgctgtggacactcagcacctgtcccagaggttagccagtttcctgttcaagtgtaaccttgtaggagagtgcaaccagtgcttggaggaggca

SEQ ID NO: 1394 - DNA, 465 bp, Rattus norvegicus
  Genbank Accession No. AI011930
aagagaaaaaaaataattgccagtttcagacttgggggaataattccgcttagagtaaaaataagtctccactcaaatgtggggtgttccgatctgtggtttgactccttgtactcccttgccagcaaagggatacaaagaaatagctagtgtaaaggagttactagcaaacttaatctctagaaaacgggatactccttgagcatgttcatctgcgttctgcttgcagaaggggccattcagtagacggagttacagtaagtgatcccattggtactcttcattcactaaaacacaagaacagttctcagacatcaatatatatctgcaatgcaacttttctccctaaagattagtcaccaacactggtgacaatctgcttagaaaatgactcaaagatgtgagggaagaaatactcagattcatggctgagattgcatactgaatctgatggttacaagttct

SEQ ID NO: 1395 - DNA, 454 bp, Rattus norvegicus
  Genbank Accession No. AI011982
gaaaggataagtctttatttcaccttccagtatttttgacagtttctctgatgccggatcttcaatcttaggagtccaaatatacagcgctcagacttcagctctccagagcaaagtacccagatcagtcctcagggaatttttaggtgggaaaaatgacaatgacagatttctctgtaacaatccatgtcaatcttctcgcttcactgaaacacttttaatttaagtactccatcatccctaaaactgtgaaatctaggacaggaaagcactcatctctcatacacaacacaaaagaaggaacacagggtgagcgagcgcgaactccaagggccaaattgattcacccagaaagtggatttgattccatttaacaggcattcgtacaaaactgttctgtcttctcaaggtagtctggctagacttttgtatatgggaagtaattcccatatag

SEQ ID NO: 1396 - DNA, 468 bp, Rattus norvegicus
  Genbank Accession No. AI012074
aaacatctcactacttggtttaaaaatcatgatagtggcttcttcacaagctttacaaatcatagggggaaaaatgatttcctccttctctatggaaatcccattgccagtagacagagttcttcgccattgaagactggcaggaaggagagaataaacaacacagcacgaacggccggggggctctgctttcaactcaagctcaggctccttggacagaggctcggcctgtggagatctgtggcccactgaggcaggcctctgccttgaaggccatcagggcccctgaaagcctagagtgttgtttatcaaggcagcttcgtgggaatgaggaccctagcgagcctatggcttggacccttctccatagcaaaaccagacagaggctgtggatccagccactcggtgctcaaggctcacacagctccctctctatttggctcatagaggctaattggtcaaacaaac

SEQ ID NO: 1397 - DNA, 458 bp, Rattus norvegicus
  Genbank Accession No. AI012117
atcatttaattggttttattgaaattcattagatgaaaagaagtattggtgttccatagaaaagaattaaagttgtactttgcatattttaaacatcaacaactgcttaacaaaatccatgtgagttctacttttttgttgtttttacttaagaagcaaagtctgatttcaccaaaactctctattcagtctttccccatcaaaacaatctttgtttcaaaattctctattcatctatgcttaggttcccaaaaaagtgtccacatttagcaatataattaacaatttatagtgtgtttgaaaatggaactctttctgaagatcaaaatctctaaaaggcaaatcagttctaaaatgtgaaactcacaaatgaacaggtctgatttagaaacacaaatatgccagagatactatgaaaagcaggaagaattttacttcaagcacatactgtggcagtt

SEQ ID NO: 1398 - DNA, 501 bp, Rattus norvegicus
  Genbank Accession No. AI012143
cacagtctctacattttattttttaaaagaaaggcagtcagtcagttgttttgctgacagaatcagggcagcactgggaggaaaaagtcaaacaaaagtgacctcggtacagccctgtacaacaaagagatgctttacagcaaaaataagatcattctggttttttgaaaacttttatttaatatttaagtaagattagaaacaacaagattttttttgaggctgatgagtgcaaagagaaacgctaaacatcagttatcacctgattagctcgcttaagtgctcggggctcagactactcagtgacataccaattactgtgtggcttgagaatcttgcagcaaaaagtgtcctaaatgaaacgctgggctagagggctgtgaagtctgagtaggaagtggcggtggcggcggcagccttggcttcttttaggctgagcagctggttaccctattgattagacaaggacctagcatccagctacttcatgttctgactttt

SEQ ID NO: 1399 - DNA, 484 bp, Rattus norvegicus
  Genbank Accession No. AI012144
attcttaaatatggtttaatactcttctccatttctgtacatcacaacaccgagattctgctcttagggtctctctgcaaaggctagggagtgcagggtacggtttcacccctcacttatgtgtgtttgtatgcgtaagtgtaacacatatcggtatatattgatacacacatcaatatataatgcaatatatatcaccaaggagaacacattgattaaagaaatacaaaaatttggcatcatttccaaacttaaatagtaaaaataaaaactagaaaaagagctgcataccctaaatgtatcatgtgagacaacaagcatatgcaaatgtagtttacatccgatctctctggtcttgtcagtcacatcagacccatttacaatggcaaaaccctaaggtactgctgggaagagtgttcgcttgcttttgggtgttctgcaaacaaacagcagagcccaaagcaaaagcctgctctggtgaagc

SEQ ID NO: 1400 - DNA, 454 bp, Rattus norvegicus
  Genbank Accession No. AI012160
gattaagaactcagccagttgtgttctcagcaagatgccctaggtgggccctgactacatctggctttatgccagactgtgctggatttgccacaccataggtcagagagggtgtggcagacatctagtgctcatgattagagcttggaggtgctctgctcggcttctcaggtccccaggagcttcagtagcctgttgtgtagacagataagaagctggaccaggaagacctccaaagtcagcctgctaacttgttatccaaaaatggaatggtgatcagagaaagccatgatgtctgccctgaagttcttggtggctaggagatgccaaggggacaacctaggtggtacctcagagtgggtagagatgccagaggctgcattggaagcgagagtcttcaggatgtgtcttcaacacttggtacacctctacggggggcttcaagcccatctgc

SEQ ID NO: 1401 - DNA, 398 bp, Rattus norvegicus
  Genbank Accession No. AI012177
gctcaagcacaggacttgaggtgtgcctggaccttcagcgtgcattaaagaggctgaggggatggggacagggatgacctggatgaggaaactgagaggaggggaggaaaggggaagtactggtaggagctgtctagaggcgatcactgtgataccgggggatgttaccgggaataccatctcaggagagcaaggcaagagaggtaatggacacaacagtggttttcccatgcccctagcaccttcatggagaccgcaggcttggaaaacaaccacagagggaagggatgggaaaaatggctgcccaggagtcttctccaccctggcttatcagaccccatccctatcacacagccccttcaaccacttgaaaatggagcaaacagagggagcaaaat

SEQ ID NO: 1402 - DNA, 471 bp, Rattus norvegicus
  Genbank Accession No. AI012181
aggaatcaatcaaaagttttgtcatttatttaaaaaaaataaaaaataaaagggtttaaaagcttcaattagttccagcaacacccagtccccaaatgcccaggcaagggccctgtctttggccagaaggcattgggaggaagaaggaagtctctggtctaacctcaggcagctccaacaataagctggacctgagcccggaggcagcagagtgggcagggagctgggctgggctgatggtaagggctctgggaagcccctgctgtctctgccagagaaaggagaggccaaggcacagagcccctcccatccctacactctaccaagagcccaggaccctgggccagtctcgaagaatctgagagcagaaatcacaaggcactgagtatgagagtctctgtgggaaggcagcattatgccgctggtgctctccctccaggcccaggctcaatggcaatccaacctgctcca

SEQ ID NO: 1403 - DNA, 385 bp, Rattus norvegicus
  Genbank Accession No. AI012215
attttaagggtaaaacagggtcactttattacactttttacatttgttcacaaacagaaatggtcgcaactctttgacactcagtggaaccagagcttaagatagcagggacccagtagaccttcgagaagagacctggcttctagaagggattttccataatcctacataacagaggagagccctgtcctctatgacaaccaggacttgacaccgtcgacccggtcctccagctctgagtccacgtctgagtcaccctcaagtttattctttcttttctgacattttgtcaccatatcctgcaaactgttgacaaagtcctcattctcatcactctccatctcatcctcaatggcggcttgcaagtccccaatgcgtttgaacg

SEQ ID NO: 1404 - DNA, 574 bp, Rattus norvegicus
  Genbank Accession No. AI012221
actgaaatacgttgtcttacccaacccacccaaaaataaaaatcttacccttgtcctctaatctttcccttatccccagtcccatccccggccctgcacaagtgccccggatttcctgcccattggctatatcggagtgtgtccattatgtagcaacgtggaagcctctgtggagagcacagagtgggtgaaggacccttaaaaaggtgctcatttgagagccctggccacttgctcataggccagctctatctcttcatcgtcaggacaggtggaggcgaattcttcccgagcgtaagcgttgctcaagtaccgatgcactccacggaacgcctccgggatggtgaatcctctgtactttttgcacaccacctggactatgtgaagctttggcagcaggttgcagtcagccagggtgagctcattgccatccagaaacttcctctgagagatgccctcatcctcggcgctggtttcatccacttcttccgggaggggggatgtcaagtaattgtctagaaccttcagggctttcaggagtcccttctctaggttgtcattgagggccgggttt

SEQ ID NO: 1405 - DNA, 571 bp, Rattus norvegicus
  Genbank Accession No. AI012231
aacccatttaactttgtatagaaacaaaaaatacctttccatttgaaaaaatcaagttttgctgtatataaaactaacatgtgcacattgtgcttgaactgcaaaggctgtacagctttacagaggaccaccctgcagaagggcatccggtaaacacattattgcatatttgacacatggcatataccccacatgtacaatggagaagcaaggaaacaatcacaagaacaaagcagcagcttttggtaagagtctgtacactaacaaagacagaggcctgcatctggagggtgcggtgtcacttctgcacttgctcacagatgctgtgtggttcttgaatgaagctgttatatacagtaactcctaaagggtcaaatctgccctttgctagaaacttttggctgttttactactgaaatggcaaaagattcaacatggaagctaactcagataagtgaaccaaaccattacctttaaagaaaaaagttaaagagtcacaataaaaatttaaaataccctcgccattctctccatactcaggataagtaaacacatgatttaaaaacctagg

SEQ ID NO: 1406 - DNA, 540 bp, Rattus norvegicus
  Genbank Accession No. AI012281
gaaagtttattacaaacagctgttttcttgtactgtgccatcagactaattggctcctagaaatctggatattcatgtttgagaaatacacaataccaaattacatatgttacaattaagtcaggttaaacagaagcacccagaagtcaataaactggtaaacaaacatttataatgtttcagcaacttcatttctgctacagaatcctcaatggtggggtcagggtaaggtccctcctaggtcagaactgtggcaaggcagagtcacttgccagagtacctgtgcttgggctccgttgttcacagaatcttgatgcagaagaaggactgagcgaacacccatggcaggagcatataacatattttcccagtccactgtgaattccaacttataacaatgttttctttctaatgagtcttaatatgttagttttccgttcctacctggtgtaatttctcttctggaagaaagcaaatcctacgatgagaagaataatccccaaaaaggccattttcacatagataatggtcagcaaggaa

SEQ ID NO: 1407 - DNA, 532 bp, Rattus norvegicus
  Genbank Accession No. AI012311
aactctaatattcactgccagagaaatgtccatatgtacagatagcacgaagcttccagcccccacctttggttacatgaaatgctctaagcaccacagaacaaacattcatcctagtttcaaaggaaaaacaaatcttgagaaaaacaaaagcctcaatgctcttgaacttggtttctttataccatacgaggaaaatcctttcattctacagtttctttcctcttggtcagcttctaaaagagcactggggaaaggacaaaaacaaaacaaaacaaaacaaaaaaaaaccaaaaaaaacaaacaaacaaacaaaaaaaaaaaacaaacaaaaaaaaccgtttcttatagggacaatgtttcaaaagagaaactggaaattagtctgtcttaagtagaaaatacttttagcctaagatattggcattaagtaacataagaaaaacttcagctttcaaaattcaaaatgtagaaaacgcaagactaacaagggttgggagtgagaagctcacaggaaaatccctcgagcccg

SEQ ID NO: 1408 - DNA, 544 bp, Rattus norvegicus
  Genbank Accession No. AI012337
  misc_feature (1)..(544): n = a or c or g or t
gatggtgaaaaacaaccctgttcagacaaagataaaaatacaaaatcagatgtagcacaatataatagaaactggctgaaaacagtacacgctaacagacatgatacacaaactcagggagggaggagataggagagggcagaggccacggcctacaccaggagccgctcaatagactgctgaatggattggatctgctgctttagttgagagccttctttgatggttacagaacaggcgatgaccggcctggagactccacaggcccgtcctaaagcctgcttggagcgtacaaatacataggggacattcttgtcttcacacagcagagggaggtgcaggatgatctccaagggctcagcgtctgctgccatcacaatgaactcagagatgcctctgttgagggttttggtggcttcattggctcctttccgaagctgcttgtagttacacgactgctgaacaaggtccagcagcttcttggtgaggtgggcatctgcgaggggataggcctttgggttcacatcagcctncgcctcgtgcc

SEQ ID NO: 1409 - DNA, 532 bp, Rattus norvegicus
  Genbank Accession No. AI012354
ttgttttacatgacttatttattatatatacatcatatatatccacacatcacaaatacttaaaagttttcttttgctaggagcattttaattttgctaagagtattttattttcctactcatgtgtgtcgttttatcatgaatttctacagtgaacatttttatagaatttctagtcagatgcttatcggttgttccttgagttttgaaaacatggcggctaatctgctagtatcagccatttccactgtctcgtttgtcagaggatacagcatccagcaccgacgactggtagaaacgatgtcaggtctactcctcttggcacgattacttggagctggtgtacttggtgaccgccttggtgccctcggaaacggcgtgcttggccaattcaccgggcagtagcaggcgcacggccgtctggatctcccgggacgtgatggtcgagcgcttgttgtaatgcgccaagcgcgacgcctcgcccgctatgcgctcaaagatgtcgttcacgaacgagttcatgcctcgtgcc

SEQ ID NO: 1410 - DNA, 636 bp, Rattus norvegicus
  Genbank Accession No. AI012356
ggatgttaaagtagttacagcaatatacaaaaacaaacaacaacataaaacaacccacaataatataaatttttacactagaaagtatacattggaatttgagtgcagtgaccaggacagaataaaagccactgtactgggaggccaagcaaactgcaggcatggctgggtgaggttggggacaagtggggccaaggggaggggaagtgggccgttccaagggctcactatgggtgattaacccagatacagacttcccagaacccctgaggtacaacacctgccccagagaagccctcaccttgttcctgggtccccaggattggaagccatcaacatgcccacgccttgccttcctaaataccctttcagtttatgagttcagcttattgtgtaactaaagaacctggccagggaagggagagcaatgactgcctcgaagcagaaggctggggtggtcaaggcaagcagtttgtcttggagacaatgtcctcactgcccttaattcagacactggttaactggagaaaaacaattccacagacagatcagctgagtaaggtggctttgagtcactgaatctagccatgcccctgtatcaagggaggcttgccttgaaccactcagtgttcaagt

SEQ ID NO: 1411 - DNA, 669 bp, Rattus norvegicus
  Genbank Accession No. AI012366
cggagctggggaccgaacccagggccttgtgctctaccactgagctaaatccccagccccaacatctgtgttttctgatggccttagaagacccctctgaaagagtcgtgactacaggttgaaaactgctgggccataggaacatatgccagaagaagtaggcattcaagaaatatgggaaattttaaaatgtttttgaatatttaaattaaaatataataaagtaggtgattttccccctctcaactatcagagaaggacataaagaatgaaagtagcactttaaaaaatgtcaaaggagagctcaaacaagttatgcatcacctgaagaaaaatagtggaaatcatgatacagtgtgagacagccatcactaacgacactttgaaggcatctaactatgcattcagtaagatttccagtgttccagtgcaaagagatgtatgttataatagctctttaatgctctatattaaggaaaatgcactttaacattcattttaacagctgtcatatagaaacgcaattcagactttttaattactatatacttaacatgtagctcttgctggtaaatattaattgcaattaatacactatcagaaatctaatagtttcctaatggtcgaaaccttaaagttcaaatgtaaataaaagcaacattcctggaa

SEQ ID NO: 1412 - DNA, 561 bp, Rattus norvegicus
  Genbank Accession No. AI012379
aatggcaggtcaacaaatatcctgaaacatacatagattctgatagtcttctaaccccagttgaattcaaacttgaaagtaacacacgcgagctaagggaagtcaatgttgttccaaggcacttactgaatctccatgactagacgaaaacaagaaccattagggtgaacaattagacagtatataatataaaaataactttttgcttacaatttacaaaaggtattattattacactctttgatctctgataacctgcaatgctggctacacgaatccagcaagtttaaaattcagaaacagttttctaaaatttcagggcaaataatttacaagtaagatacacaaagacttaaaccatgcagaaattcttacatcttctgttaataatattttaggacttcaactttatcaaattatatacctacttgccctgtacatatacaaaataatgcatacatgataaaacagcaaaagagtagtcctttaactcagtttatcataaaagtattactatattaacaggtctacaagcagcttgtaacagggttaagagacatt

SEQ ID NO: 1413 - DNA, 567 bp, Rattus norvegicus
  Genbank Accession No. AI012385
ctcatctttacaaaatctagatttttattttaaagacatgtacttataagggtaacaaattatgttggggagaccagtggagaaatgtggaagataagagagttatggaaacatggaggctaccaaagcactctgtatacaggtttgtaaaagctgccacagaaacagttattcaattaatatatactaataaaaaacgtaaggggactatgcaaatagagtcaggttctattttataggctgacccagcacaacagataaaatgggcaaaagagcccattctttacaaacagaaaataaaagacaaaatttacacaaattgaccggttaaaagcttacccaaaatttttaaggatccctttggactaagccgaggctagactccgcactctgtgttcttggcatgtctgttcccctccccctggttccagaaacatcttgcattttcagccccttgggttctggtgagcagaattttaaaaccacagatcttaaagactagaaacaggttcatctcccagacaggctgagcaccagtctgtctgcatgcactggtgatatcctcag

SEQ ID NO: 1414 - DNA, 563 bp, Rattus norvegicus
  Genbank Accession No. AI012393
cctataaaactttattaatagatactgaaaattgataaaatttttacacaccagaatgtacaatttgctattttacatgaaatgtaaacatttaatctaaaatcacattaaatgtgaaaatactttaccctcccacatggagtcacattgacgacttagacagtgatccacaccttgggaacagagtgtccctgacacactggaggaattgagattcttcctcctctttgccctcctcttgttcctcccctttctctccctcttctccctcctgcccctcagacacacaggccatggagctgacagtcatggagacatttccagacttaagctggaagtatggaaggagagtcccagataaggaagcctcgtggaaggagaaaatgtgggacttgtaactcatgttatagaaggagatgttcctttcgtcatagtccacaaacacccccacactctgcggagcttgcctgatggataaggaattcctcccagagtcaacatatgcccaattcccactactagactgccccactgtccaaaaccccttctatggactctcaaaa

SEQ ID NO: 1415 - DNA, 633 bp, Rattus norvegicus
  Genbank Accession No. AI012429
aagaacgctcgtttaatcacaaactatgcatccacaaacacatctgtgcagtcttcctcagaggtcggaatgcccacatgatggtggtgatgaagtataccagagacctggcgcttagcgctctttcagaggtaaacagaggcaggtccctgctcccctgttagaagcctctggctggggcaggtttagtgtaatgcagatctgctttcaaatcctgtgctaactaggctagagcaggatgcaatgtggggtctgtccctgatgctgttgctgggccaggcccatggttccccaatcccccatcacctgggacacctacacgatgccctctgtgcgcttgctcctccagaccaccagggcagtcatgagcagtgtgaccgtaatggggagcacaatgaaagggcagaggatgctgttgggagggtcccgcagggccctgcccgagactgggcacttgctgaagtagcggtggtggacagcaatgaagaacttgtccacttccggattgggccagaaacagccaatcttgtttgccacgagtttggtgcaatgagtgagctccccatagctccctatggtctttccccagtcacaccacagagtcttccctatggtctccatgtcctttttgaa

SEQ ID NO: 1416 - DNA, 556 bp, Rattus norvegicus
  Genbank Accession No. AI012438
acaattgatgaagcaaaggaagcgcataaagagctattggcgatatgacaggataatgttttcctggagcccccaggaccccatgctggggccacacgtggcagtggactggtgtgcatgcctgcagtgcactgagcacacacctgatggcagagaaggccccacacagacagccctggctacagaggtcaagctcacgtgagaaccacccgctactaatgatgcactaggaacctggaatactgtgtaaaatgtgggtgagcctcctctgacatcctaccctgacagggtctgatcattatgtcagaccaagggcaagcaaaagcctaaaaaacaaaacccacttaattaacagtggctatttacataaggtttggggtcttcaaaaattcagggcagttttaattctgagctcaaggagactctctgaataggtagcagggtacgtgggagtgcctgagagatcactactgagactcctgaaggagagaacagttgggtttccccaggcaagcatgaacgcacacaccaactgacatgaatgaaaaaccaaaac

SEQ ID NO: 1417 - DNA, 575 bp, Rattus norvegicus
  Genbank Accession No. AI012480
aaaaggagtaaaaaataattttaatcatatcaaaaagccaaaacaaagacttgttcagggactgtcaggacacatcttggcagcgtgtgctctgctgtgtacttgggctcatgactcgggtcccaagcacagttctaaccctcagaggtactgggatctgtagcacgtttgaggtttgccatttccccagagtctgcagatgtgaaacaatcgcatgcctctgctgtgactcctgggatctggagctggacagctgaccctctgaggcagctgcagggtcagtgagatggtgagctgggttggcaacccaagagcgataggctgggctccaagctgcagcttgtccctgaggctcccttcctttggcattttcagagtccacggagatgagaggacacggattttgggccacagagattcttctggagggtttttattctgattattccagaccaccagcagcttggacagactgggcaccttggacaccttggtgatgacccggaagaggctctccacacggtcataggtgaggacaatggcagtgaaaccttgcgactgtggtgggatcagtg

SEQ ID NO: 1418 - DNA, 386 bp, Rattus norvegicus
  Genbank Accession No. AI012505
cccacagacacccatgacgcttccaaatttacagaacaaaatgcacttgagaacttggtagaaaaggatttgcagtcattccttccaggagctggcacccatgggctgggtcagttcacctccagcacctcagtctctggaaggccgaatttggtcttgtgattgtcaaagagcttcaccagggcctccatgtacatggtgtggtacaggtcgatgtctttctgggtcgggtgctccagcttagggacggtgatgggctcccccacaacggtggtgatgggcttggagtagggcaccagcccccaggtgtcagaggagaagagactcggccatggaagatgcagggggcgaaaccaatatacttctggaacttcttctggacccat

SEQ ID NO: 1419 - DNA, 565 bp, Rattus norvegicus
  Genbank Accession No. AI012552
ggacagctatgaagttaacatttatttttagtaaacatttatttacaaattgtgaaaacgacccaaaccctgcaattctgaaatctagttattctatttcttagaacaaaatagagtagtggtttttatacatattcttgattattttttttaagcaggctcttaactctatacaagggtggcttcaaatacacagcaatcttcctgccacaacttcccagatgcaggatggcaggtatgagctcccaggcaagactgatgcacagtcttaatgatcacttaatttagtcacagtgataaggcttcttgtgatgcttctccttcattctttggcctacagctcagggtgcatttcttaagcagagactcctatatataattttcagcatgaatagacaagttgtcgaagaaccttctttaatctttcattgatgggccgaatgaggttatagggacatgacagctgaagcaaacagctcagcgggggagcacatcctcaccgtgcacaaagccttgccttccatctctggcatgaagaataagaggaattttgcatcggtgcctc

SEQ ID NO: 1420 - DNA, 328 bp, Rattus norvegicus
  Genbank Accession No. AI012556
agaaaataaaactgcattttaatggggaaagatgtccaaactggaatggattcaggtgtcagaagcgcaggcccttgcgggctaaatcagctcgggcctccaggatctggctctgcagctctcgggcggcgtcctcgcagtcgtgaaatgtagctacgcgatagcccacagtgcccagggcatagcagccagcggacaccagcagataggcaggcagtggccacaggacctcccggcagggtaaaggtagctccagacccagagctcccatggtcagggcagcccatgcagagcccaggagagccagtccccaaagccactgtgttaa

SEQ ID NO: 1421 - DNA, 542 bp, Rattus norvegicus
  Genbank Accession No. AI012562
ggattcagaaaatatttattagaaaacccccaccccaacctggtgaggcagtcactcatgaaaatggactggagaaaacaggcttattgccacaaaagtctataaaacatataaaacagttctctgtaacttgcccttaatatcccaaagcattccaccgatggctataattgccaattttacagatgggaaaactgaggcaccaaggttgtgttgcaccagtggttacacagttcagtggttgttagttgatccaccccacccccaggtggaaggtggtgggaaactaaaaggacttgaaggcacaggaagacaggacagtctccagccaagtctctatggtttcttcagctctagagtgagggaagagggcagaaccacagcagtcagaaaagtctggaagggactaaggcaaggattgtggtgcctgcttttaaggagggtcgcaataaggcgtgtgcagccataggcgcacgtggagcctagcttagtcagacacctcactgtagtaatacttatgagcggcatgcctcggtcttcca

SEQ ID NO: 1422 - DNA, 580 bp, Rattus norvegicus
  Genbank Accession No. AI012566
ggattgcagaagtgtcagcagtgggctgagaaacccagagggcacagagagagctgggcaaacccaaggacctctggggtggagagaaacagcagaaagaagtgatgcccctgcagttcctccaaggccagccctgtccccatgctcccaggtcatagaggtacccagagccaataaagaccgtactatattgggtcaaaagtatgtgtgtaaggagttgacatcctaaggcatagacccaggtagaagactccctcccacctggtggctcccaagggtgattgctggtctgagagccagggatatacataagacacaacccttgctttatgggcctccttgtccctgggaaaggcagtgagatgtgctgagggcgagttttactttagggtttgctccaatcttctactggtaagtcttcctccctctgtgtgcctgtctccatctctgtgatttgcctgaaccagacaattctctgaagtctttcaaactcttaagactttcccccaactttagagtgccctcagactggggtgaaaatattaaaaacatttttttttaatgctggggattgagccca

SEQ ID NO: 1423 - DNA, 631 bp, Rattus norvegicus
  Genbank Accession No. AI012589
ctgccttacaaactttattagtctgggaaaagggggacaaggagttcctgtcccttcgtccactactgtttaccattgccgttgatgggacggttcaaatggtcaggggaggacagaaaggccttgatcttggggcgggcactgaggcgagccacataggcagagagcagggggaagttgtccaggcagccaggggccaggacttggtggaccagcagcaggtccagcaagttgtaatctgcaaaggaaatctggttacccacaatgaaagctttgcctccctggttctgggacagcagggtctcaaaaggtttcagatgcccaggcagggccttcacatagtcatccttaccattctcatagttagtgtagatgagggtaccatatttgcatcgaaggtcctccaccccatcattcaccatatccaccaaggcagcctccttctggtctttcccataaagccctaaagagcgacccaggtgcctcaagatggcattagattggtaaagggtgaggtctccatcttcaaacttggggagctgcccatacagacaagtggacttgagcgagccttgaagccagacatctatggtaaccacctcctccttccagctctggccctggtcagcca

SEQ ID NO: 1424 - DNA, 613 bp, Rattus norvegicus
  Genbank Accession No. AI012595
gaggttacacagtggccttgatctttatttttctttacctggaattctacaaattctgaaattgatcaatagatttatcttgtttaataaacagcaccagtcgtgcccactgatacaattcaaacctgactttctcagttctcaagtttattatgaaaacactgcggtgacttgtgcagtacatcatcttacaggagggagacagttctgttcaaaacaactcaccaggttttctgacagtaacaaagaacaacgcggggccgagatttgagaagggagaaactgagtgcagagaaatcatacaattaaattaatagtatccctgaaagaacacaacaagaggggaggccttggtactcatttaaaaatgttcattaagctccaatgattgtttgctatcctcatctacagtcatgctgagtaagctacagctaagtggaagtcaactggactcacaggtgttaatgttacatcctagatctgcagtctctcaagaaagcaaaagtaactacaaatagcgctatgccagaaactggattcttgaccaacaatgtcgcgtcagcatgcaatgaactggttcattctaaagtggtcacggctgttgatgacaaga

SEQ ID NO: 1425 - DNA, 666 bp, Rattus norvegicus
  Genbank Accession No. AI012598
cagtaaaatcagcaattgtttattctagaatctagctatcccattattaggacacaggtattcacacatttgtagtaccagctagatagccccaccattgctttgtcatccctaaggagctccccagttttcctgtgctcctgtacttcccctagggtgagagggaagtctctgtttcctgtgcagtgaggtcgggaagatttcttggggtttgaaggtcttgatgttccagggcccctatgccattagggtgttgttgcatcctctcaaacaggataagcatttcacagtgtggggtctgtgggaacaggtccactgccacagccttgactggatggaatggggtacctttcactcggttagatggggctctgcagagatccacaaagttgcccatggctgccctggggttgcaggaaacatacaggagccgcttgatgttctcagctttcctcatggccagaatcaccttagaatgtaggccagcccgtggtgggtctagaacagctacaagttgctgggaagacagtttgctcaccaagcctggcaccagatcctcagccctgccgcagtggaactcaacgttgctcagctcattggtgagggcgttcatacgggcatcctccacagcctcctggcacagttcaatcccatttactttcttca

SEQ ID NO: 1426 - DNA, 572 bp, Rattus norvegicus
  Genbank Accession No. AI012635
ccctgtctggatctgaagtatatcttttaagcattgtttaaaagagaaatggaatcctgttcaacactttcaggagatgattcaagttgtccataaaaataccattcttgttacaaattgttagtggaacttaaggagaaatgacttatgctcactgcgggtcagcatgattctgaaaggtgacttatttacaaggccagagcaaaacattgtcttgcttactaataaatgtctagagttctggcaaatgatcttgaacaggaaagggagaggtatgaaaaccttaatttttaaatagcaaagttcttgtctggttattgtcggtgactcgcagacattctagagggaatctcaatcagatcaacacaaggaacaaagcaatgagcactggaacagccaggagcctgagaaaatgggaatacaagccaggtttctgaataccaccgacgtcacgggtcttcataggcttcagtgaccggtcccactgggttaggatggcgttcctggctcctgaccacttccctgggcctaccaaccggaactggtaggggctgcaagggccaaagaacact

SEQ ID NO: 1427 - DNA, 508 bp, Rattus norvegicus
  Genbank Accession No. AI012648
actcaaatgaaaactacttaagaaaacctgtaagttagctctgtgctagttccttttctgaaacctactttttttccttttaatcagaaggtttatgttttgtcacattgaatacatgaaaatattgttagaagaataaggaataccataaaaggttcagttttccgtggcaaattttacatgacaatcttgcataggaaattatttcttgtcaaggtgttcagtgtgctcgtctgatgttcccaaactctcagtccagctgaacagagtattcatcttcttccgcaactaccagagcacagccatcactgtaaggtgattgtggtgcaggagagaaagaggtgaagccagagcgtgcgctccttctatagaggaaccaaatgaccgctcccaaaactgccagagtcactgtgctagcgatcaccagagtcgatattaaaatgtggttatctgataaatacttcttgtcatatgggattgctgttttgcaaagtgttcccgtcacaga

SEQ ID NO: 1428 - DNA, 467 bp, Rattus norvegicus
  Genbank Accession No. AI012747
  misc_feature (1)..(467): n = a or c or g or t
agcaaagtcttttattcaaaagcttctcagcaccatcgagttatcagaaagaatgagcatcactttttctccccacccaacccccaacgcagagacagacgttaaagcattcaatggggtgccctagtgatgacagttgagcccctgacgaggtttaacctggcccaggtgagccccacagttcagaacaggaaggaatcatgtcagagccgatcagccttcccttctcgagctattagtcacatgagacaaccttgtggaagttgaattcagcgactgccaggtaggaaggacagtgacctgtgcggcagcatgcagcgttgagagttcaaatcctagctaaccctccctaatctactgtaggaacaaggagcccaggactgtttgttctccacacacctcagccgctcatcttactgtcttaccacanacacaaagaccatgaccgtggacaactacatccaatc

SEQ ID NO: 1429 - DNA, 504 bp, Rattus norvegicus
  Genbank Accession No. AI012761
catggaaaagatgatttattgtacattgtgggagaaatatcaagagtgactgtttcgcagcaaagctactaacctggctgagaaaacgtcaaagaccttacactgtcatcaagctgtctggagccaaccacagcggatgccaaaggagtttgctttgctgtctgcaaattaagatcttttttctaaaacatctgagacttccaattaaatgtcagccaaaataaattcccagatgtacaaaatgtgtgatttgtccttaaaaaaaaaaactggatgtcagctcaccgtcgttttggtcaacagtcaataaagtgctttacagacactttggactacgtcgaaagacattatccttgctcacctgatatgtatctgtttaaaataaaaaacactaaagtggtaggtcgttacaaatgagatacaaatatgttttgattaataaatactaaaatgaaaaaattatgtaaagaatgctcattaaaaaaagttactttaaaaagaaat

SEQ ID NO: 1430 - DNA, 522 bp, Rattus norvegicus
  Genbank Accession No. AI012802
gggaataaatactttaaacctttttctcttataaatatgcattagaacatttgacaacacaagctaagggctttgaattaacttaaaattagactaagtcctgctttagcagcaggacagtcagttaaaagtccctgtccccgtgttcctcagtcccgaggcaccttaaactggtctttctccctgcggatggccctcatggtggtcacagggtcggtctctccagcgtgctgctgcacggtcttctccttcactctcatgaaggggttgtaagtgaactcctctgccagggtggatggcaccgtgggctccccgatggcattcttctccttggcccacgccagtttctcttgaacggcggtattgccgggctccacatggcgcgcaaacttaaggttgtttacggtgtattcatggccacagtagacttttgtgtctggaggaagccggcctaagacttcaagcagcgccttgtacatctcgtctgcggttccctcatagaacttcccacagccagcaaca

SEQ ID NO: 1431 - DNA, 372 bp, Rattus norvegicus
  Genbank Accession No. AI012932
ccagatcaacgtttataaatatgtacagatcagttacaggcacttgaaatgtctttggctggaataacccaacattgcaagatcgtgtattcacagagtggccaggccctggccgattcagcaggcaatgatcatggttcttggtctctcagaaaatggggagctgtgggattaggcatcagccaaagccaccttctcagggcaaaattcaggattgctctgccgcagtttgctgggtctgcctttgataactgcatagcagaacatcgttatcaccatcacgaaaaggaagtaactggtgtgcatgagatgcaggtttattaaggagcggtcgtcatctgggacaatgacggtgagcttgggatttaaagc

SEQ ID NO: 1432 - DNA, 461 bp, Rattus norvegicus
  Genbank Accession No. AI012937
aatttgccactggtgagtttattacatgattattaagttcaaataaaaaaataaaaactaaactttggccgggaggctggagccagaatctgagagttcccggccctaactctggccgagccgtctctactaactgagcttgactctgcccagttcttcaatactcgtgtctgtagtctggacatctcttctggcctcgctggagttctgcgctccgggcactggggctttggtgagagcgccatagacacccatggcctgagccaccatacttgtcacatcgctgggattggagggcaggaggacggtgttggaatccttggccagtttggaaaaggcgctgacgtactgctcagccacagtcagtgaagctgctgcgtctccattgtgttgagtcagagccccagccagaattcgaatggcttcagctttagccttggccttggccagaactgcactgg

SEQ ID NO: 1433 - DNA, 467 bp, Rattus norvegicus
  Genbank Accession No. AI012942
  misc_feature (1)..(467): n = a or c or g or t
gccacctctcaggctttgggtttgggtctgatggcttgctggggtctccagagcgtgcggcttcctcctctccggttaccactcttacccagaccatgtacaacctcgcagggctcggcagcgagaccccaaaaactcaagtaggaagcctgtcgttccagaacaggctgacagacctgtccctgtccagacgtacctctgagtgctccctgtcatctgagtcctcagaatcttctgatgcaggtctctgcatggactcccctagccctatggacccacagacagcagagcgcacgtttgaacaggccattcaggcagccagtcaggtcattcanaatgagcaatttaccataaaacgcttccggtctttgccagtgaggctgctgggacatagtcctgtgctacagaacatcaccaactcccaagcactggacagctgggagaaagatgaagcaggctacagagct

SEQ ID NO: 1434 - DNA, 473 bp, Rattus norvegicus
  Genbank Accession No. AI012979
accaacctttatgtatttattcacacacttgataaaaatgtcacagttatgagcaaactcattatgatgacacaagtaactgtacagagttaaattacaaaaccaagggcaaccataactacttagtacctgagccccagctcactcacacacacacacatgcttacaatcgctctcacactcacaggcattcaactacagatgttaaattcagatatatgaaagacattggggcttctcgatgcaactctctgccaacaactgaaaggacagaaacactgggggagttagttgtttccttggcacagaactcaataggcaacaagaaagttaaagggttatgttcaccttgggtttagtttcctttttcaacaccacaacagggtaggtagcaagcacgcacagaaaatttcagctatattaactccaggaaaagagagagaaggatgtaaaacttgatccctatttaccat

SEQ ID NO: 1435 - DNA, 447 bp, Rattus norvegicus
  Genbank Accession No. AI012995
ttgtttgtttgtttaatgtataagagtctgacatgtcttggggaggggaatcagcatgaaggaagatgatccgcagtgacaaaacaatcaaaactggcagcaactcccagttttttttctcctcctttcttgaagttataagacttcctgatgaatggctgcagcaccccccccaccagactacatttcctagaattccttgcaacagaaggctacgtagcctgaactgaccaatgggatgagtatatctacataatttccggttcctgccactcaaggactgggctggtacacccccttttctattctagtcatggcgaagttggcgtgacctgcttgtttcctgagggtgatggagtgtgggggcgttggcttgtgactcagctgtcaataactttattataaacaggaccttccctatgtgccccagcaacgcatccccccccc

SEQ ID NO: 1436 - DNA, 536 bp, Rattus norvegicus
  Genbank Accession No. AI013031
aaattaggtcacactctccccagaaggaatccaaggaggaaaagcagtcatgtggccctggaaacatagcaaggtagccaactcagggtcacaggtacggctggtcccttgacagctcccacctcttcatgggaggagcaggtgtcactgccctcttagtggctgccacagcagaactctcagctgtcttgcccgacaccagggccttttgtgaggacatgatgattgagggaggcacaacttcccggcggccatcacgagtacagtagtaattgttggacagcttgtgactggggcccacagggagcttcggaggtggctgggtccatgtagatcaagtaggccttgaactcacagaaatctgcctgcctgtttcctgagtgctgggattaagggttgtaccactatgaccagccttgaatctgggttaggtggaagaatgacaggatgagggcagcaagcagggcctgctcaccgcttggcgatctcctggtagcgcagctgcagcttcgcctgcaggtcttgcccagacgccc

SEQ ID NO: 1437 - DNA, 520 bp, Rattus norvegicus
  Genbank Accession No. AI013042
acaaaatttctcaacctatgaaaataaagtttgtaaaagtagtacatgagcccgcccaggagctgggctcagcggatctacactatgtacagcctccccggggtgagagccttgagacagtatggcccccagcaagggaaaggtcaggaaaagccactaagatgcctacagagcaagagggtggcactggccccgtgcagcctctgcaatctccagatctgccactagaggtcggcacgatcctgactgcttgtcaggctcagcctctggaagaccacagccagggacaaaggtcctcaagggtactgggggaagctttggggtctagctggaagtgacagtggtcccgccacccaggcgcaggagcatctgctggcagtcaagcaggagccggtgatcgccaagcttctccacggtgcgcgctgcctcagccagcatgctcactcgctgcccgggggccgacaggaaggcagggggcagatagcaggaggccaacagcaaggcctctgtgtgctcccgc

SEQ ID NO: 1438 - DNA, 602 bp, Rattus norvegicus
  Genbank Accession No. AI013044
atgtgttttttttttttttttttttcaattttaacactttattgcaattattcaagtctttcccactgtttacaaatgtttcatttttatgggacctttacaagtttgtcttcacaatgtggcctctgcccataggcctcacacaccacttgcctctgcctcgggacagaggaggggaatgtgcatgcacaggagcagggaccaggatacacgattcgttcttgggagtcatgtgatgtctgcaggctaacaggacatctacttgtccagagagccagtccctacccagggacaaaggcatacccaaccggtagatatgaaaacatagatgtgcacacataacaaaacaacaacaaaagccatcaagtccactctgtgccgcacatatgctcttgggtgtgtgggcatgcaatggagcccgatcaacctgccagtggctactcctgagagaaaactgactctccttcccctcagaagctatagctagctaatgagccattttcaataatttgttatctgttggcacctcggccaccagggggcgctctgcagtcagactgcctgaccctgggaatcatgtgacttatcttaatgcagcactc

SEQ ID NO: 1439 - DNA, 556 bp, Rattus norvegicus
  Genbank Accession No. AI013075
agaacagccaagatatatttattactaaaaataaaagcaactgaggattaccctgggacgcaatgtcagctcaggaacatccatgacgaaatgtgtatcttccctgattctcagctggtgccttcttccagagtgagttttagtttacaactcataatgaggacaaggaagcgggctccatccctttcctgttcagtctgaagactgaattgggctacactgggatggagacttgaggtgctgcaggtcagtgtcaaccaagggttcatgtgtcaggaactcgggctggtaagacgacacgaaggcttcatgctgaagctcaggcaggtccagggagcctggcagaatggaatcctcatggtcatcatcaaacgtctgtgtcggaaaggcttcaaggctcatagctgcatcattctctggcagctcctgagagagctgccccttcctgggtttgcacgcatcgaatttcacccactggtaattgacgcagttctgagcttctggacaactctgaatcaggttgtggatggttggatgagaaaacccaaaggaagtc

SEQ ID NO: 1440 - DNA, 507 bp, Rattus norvegicus
  Genbank Accession No. AI013090
aaacaaatcaacacacttttacagtgccttgctggagatctgcctcagaactgaaccatcacttctggtgaggaagaaactatggcttcaggtacatagcttaagtttggccatgcaccatcataaatgcttcaacatctccagggactgaaagctcttatgaaaggtacttcttcaattcttcaaccatctcttgaggctcaggaaatttgagctttcgtggagggcccttcttaataccagtccagagttcaacacgactgttgtccgggcgcagcagcgtcacttcgaagctgcccctccgcggcttggaccggttcacttgcacagatatctctggggcctccagttgcagagcctggctcagggcagcagcatggcggccgtagacacgtcagctcgtacaatgctcaatgaccacggccgcgccctccgccagtttctcgcgcttgtccgccgactctataggcgcggccccggccttacgctttcttccgagaggggcca

SEQ ID NO: 1441 - DNA, 366 bp, Rattus norvegicus
  Genbank Accession No. AI013107
aaaatagaaatttacttatcacttgcaatacccagagacatttggggtggtcacaaaggaaggtgaggaaggaccaagtcacacaagtagtaaagaatggattgattttcaacaaaatagtgcccccccaccccaagatgtgactaagaaataggggtcaaaggtgactctggcaaagactgggcctgggtttgtttcttgtattagctggaggcacaaagcgaaggattttgttatctgcgtttagtaaggggcggaatgacaccgattctttccactgtggactgagacctgacagcttcagggaacagtgatcagagcaggaaaagctacacctcacatgaggagagggagtctcctcgtgcc

SEQ ID NO: 1442 - DNA, 492 bp, Rattus norvegicus
  Genbank Accession No. AI013333
aagactcagaacttagggctcagagaactgaccccgaggctttatctgctgatttttattgctcatttgtttaagcactgagggtggaacccagcatccagcacagaaggacccgtgagcgtgtgcgtgcgtgtgggtggtctgcacagagctcctcccttccccagtttactggggacgctccccacacaccgcccaccaaccctgccctgtttatcaaatcctgactttcttggcccaagacgctttggtgaaggggttttctcttggcaggctttggtgaaggggttttctcttggcaggcgcagtgtgcttggtggtggcttttctcaggatcttgttgggttttcgggcgctggctgaggaagcctgcacaccactttacgagttcttctgtggcactttgacggtgaccgtcttcacttccgtgtaggcctgcaggccatactcgcccagctccctgccactccccgacatcttatcctcgtgccg

SEQ ID NO: 1443 - DNA, 591 bp, Rattus norvegicus
  Genbank Accession No. AI013362
cagaaaaaatggcagccttccccgagggagggcagcctgtttattggatacagaagatacatttacagagtacacaaaataaataactgcacattctccatccattgcccgggcatgaaggcctggtggacctatcaaaggcccaagacactaaactccctctgtcaaatcctcacaaccagacctacttcgggcaagagagaaaataaatccccagtggttcacacccccagggattcctagggaactggtaggtgagggaactctgaggctgtgaggcttccactctccactgcctcctatccagggggaggggagtgtgaagagagcatatataaggcacagttgacttggcacagagtggtctctttggtttggtttcccagtggaggtggcatatgtaggaaagagtgcctcacccaaggctacctcctgaaaggagctgagtggagtcagactcttcctgctgacaggcccttaatctagccaaggcccaagctaggctctgtctggccccttcctacccactgaaagcacctaaagagggagggaggttgtattccagcctaacatggtggtgataggggagac

SEQ ID NO: 1444 - DNA, 476 bp, Rattus norvegicus
  Genbank Accession No. AI013387
cacagccaaagaaatttattttaaaatagaaacaaacatacattaagctttaaacaatcaaattttaaacaaaagggaaaaagagccatttgatcccagagttggtacagaatgacttttgtgtgtgtgaaatccacgtaaggagcacgtggacaagctgacatggaaatccatcatgcgtgctcaggtgtccactggctgccatcagacactcatacactaagagctacccttgactgactgcccactggcaccattcccaagacccaagttcatgtggggtatatggtcaagtgctacggttccttctgaacacgagaagagagggtgctcaacagggtcttctttccccgctgattccgccaagcccgttcccttggctgtggtttcgctggatagtaggtagggacagtgggaatctcgttcatccattcatgcgcgtcactaattagatgacgaggcatttgcctcgtgcc

SEQ ID NO: 1445 - DNA, 707 bp, Rattus norvegicus
  Genbank Accession No. AI013395
aatacaaagcagtttttgtccataggaatgagtgtgtagtggtttgaatgagaatggctcccataagcatgaatagataaatgcttggtttgcagtcagtggaactatttagaaaggattagtaggtgtgtgtgcccttgttagaggactcccagctggctctttgctctgcacttgtggatcaagatgtgagctttcagctactgcttgggtacagtacatgcctgatgctctcatgttccccaccatgttggtcatggactcactctctgaaaccggaagcctcaatctcttgtataagttaccttggtcatggcatcttatcacagcaatagaaaaggaactaagacagagccctacaacatttccagcacacagtttaatgcagtaagagttacgcactgcagacaggtgtgatgtctgcttaggcatactaagaacatctacacagcgaccaacttcctccctggaaaccacactgaatcagccacacaggcataagggcagtcccggagacaacataaaatcccagtgaagacagaatgagatagatctgaggatgtctgagccccacatagaaggcctgggagccggctgtggtgaggagaaatgctggtgtcatgcccttaccactgcagtggataaagcaccacactcatcccctctcacaggctctgggccaaccttgaacgccaggcattagattc

SEQ ID NO: 1446 - DNA, 612 bp, Rattus norvegicus
  Genbank Accession No. AI013397
accataatggcagtgccaactctatgcctcgtcattcaagagcaggggagaaacccaactctttgcatgagcagggctgggtggggaatgttcgtctcagtggcttctgtgctccagggccagatgacagtaagcaggccccgaggtctgctggaagcggatgttgactcccacccaggtgactctgcacaggctgtacaggaaagtgagtcatgcttctccaacaggctaggggcaaggcagccatgagaaccacaggtaaccaaggtgttccttctaagtggtcagtttaagacaaacaggtacacaagcaacagacttagtcaaacgcaacaggaaatactgtgtgagagccaggctaggaggctgcttcatcctgaacacacaacttcctcagtccatctgcttacagaggacagggagacagagactacaggctgtgttcaggagggaccggggccactgatcaactgtgggcatggacaaagggcagaagtgaaagaggctatgatctctaccagtcttcaggtctccactcacagagaggccccaggatggcctgttcagactctctcctcctggcccagcaatagttagactcttgggaactca

SEQ ID NO: 1447 - DNA, 525 bp, Rattus norvegicus
  Genbank Accession No. AI013404
aaaatgaaagcctttaatgtcccatttcaaacagcacgtgttgattggcacacacctgcaaactagaaggtaccactaagtaagtgctccagcagttggtcagtactatgaaaatgtttaagagcttctttataaatttcacagaattcaattatagcacacataagacaaagataaatctattatctaaaaagaaaagtagcatgaatccacatcaaaaattgtataaccatattaatattttaagcataaatggtggaaatttctgtgtattaattctccaaagatttgcattctattgaaaaaaaattatagtgcagtacccaaagtatttgagtccttcctcctatctccaccccaaagagttactgaatcctagccaaaggcatttgttcctaagtaatactgcttgatttctaacattctttctcaagaaagttcaaagggtcgttttatgtggatagtcaaacaattctagaaaagaaaacagtaacaaaaccgaaccctatctttcattcatcattc

SEQ ID NO: 1448 - DNA, 396 bp, Rattus norvegicus
  Genbank Accession No. AI013442
agtcactgaagtgaaacctgtattttctcaacagtatggataggctataactacaatctctttgctttaaagtctctgccatcctctccctcaattcaggtcaaagttcatagcagcaatgctcaagtcttcagccaggccagtgttgtctgctcctgggccagagttcacaggtcaggatcagtcagtccggagaatcatgggaggatgttcactatcttcatccaggcgtagagcgctggcttcatcctctaggcatgcgccacccacagcacccaggtcatcggtgtaggcttccaagttggcgtcctgtcctttaccaagtcttgttggggacgagggcacataggcacctttggcagctgctgtgccgtatgtctgcgttactaaggggca

SEQ ID NO: 1449 - DNA, 498 bp, Rattus norvegicus
  Genbank Accession No. AI013657
gaactaaataaaacctgctgtcttcagtacagagtaatttgtaacacaagtcatgtgaacagacagaagtaatgtgaacataccttattgctgcattgtgacttggtgacaagattctgagcctggctgaccatttggagcaaacgggaaattctataggccaggacagtttctagagcacaacaaaagttgcagaaaatatggagaattgcacatgggtcagtggcgttacagaatcattaaaatttcaccacatgaatgggaaccagtaatggccacaaagaagcagaactgagtttgcaaagctgagccatatgggtcagtgacgtcactgcaggagacagacgaggaaggacggaaggacggagcacctcgtcaggtgtcaggactcaaagtgccttatgcaaagaaggctacacccaaaacctagggagagtcagaccaaagcatctgatgttgtatttaatgataagatagtactaagtcataaatataaaa

SEQ ID NO: 1450 - DNA, 366 bp, Rattus norvegicus
  Genbank Accession No. AI013676
gcggccgcatatgatttttttttttttgcagtaactgttagtttttaagtctcgtagcaggttcactagaacataacactacgagacttaaaaactaacagttactgcaaaaaataaaagctacttcaaagcaagcaaagtcagtaccatgtacagatattaaaaaagaaaaaaaaaagggaggaacaagcaaggctagggtttgataacgccatcttgtgatccattcgtgtgcattcttcactgcgtgagtcactccccaaatccatttgtatggttactcctcgaccaaaaaggaccagaacaaaaagtttacttcgactgttcccataggaaactcagcttggatagtgtgtcaggcaattt

SEQ ID NO: 1451 - DNA, 407 bp, Rattus norvegicus
  Genbank Accession No. AI013690
aaaaaaatatctaaatttttgtattggggggagggagtaaaaaaaaaagcagcccctaaactgggccctattcaatggcaacttcttgttccaaagggttaaggaaaactttgaggaaataaaagttgtttggaaaaatccaggtgtaattgctttgtatgctgtgatgggtaggaaaaatgaagtgaagtgtgaaggcccctcaaaccctccatcttgcctcaaactatgtcctggaagcctggggcggaaaaaacgccactttcattcctgcttcttggggttatttactgccacgtagtgatagaggaccacaagcaagaaaagcgacacgcccaacatgttggcgaaaatggcgaactgcacgtccgtgatcatcctgactagctccacccgactccgaccct

SEQ ID NO: 1452 - DNA, 386 bp, Rattus norvegicus
  Genbank Accession No. AI013715
acagggacttctgcttggttttccttcagcacagacgtaagcgcccaccctggttatgcccttcctcctgctgcagccgaaggaggtgcttgtaattacccctcaaaggttccgagcgccagggaccaacatggccaacggattctttcttggaagacatttttcctgctagtcgtttccagaggcagtgtgtaggatctcaagcggaatgtgccggaatgaaagtgtgctgcttatcaaccacggtgtgctcaggtttctaatgccttgcacgcttccagctggggaggtgaggggaaggctcaggagaggtgcttggtctgttggctcctcgccaaggtgggcagtgagagacctaggtggtgagacattggggatctggaaaa

SEQ ID NO: 1453 - DNA, 539 bp, Rattus norvegicus
  Genbank Accession No. AI013740
taagcctgcggccgcatgtgtttttttttttttttttttagactttgacaatactttttattgtttatttagcccttcacagctcaccccacacagagaaaggttcttatttgtagtgggtagctcattttgtagcttatgtggggaatatggttcaagcagaactcatgtctggctgctggtactgcagagcaaaggggaatctaggcacacccataaagtgggttgattggcaggctggaagacaaagctcccaaaaaaggcactttaacagggatgtagctcagtagagagtgcttgcccaggaggcacacagctctaggttcaatctcttgtaccataagcagtttccatggggtcagagaatggctggagagttgtggaaaccagaggaggtattgttttggagacaggacctcactgtgtagccctggcctcaaactcagagatccacctgcctctgcctcctgagtgcttggattaaaggcatgcaccaccaccgccgcctgacaggaggaagtttctgatggaggagctat

SEQ ID NO: 1454 - DNA, 475 bp, Rattus norvegicus
  Genbank Accession No. AI013755
agacgccagtccgttttattagataaacaatgccattttagcccatccacactagagttctgtcaccaatacccaggaaagcaggcagacactgtcctgtcttcttcttgttctggcccttgggtctcagctagcatctatgggtttctaagaagcgaagtccagcgtttcagaagaaaagaacactgtgaagcctaggggtcggcccctggctctcctattcacacgcagacacgcatctgtgcacaccatacagataaatatatatatactcttttttcttttacaaaaataacacagggtttgtgcagttctattaatttttaaaaatcacacaggcagaatttacactttagcataaccgttttttactttggattaaagtgggaattttaggtcccaaaataatttacaatcaccaaagagaggtcctgcagcaacaactgaatgcactctgaactgcacaaggacagtg

SEQ ID NO: 1455 - DNA, 540 bp, Rattus norvegicus
  Genbank Accession No. AI013756
gcggccgcatgtgatttttttttttttttatataacaacaacttaagcattttatttattcattaagcttcttagtatcacaatggaatgatgagaaaacaaggaacaaaaacccgagagtcttcgagaatctctgacaaagagcagagacttcaaggcaattggaggggcaggaggctcgacagaaacagttccaatgtggaatttctcctgggctggctgggccaggagaggtggagaggtggaatggtgagaaggtggcactgtcgtaagtggtccttggcgattctgactcaggactgacacacatgatctgcatgaaccactctgtggagtctctggtacttccctggcatccagccacagggccctctgcctgctccaaatgcatggaaactctaccagtgccaaatggactccaacacctgctgtgctggtggcagcaggagagggcagaggcaggcaacttgctcaaggcatgcccatccagagagtggccaaggcttgtcacagacttccgtggcacaggtgcaggtggtg

SEQ ID NO: 1456 - DNA, 498 bp, Rattus norvegicus
  Genbank Accession No. AI013765
ccctatgctcaaaaacgaagatatggccttgctggtccctcccctgaaatctcatcttcaaggattgggaggcagaagtggtgactgggggtgggttggtatgaggccaaacatgggtgtcctttctactccttttctctacattcactccttgctttcagtgttcccttcccaaaactttaggtgtgtacacagcttgccaccctagggagcagggctggggtggcagagctgaagtcaaaagattaatgcccactttcaacgagtgatgggtccagtgtgtatctcgggtggacggacggggaaggaggaaaggctgggaccctcctacccgcaagggcattgggacctcagtcctgcccacccctacctctcccagcccctcttcctaacagaactggtcatcacagtcgtcatccttcatccccttcagcctaagcctcgcaaagtcctcaaacacgatgtcgtcgtctgtggcatagttggtatcgaattcaa

SEQ ID NO: 1457 - DNA, 584 bp, Rattus norvegicus
  Genbank Accession No. AI013778
  misc_feature (1)..(584): n = a or c or g or t
tcatcagagacatttattgagcacttagagtttaatacattgtaaagaaccccaggcacatcttcccctcaaagggcccgtggacgtgtaggaaacactggcaagacactctggtgttctcagaaacaaactagctattaagtggagaagtgagtgtaacatccagtccactgtggtcttaaccatagttctgctcttcctaatgaggcaggtatgaaccctttttcctccctccaccacactcacgaggcaattgagtctctcattgtgacagtacatggagaagctgacttcaggatggtttgtttgtttttttccatctctttccttcggtggaatcgggccagcctctttttgaaggagaatattatttctttacggaatttggcgccgaggtagagggaccactgaagagagatttaagacagataagactggcaaaagcacagattgcctgccacaggaggacctcctaagccttaggatccgaggttacctttctctagagaccggatagaaatgcttgaggacaggtaaggctctctcccanaagagaggtcacaggcctcatgatttgcacaggc

SEQ ID NO: 1458 - DNA, 493 bp, Rattus norvegicus
  Genbank Accession No. AI013782
ggcagcacagacacatttattggggcagttgtggggatcagggggcagaacaccctccaaatctgaagtgcctgatccagcccccaacatgcacagtagtagacccagtagcaccaaccaggccatggcagtgaccaccagagaggagatggggacagctcagtgcaggtcagtagctccaagactcacctacttctatacaggctgatcgtggttccctatggcccattgcttgagaggcacaatgctggctccacctgcccagcctggcttctcctgctcttctggtctggggttgtgaggtggggctgcagcccttctagctccgctagcttctccaagagctttctgactggatcctaagtactagctaggaaatgaccgctcaggggcggggacccaagttcccattggctcctgctgttaaggggtggagcagccatgtcccttggcacttgagaagccagtgtgaccagcagagggccctcgtgcc

SEQ ID NO: 1459 - DNA, 568 bp, Rattus norvegicus
  Genbank Accession No. AI013861
  misc_feature (1)..(568): n = a or c or g or t
atcaggatagaaatttatttaaatccaaaataatatgactatagttagaataatataataattatctaaaggaaatatcatcattggctctgaaacagtctaacggtgtcatttttctggagtcaaaaacatgtagtaaaaggatatacaggaagcaaaaatacagaagcaagccggctgagtgaggaagctgtaacaggagggtacactaagatactgtaacaatcgagacaggaagacaagtatagcaagctgtcttacctatcaacccctgcacagtaagtcagtaacccagaatgaaggaataatagcacgtggttaacaggacaaatttccctctaatttgtctttgtaactgatttctttccttttttaccatgggttccatctggttaacaaaacatttggttttatttgtaaagcagagtaaataaaatatcctgatcagagtgctcaattttgtttaaggtgctcaaggttcanacttaaaaaggtcaactgggctagtcagtgggaaccattgggtgtgtttgctaaacagatgaaagcagcagcatttaaaatggat

SEQ ID NO: 1460 - DNA, 492 bp, Rattus norvegicus
  Genbank Accession No. AI013875
catgtgttttttttttttttttttcatacgtcggaagcgggagagatcagactaaagatgggtgggtatacctggtatttggatgagatgctctgtgggaggctcgcaggggattcgagggtggcttttataaaatggttttattttctagctgtatttaaaggggtgtttaacattacctacttcattaaaaaacaaaaacgcccctcaggaaatttagatacaattgcgctagtcatggttggcatctatgagagagagcaactgcattctgaatgagtaaaacggacgtgtgcattgtaatttacttttcctatgtccccttcgagaggggcaaagtaaaacaaagaaagcagtgcagttggctgaggagactgagcttgcaaagcaataggtctttctgtccaggcagctcctaccccttcagttccattccattttcccttgggactaaaagctctgctctgtctcatttaaagtcttgtcttccgg

SEQ ID NO: 1461 - DNA, 759 bp, Rattus norvegicus
  Genbank Accession No. AI013878
gcatgtgtttttttttattttttttgaattcgtttatttaagagatagaacacagccattcaaacttgtgaaacaaagtattaacacgggataaggttggaaaattaagatgaattgctctattccatttgcacaataaatatttttaaagaagcttgtagatctttaaaagcttttaaactagatactaacataaataagcatttctatctaaattgaggcatactgattttcaatagaattataatatcaattgcatggcagtaaacaaacatttaagcattgttaaatgtgtagtgtaatggaagttatctattcttcaaattaactatcctcctggccttgtgtttggatttaaaaaaaagcatgctggacagcagcaatatattttatacaaattatataccattaataatttataaagtgaattgtatactttgaatacaaagtgtttatgttgtagtgttggctatttttggtatccagctttgtcactagcttttgcactagttgacatttaaactggactagactttatcttaaaagtacctaacccgagcctaatattttatgtcctctaaggtttcccattttgtttgggagacgtagtttgaaatttttctaacataatatccttttcaaaattgtgtctacatgaagagctgttaatatctctatgaaatccataattgtgtgttcacaaagagcaaaccattcattttttgtaaaggccatactttcttagagagaaaatcataa

SEQ ID NO: 1462 - DNA, 322 bp, Rattus norvegicus
  Genbank Accession No. AI013883
aaatcttagataacccaatctaacgtgtagacagtaggttaagctcaaacactggaaacagaaaagctgacactgagttcaccgtggcctgtcatttagccctttgattgcagtttacagggtcttcacaatacttactacggccacagtagggctgcccagggacaaactcaatggcattcacccagtcctctgaacccgctcctacagttggaaagtttgggtttcgtgactcagcttcgcctggattcatttcagcaagtgatccaacaccagaagggagacttgaggaagcagcaggggatggctttgcactcaggtc

SEQ ID NO: 1463 - DNA, 484 bp, Rattus norvegicus
  Genbank Accession No. AI013886
tttttatttttttattttttttttttcttataaggacatttaattggggctggcttacaggttcagagtttcagtccattatcatcaaggcaggagcatgacagtgtctaggcaggcatggtgcaggagctgagagctctacatcttcatctgaaggccaccaagtaaaagactggctcccaagcccatgcccacagtgacatactactccaactctgtcaaggccatacctactccaacaaggccacacctcctaatagtgccactccctaggccaggtgtattcaaaccaccacagggtacctagagaacaaccctagaactgcactctgagagggttccaggcttttcagactaggagctctacagaggactgaaggcgcagaactgactgggcttgggggaagaacatggagtcaccattttaaaacttgtatgaaagaaaagaggtgagcaatatggtcctcgtgccgaattcttggcc

SEQ ID NO: 1464 - DNA, 652 bp, Rattus norvegicus
  Genbank Accession No. AI013888
tgttcttttttatttttttattttttttttttttttttttttgacacgggtaaaatttttattcactaatatggagaggtgtgacttctggatccagccagtcggtgacataaataaggtagcgcaaaaagatcgaagctagagtgtgtgtgtgtgtgcatttgtttatttgtgtgtgcgcgtaaggcttcttggagcagtgccacagacccggacgccagtgaagaggatcactgcggtccttggaaattaccatggagagcacaacgtgggtaattagatgaggatgctctaaagcgctctttccatcttgtgcacacacatgcccgccaaacatgaaatgttcgccttctcccttcccaagtgacggtggctgaacttatttttagtgtcatttgctaagccttcgtgctcacagagagacatcccactgacccggccgctgggcattgtctataccagttcacatcaaagcaggcgcgctttgtcaggtttccagtcgaatatccatttcgcatctgaagtacagtatcgaaagtgactggattatctgagctatttccttcagctgctaccgcttcctcccccaccgtgtttctgctcacgctaacataatttggcatccttgatgtgacacgatgttgatatttcc

SEQ ID NO: 1465 - DNA, 547 bp, Rattus norvegicus
  Genbank Accession No. AI013890
atttgcaaatacttgaacttttattaaacaaatcaacacacttttacagtgccttgctggagatctgcctcagaattgaaccatcacttctggtgaggaagaaactatggcttcaggtacatagcttaagtttggccatgcaccatcataaatgcttcaacatctccagggactgaaagctcaacaagaggactctttcccaacctcttatgaaaggtacttcttcaattcttcaaccatctcttgaggctcaggaaatttgagctttcgtggagggcccttcttaataccagtccagagttcaacacgactgttgtccgggcgcagcagcgtcacttcgaagctgcccctccgcggcttggaccggttcacttgcacagatatctctggggcctccagttgcagagcctggctcagggcagcagcatggcggccgtagacacgtcagctcgtacaatgctcaatgaccacggccgcgccctccgccagtttctcgcgcttgtccgccgactcgataggcgcggccccggccttacgctttcttccg

SEQ ID NO: 1466 - DNA, 694 bp, Rattus norvegicus
  Genbank Accession No. AI013911
ataatcaggacagtgatctttaataaaaaacatctctagtaatcatgatcttgatgtagattgttcataggtacattcagaaatcactttctggccatgagaaaacatcatttacaaatttttaatgtcccaaaatacacattaatttaaaaaacttgatttatcctggccacttttttctcttggccagcaacaataatcctgagtgcctcaacaaaaattctgataaaaggaaaaatattgggaccgttaacaaatgtcttaaaatttgtctttaaaagggggaaaagtgtttaaagaacacatggagctttcttaaagttctttaacaaactaccttgggagctcaattcaaaaatagaacttgatgtactaaaacagacgtttcagcgcagctccaaaaatctttataaatacagcaatttgcaaggacgatcctggatcagaagtgttattccttgtgtatattgtgtgcatgccccatctcagttgtcataattgtctctgtaatttcctcctgagtagcggtcatagccaccctggcttctgccactgtagtctctagaccgcccatacccatatccatagcctccaggtcggctgtcgtatcttccacttccatatccctggtctccaccacctctagagtagctgcgaccacgcccatgggccccaaaagcaccccctctgggtt

SEQ ID NO: 1467 - DNA, 380 bp, Rattus norvegicus
  Genbank Accession No. AI013912
agcttgcgaccgcatgtgtttttttttttttttttttttttttacttagaatatcttttatttgtggtgttacataggaaagtcacagaacagctggctgcagggaacaaggttgtgtgtgtgtgtgtggggggggtttggggtgacacgggttgtaggacaccactgtgaatgacttgcttagagtatcttccaaccgatgctggtgaggactagagagatgtctccttccctggggtttggctagagacagagccatgtgccagctactgttaggggcttagaaaggcaggggccaacatatggggacttatgaggtggcggctatggatttggaagtgccactttcccctctgccaagaaaccaggaccctcgtgcc

SEQ ID NO: 1468 - DNA, 400 bp, Rattus norvegicus
  Genbank Accession No. AI013924
gacagttggaaacaaacccatcaaactggaggtgatgacatcccaaaagcccaagaggcaagggggtttgcattttaccccctctacttaaaaatttttttaattaaatgcattttagcaaaagtgattaaaaaaagaaaagggtcaaagccccagatgtcagcgagcaaggtggtggctcaggaaaaacgggctcttcagtcctcccaggaagtagcctaaaagctgccactgtccctcagacacaagctcgagcaacccaaccaatcctccctgggcaaaaggcccctgtactggcccttgtgtttcctaaccccttcaaactcggaaactccaattctgtgtcaagccttccctgtaccctcaaagggaagctgaaagggccctggaggaggacaag

SEQ ID NO: 1469 - DNA, 455 bp, Rattus norvegicus
  Genbank Accession No. AI013971
ggagatgtttgatcagatgtaataacactgattccaggccaggacagagggtattgcccctgaagcaaccagtattctgtggcccaaggtgcccctccgttcccagacctgagttccccgtcggttagttaaatagagggagatcttcccagggagtcttgggaggagggtccgagtcctgtacccgcctcgtccacgcagaggtgtctgagcacaagctatttacagtattcacatccactgtaccccaccaaaccaaggcaaatactacaagtggtccttccccgtggggggaggccagagaggctatgagtgtatgtgtgtacggggaaggtgggtgtccgagcgtgtgagcacatgaacgtgctgagggacaggacctgctttcagccaaagacatcatcagtctgtaaggtgcagattgaaaacaaagaggagctctgcctccgggagcc

SEQ ID NO: 1470 - DNA, 512 bp, Rattus norvegicus
  Genbank Accession No. AI013978
  misc_feature (1)..(512): n = a or c or g or t
ccaattttttttttggtacttttttttcggagctggggactgaacccagggccttgcgcttcctaggcaagccctctaccactgagctaaatgcccaacccccactgtgacatttcttaagtggacagtgactgttttgagggatttaattagtctgcataagaaaggcatgtaagaaagcagagaccgcatgtgtggaatgtcatacactaattcctcagcaccagcgagtctttctccactccacactcagcagtcagcaggctgactcttgtttgaaacacaggctccaactggaaatgggaatgtggcagcatcggcctgacggtgagggccctgaggttagtantaaagtacaaagatcccatctgctcttcagtgatgccacctgagcttgccactccctgctaacgctgtagcttatgcggtctccaagactctagcgagtatctaaggtacagtagtgagtttttgcaagagaaaaaaattatgtgataacatacgttcagaag

SEQ ID NO: 1471 - DNA, 423 bp, Rattus norvegicus
  Genbank Accession No. AI013993
atttaatatatacacagtacaaggctgaagcacctttgacttctctctcaaaacgtacgtttgtatgaaaacaccacacggcggtagcaatccactgggcaggctctctgtggacaactccacgtatcttccccaaggaaaacacggtactttgggtaagggtttgcctcttttcctaagagctgtcccaaggagaagcctttgactagcttgtgtgctccccggacctgtggctttgatgatgatggctgcgcaggaaggcgatgggactggtgggagggagccctttgcttgtacacacccggccttcccaacgcattagtcctgctcctgggaggaagaggtttaacccccggggccgtggcaacagcaacaccaccaaccagctggctctccctcagccatgtgcacggtgggcgtcag

SEQ ID NO: 1472 - DNA, 470 bp, Rattus norvegicus
  Genbank Accession No. AI014072
aaatgccaccaaagtagtcaacctgcttggcagatgtaattgagattctctgacttgctgttctgtttggaaagtacttttgggttttaagcagccaggctacattgaaatgagatatttcagatctggagaaacaagcaggtgttgggaaatacgtgacttaacatgataagggctgggttccagaaaccaacagtgagatctgtgaaataaaacccttaccagtgtggcagcgcagcgttttggacagtaaacctgcaagtctagtgaggactcagagaaagctgtagcacagcacagacaacatggaagtcagtagtaggacagggctcatcagagaccaggttagattacactggcttaccctacagcagttttctccaggtttggctgagcctttatgcacaccattgccctctgctggtggcagccgagataagcaaggactgaaaatggatcctttcacaagg

SEQ ID NO: 1473 - DNA, 430 bp, Rattus norvegicus
  Genbank Accession No. AI014145
gagcagtttctgcaatgacaactaggcctgtacaacgtacacggttcactctgttaaagctacggggttgggggatggggcccctgagaaccagtggggcaagcatcacgaccagaggcaagcagcagccaagggctgggggaggcggtatttgtggagggctagggaactagagaaggctgatgaagggctacagagaggggcagaagtctgagctgcagttgcagggatgcagcagaagatgggagaggatcagtcactatcgccattatgggcccgggggtggcatggtcaccatcaccactatgggctggagaagtcgtatggcatgatggatattttcacaggaactgctgtataaaaggactgtacaacataacctataatacagtgtttacatatggtacaagattcttgccctctttgggtt

SEQ ID NO: 1474 - DNA, 471 bp, Rattus norvegicus
  Genbank Accession No. AI014149
agaacagctgtttgcgatttgtaatgtgaagcaagacagagccctgctgtgagcatctggcagaaggttttttttttggttttgttttttttttttaattattggtacatattacccttcaaatctgagaatttggactaattgcaccaaagaaccctctaatttggtccctggcacatgcatacctgtcaatttttttcttttaccagacctgcattttatttgaattacccaaatagcaatatgtaagactcaaatgcagatgtgacaagagcttcttgaccagtaaaccaactagcccaggtctgagagagacgtgttagaagagagtctacgtctgtgaactctatttattttcctgtttctccggtgtgaagaatgtttcatcaaatgtccactttgtcgctcactgccgctataagcagctgctgctgacggtgggccttgcgtagttagctgatagatagatgt

SEQ ID NO: 1475 - DNA, 251 bp, Rattus norvegicus
  Genbank Accession No. AI014154
gtactgagtacttttattacacagactttaatagcttcagctggaaccagactaaacttaacacagtagattgctttcaattgtatattcttccttgttaacatattatggaacataaaccataattccatgcaccaatggtctttcctctaaaggtgccatagccttgagataagggttcgcctgaaggaaggagcatttagtcccacttggatgtttttctcctcacgtaccgatgcacttcactgtca

SEQ ID NO: 1476 - DNA, 474 bp, Rattus norvegicus
  Genbank Accession No. AI028942
tttttttttttttttttacagcattggatttgcatttatttgtggcactaagagaaagagtagacagctgtgactaagagtaattggctggtagctcttgcctcactgagaaactttagcaatgttaatcacacggtaccaagctcccactctacccgatgcctagatttaaaacagagcgaaacagttaaaggatttcatggtttcttttttgctttttttcttttcagtaaggcagagattttatatcatgaactcattttgacttctattgctttcttgattttctccatataagaaaaggttttagagacacagtaaaaaaaaaacacaaaacttcctgctgagtttaaattctttaaagatggtgtctacccacaatgtactataagaatgtcatataataccagggcagctgctggaccatgccaaagtgtgtcacggaaatgtaagccacagaacacacagcacaat

SEQ ID NO: 1477 - DNA, 362 bp, Rattus norvegicus
  Genbank Accession No. AI028948
tttttttttttttttttgtcactgatatacttttattgtggcatttacgcttttctgggcacagcatgcttgttagatacaaggtacacagtacaccattctcctgtaagtcaagtaatgggctactctctctctccaaacagtaagcatccctgtgtgtcggtttcctgccctttagtgcactgaagtgcattacagactaaattaaacaaaatgaaaccccaaaccacacttatttcgtgtttgtgtgtgagcattcacacatggagaagccagagagacaactgaagggagttggttctttccttccgccacatgggtcctggggattgatttcaggttgttggggtgagggtggggag

SEQ ID NO: 1478 - DNA, 300 bp, Rattus norvegicus
  Genbank Accession No. AI029026
tttttttttttttttttgcatatttggatagttttaatcattagcttacgacggtatgctgccaaaacccttttctatccttgcatttttcagagggagaatttgccaatgacgaatcacgcgctcagaccttaagggcccctctgaactcgctaacgcatttcaaatgggcaacactagccggtatcaaagccggagggggtggcctggatccagaactgctgtgagccagcatcccagcagtgaacagatggcacacgctcgacaggagagaatgacgatcgtggagagtcctgagca

SEQ ID NO: 1479 - DNA, 386 bp, Rattus norvegicus
  Genbank Accession No. AI029057
tttttttttttttttttctattacactcagtcatctttattagatacagcccaggttagtttttcttaaaacagcgatagtgccacatgaattattcatgcactcccaatacgtgtgtctcaatctcgttagcaggtgataaaaaagataacatcatctcaaaaaaataaaaatgtccttcagtgtcttgctttgctttaatgttctctataaaataattataatgaagagctaattctttttcattttgttcatgggggaaagaggaagagaaagcaccttgctgtgtagcccaggctgcacttgaactcacgatgctcctgtctcagattctcattgccatgcctcactcttgaagggttcttttttttcatttttcctcgtgc

SEQ ID NO: 1480 - DNA, 329 bp, Rattus norvegicus
  Genbank Accession No. AI029058
tttttttttttttttttgggattttaccaattttatttctagatttttttgtcttttttttttttcctggaccatgctggtcacatgtctgtgctgggaagcgccatggtgtgtcaaccagaatacacaaaacaagacagaacactagaacctaacagattaaatgatgcaccagagactcagaacaaatctctccgggtccagcagcatggtggcatgcacaacaggccgctacaagtaacaatattgataactaacagaacacagttgccctgactgctgtgatgctatgtcccagatcaaatgaaggcccagcatgacaggatgat

SEQ ID NO: 1481 - DNA, 323 bp, Rattus norvegicus
  Genbank Accession No. AI029066
tttttttttttttttttgaaagtgttcaaaccatttactaagcaaagtcttacccggcccaccccccaaaccccaagcttcgaggaggaaggcaacccttctaaggctctggtacctacaggccccctcaccttgggggactgctggaatgagaccaggtccagggcaagtcctttggttcagtaggttcctctccactaacaagaaaaatgccctttttaacgcattcctctggcagccccagggtttccccagctgccctttcaggttagcaggtaccaccggacattaaggcagcatccagcactccccaggactcagta

SEQ ID NO: 1482 - DNA, 550 bp, Rattus norvegicus
  Genbank Accession No. AI029143
tttttttttttttttttacctgaacactcatcatgtttattgtagtataattcacacgcagtagctaagatatgcaagcaacctacctacacggggaggtggtcaagctgtggacaaaatatccccttccaaagacacactccaacaactaacttcttctctaactaggtcccaactcctgaagtatctaccatctcccagtggattcactagtgattaatccactcataaaggctgagggatcaaatcatgtgatgcagttagatccctaggcccccacctcagaatactgttgcattagacaccaaactttaaacatggaggttttgggtagacatctagaactcaacaggtaacatttgagggctgtaggaaaccaccctgttactttctctgagagaaaacagagtagtaaagtgttattgccatgatcacttcacttgttacaagttttaaaagcatttaaacagttgcattttctcctcaacctccaaaatactgtctacccacattccctcttaagtgttcctcatgttgtcacatcctcagt

SEQ ID NO: 1483 - DNA, 298 bp, Rattus norvegicus
  Genbank Accession No. AI029191
tttttttttttttttttggaaagtaaatagccctttaataaacagctgtgaggggctaagtgatttgagtgagatcatttgagtgagtaggttaggggccaggagctggtctctgaatggtgtagggctggtgtccggaaggagagggacctccaacagcaggagggaggagtcagggcggacagacgtggaacagaagagtggatggtggcatcatgtcaggccactccgcagattcccagctccatcctgcctggacagagctcgcctccggtttcccactagggatcttcctcca

SEQ ID NO: 1484 - DNA, 269 bp, Rattus norvegicus
  Genbank Accession No. AI029211
tttttttttttttttttgggagaggcctccatattttattagggataccgcaggagcagaggctgccattcaacaacagataaattaaccgcagtgcgggtcgggcgtggggacttggccaggcgcttttatatatatatatatatatatatacatatatatatatatatatatatatatatatatatataaacaaagatgaagacagacagacagaccccacgatgtggggaaaggaggcagctccattcagacagcagggaggacca

SEQ ID NO: 1485 - DNA, 448 bp, Rattus norvegicus
  Genbank Accession No. AI029285
tttttttttttttttttagacaagaatcatttattattctcttagaaaggaaatgtagctactacaatatgaaaacgaatcaggaggtacaaagttgacattctaacttcaagtagcagcaaggattttctgtgaagttagaggcagtatttctccaaggtggagcacagggctctcgctcggctgggcagaggcaggtgttgccctgcctcctgatggcacacatttcccaggagtatgaggagtcgtaaacacaataagcaaacaaattatgggaccaacacacagatgtgctaagatcagaaacaatgttatgcaaataatgtgtataagcccagatcacggccggaaacatcgcaggacccaagcgcatgcatcattttgcttggacccaccatgcaaccatttttagaaaaactgaaagccaagatatgctctggagttttta

SEQ ID NO: 1486 - DNA, 549 bp, Rattus norvegicus
  Genbank Accession No. AI029291
tttttttttttttttttcaactttaaagaatttattttcccatttttagaataacattattgtaaagtccacagttattgcaacatctgcattgcttaaaagtattcctaagaattttgttaaagcatatttttaaaaaacagaaccaaaataatgtacatttttatctctaaacattgtgtcattaaagtccatatactgtcttttgtataaatcaatgtgatgttacaataatatacatgatctgattcttatcttaaaggctgctgaccatgtatgatatccaagatagactcaatgcctttaatgccagactcagaaactgttatgaccctagagaacgagggaaggctgtatgcacaggtgggagtctgatggcttagctatttgcagcatcggcttggcgaggccatccgtcctcctccactccagagtcatagtcctcttccgaggactctttcgatggagcccgaatgtatcctggttcctttttgccttctactacttctttgtcaacctccacacatacaatgtcagaattaggaactt

SEQ ID NO: 1487 - DNA, 444 bp, Rattus norvegicus
  Genbank Accession No. AI029292
tttttttttttttttttgaagtaatggtctttattctgtgtggaaaagtacagtagttgtgcagaaacaaactacataaccaaagagtaagacgttcacaaatattaaagaaaacaataaataagccgtatagttaaagcggaactcagagagagcttagaacaacgacctagctttttgtacaaagcatacaacacacaggaacagacacactgaatgacgctgcaaggttcctttccatacaaaaccttaatgatgttcagaggagcatcgtggatactcatgtctaaaacattctgcaaatatagaacttccttctccccgatctagaaaatacatttcacatctcgacatataaaatactgcccccccacctctctcaaaccagcatttgaacatcttccaaataacaccattttcatataaaaatacctcaaaccaagg

SEQ ID NO: 1488 - DNA, 570 bp, Rattus norvegicus
  Genbank Accession No. AI029434
tttttttttttttttttgctcttttaaaaaaagtttatttagaatacctacttgtagaagttaacataattttacagattattagaaaaattcttttctctctgcaaacataacaggttaggaataatagattagaaatgtatacattacaaaaccgcctgtgactatctatacatttactatgcaccttaagagaattcaacagtgtgctatatttacactgcagatgacaacatacttatatcctatcatacaaaactgaccagtgctagtgcttgggtttataaacccagtaactgaagtatttaaaattgaacgcatatttaccatgcccaaagtggaaatgaattcaactgaagttatgtggctcatcattcaaatggttcatgacttttttttcaaataaagaatttcaatattatgacattaaaataatttttatgataaataaagaggctgatttttctacatacttcatgtagtcacattcattttgtcacggttttcctgtggccctcactaagtatgttcatcttattaataagacactggtcctatatgatgttaaca

SEQ ID NO: 1489 - DNA, 482 bp, Rattus norvegicus
  Genbank Accession No. AI029450
tttttttttttttttttacaattagttcatggtttttattaccctggctgtttacagaaaagtattttccactgttaatttgggcataagaatagctgtttattttgtgacctttttagaagttttaaaaaatgaaaaagaaaaactgtatctgagatcttagtatcattggttttaaaaaaaggacgggagaggcttctgtttcatccatcagtaactccgaccaaacaaggtgtagaacttggcaggattcttgccacagacacacatggctcctggctgcagctcacacagagggttgaaaggaatgcaaaggcttttggctcccatggatggagcaccaggttccacatcctgatccctggccgttgtcgttttgatccagtcttcacagtcaatttccccacagaatggaatctgtgcaaccttcccagaatctagcaccttctgaaagtcttccagtgtatccgatacaaccatgt

SEQ ID NO: 1490 - DNA, 540 bp, Rattus norvegicus
  Genbank Accession No. AI029455
tttttttttttttttttgataatttatgtttctttaatagattttaattcttaggaatgtttaactgtccaagtaaaattgaacatgaattccaaaatcagatttctcaaagctggaactagaggaactagagcttgtggtacagcatctgcacttgatctagcaaaaagacaccgaaggaagagaagcaataggagaagccacctgcacctaaaacttataagcaaaggaatcaacattcagataatggataagatgtttttgcttcattttttttctgaaagataaagcatttctcttttgtaaaaagaatgcctcctttacattttagaaaaaatgttaacaccacagtttacaagagcgatgtttatttttcacaacagtaaagtaaattactgtgaagttcggcagcacagtgagcactgatggatctgactttcagaatatgtttctggtacagtgcggtgaagccacttagacaattccagttatttgcccagcaccttccaaacagtttacccatattgctcatcaatgttc

SEQ ID NO: 1491 - DNA, 476 bp, Rattus norvegicus
  Genbank Accession No. AI029647
tttttttttttttttttgaggttttcttttgtttaatgaagcgttcaattgcacgtgaatcttcagtgaagtcctgagagcgatgtgtacttgtgcgtgtgttcagggcatcccagcccccagcctatacactcctcccattcctccccactccagagggctccggcctttcctgtaaccaaccttccagccaatcagtcttcaggccaggtccaagtcccaacttgcccaagagttgagcctcggcagggagccgagtctgcgggagcaaagtcaggtgacccggagggtggggccggctcactgccaaccccaaagttagaatgtgcaccgtgactgctttgggaactcggggcgtaggtgtgagctgcagggatagatgggtcttgtgggagcccccattaaagaagggagtgccagggtgaacgagcatgggaggggaatttcaaaaagttggtttcctaaacctagggagg

SEQ ID NO: 1492 - DNA, 177 bp, Rattus norvegicus
  Genbank Accession No. AI029672
tttttttttttttttttaaacgtggtttgctgtcactttaattaagacacagttgagtgcacaggctgcattgccaggcctgtagcctgcccatcctgacctttggcccataagctcatgctttcatgaggagtgaaaagggcgcctgattccacagtgacagattattgctgacct

SEQ ID NO: 1493 - DNA, 316 bp, Rattus norvegicus
  Genbank Accession No. AI029694
  misc_feature (1)..(316): n = a or c or g or t
tttttttttttttttttgatgattcattgtttatttcctttctcccccaccgtgaccttggtgatggctgtacccatatgagcattcatctgagcacatgaccggaagtcatcgtaagagaggagcagaattcttgtctagacagtaacagaagggagttagctgcaaagatagcatatctgttgtgcagtaggaagctgcccaggtcttcttggagaatgcatanaagacttagaatcatggatcatctgtcccccaaccaccctccattgctccctgcttgatagccaacctgatctgagtcaagcgtcacacg

SEQ ID NO: 1494 - DNA, 240 bp, Rattus norvegicus
  Genbank Accession No. AI029709
ttttttttttttttcttgggtgagagtcggtgtctttattgcacaataccaatgtcaagttagaagtgaggcttaaagacctcgttttcaaagaaacattcaggtcactgggaacttggcttagccatcagacatatgaaagacagtattagccttggacatttcttggcacttgtttcagagtggtggcctggaccaacacctctaagttcacatgccaagggccagcaatctgtccaa

SEQ ID NO: 1495 - DNA, 543 bp, Rattus norvegicus
  Genbank Accession No. AI029723
tttttttttttttttttgaatggcatgatagtttatttaaaaaacagaaacgacgaaacaaaacaacaacagtaacaaaactgtaccacactgatcatgtgaccagcatacacgtaatggcttttctcttgggtattaacattgcagtatgtttagatactgaaatgtttcaataggaccaagaacgttagagagtaagaatcttggatgaaaatggacactggtaagtctggtgcattaacccacagaattcatttacagccccatgaattggtggcattatgctacgcggttaggagggaggaaagttatctcgggaggaggcagcgtagactgcacacgtctttgtactttgatctttagtttgtgatttaagctgtgtccaccctggctaaaccacaatcatacaagacacctcaggtaatgtccttgttactactgcacaagtttactaacttcattaggagaaaaaagaatcaaaccaccatcaaaacgaagaggcaaataaatgtgaccaaatcatttgaaacgaggaaaagcttg

SEQ ID NO: 1496 - DNA, 394 bp, Rattus norvegicus
  Genbank Accession No. AI029733
tttttttttttttttttagactgataacaagaagaaaaaaactttattgtacaaggttcgaaatggatgaggaagtttgggtgtagcagggcatccgtgccctaattagcatcgtatgcccattccgatggccatgaaagtgccaaaggtaccgccactctgcatcatggttttcccaatgccgcccatcagctcccgaccccgcattccgatcctgagacaggagaaggtgccgaacagggccccggccgccatacccacggcgcaacccatgacaaagcccatcttcacgcggtcgaagcagctgggctgggactgcccgtagggacccacagccaccggcatctcgttctctgccgcggtcgctcagctcgacgtctcacaccgaaagcta

SEQ ID NO: 1497 - DNA, 319 bp, Rattus norvegicus
  Genbank Accession No. AI029917
  misc_feature (1)..(319): n = a or c or g or t
tttttttttttttttttaagattagagagaatagaagggaaagtgggcagactggaatccccccaaaaatggggcccagagaggaggaagagtagagacagcaaggggttgtggaagccaagaacagccagagcaggtgagtcgaggtgttctgggtgacttggggctcaaggtatcaaggtaactatggcaggtcgggacagcaagaaagaggctccaggagaatgagatgatgttccggtgttcaggcaagcanggggtcacagcacactgggattccggaagttgtgtcncgcgaagcgcctcgtgccgaattctt

SEQ ID NO: 1498 - DNA, 477 bp, Rattus norvegicus
  Genbank Accession No. AI029960
tttttttttttttttttgtcaccagttaaatttaagaacctctctcgtctctattaacagataggaagcttcagggaccaggtactttgaggagctttctgagccagtgaaagaaaacaaaatatttcctggaactggtaagcttgctgttttcagagtgtcaacaagcaaacacacacgccacacacgtacctcgtgaaaacaatgccgctctggccccggccacactgcctgcaggcactgctgcgtgtccttgtggtattctaacccacaccctccccactctgagctcatctgactaaatataaggaaaatggctatgatgtggatcacattttcaatgatttttaaattgtacttaaaaaaagatttcctagtaattgagtatataaaagtccttgatattaaatctctcagtgaaataaaatatgcttaaacaagacgatgtcaatttaagtctgaccacctagctctctt

SEQ ID NO: 1499 - DNA, 537 bp, Rattus norvegicus
  Genbank Accession No. AI029969
tttttttttttttttttccttttaaagatttttaataggtacttaaaaatggacagttcatatcacagttacggaactgtgatcctgttagctatgaggagtatgcatttttttccagtaaaacagtttcatgcttataaaagtcaccgaaggtcaagttgtggcaagagcacgtacaataggaccaatccaagtagcaaagagggggaggcagagaggttagaaagcagtcacaccgttgacacgaaaagaacaacgaatacacatttctgtattttgaaggcaattcacaatcatttccaggaattctgtgagaatttaaggccatttgttctaaagaaatgtagacatgacttcacaaaactgtagtttgtataaaaactgtacattgaaaactatttagaattgattgtgagcaggcagatcagggcggaggggtgggctatttcacacacaggcaggtcgggccacaggggtgagtttatttcacaaatgtgttgtgcgctgagtcacggggtcgtgtacgtggaactgagg

SEQ ID NO: 1500 - DNA, 296 bp, Rattus norvegicus
  Genbank Accession No. AI029976
tttttttttttttttttgagggagaaagaatttattttaactcctggtttccaagatttctacccactaaggctgggggtaggcagcggggccggggtagggggtgaggaacagaaccgctcacaaagggcagctgggaagcagaaagaagatgctcctgaggggacaacgcttccttggtctctccttatcccacccaaacctccatcctgctgtgtgacgacagccacagccagcggtaggtcttctgccgtctttagtcctcactagaaataccttcggattttacagacctt

SEQ ID NO: 1501 - DNA, 147 bp, Rattus norvegicus
  Genbank Accession No. AI029996
tttttttttttttttttacaaacagaatcccattttattagcagttagttcaagattgtacattaatggaggaaagttcccacatttaacacaacccaaaacggctggttcaagagccctcttcaggtgagctgggtagcatgccct

SEQ ID NO: 1502 - DNA, 179 bp, Rattus norvegicus
  Genbank Accession No. AI030001
ttttttttttttttattctggttttattggggtttgtttgctaaagagacaggtggcagcctagacagaaagctagtcagtgaactaaaaaaatgtgatatggacacgaaaactagctctccacaactgaaggcatctggtggtggtgtgggagggaaaggactcagttctatttaaga

SEQ ID NO: 1503 - DNA, 394 bp, Rattus norvegicus
  Genbank Accession No. AI030024
  misc_feature (1)..(394): n = a or c or g or t
tttttttttttttttttcaataaacaaaactttattttcctttaatacaaaaattaaatagcaagttttttaatacagtgataaattagaaatttacagtacagacatcaatgtagacacacttttgtacatccttaaaaagggggatatatttccttggaaattcagcaatttgttcagggcatggatagcaggggtttgccaggtacctctacactaagcatccgaatggccccaggttgcctccagggttctgcagttactgaaaggcatgaggatccacgtaaaaggcanagagcaactgggtaaactgctgcacaaaagacttctaactgtattttatcggcttgcagactgggattattattttagttcatccttcttatgaagagcc

SEQ ID NO: 1504 - DNA, 322 bp, Rattus norvegicus
  Genbank Accession No. AI030091
tttttttttttttttttaagcttttttttttattaaaatactgtcatacccagtggaatgcttcggcaatcctggtacagagtggcgtgacaaaacagccatgtttgcaccttaaatattcatgataacttaaacacacagacacacgtcatggtctttggcagaaaacgttcacagcacaaaaaaaaaaaaaaaaaaaataccaaatattaatccaaaatatattaagttgttttttttctttcacgatattttttgtttttccctcctttttttttgttttttttttaaacttttatctttgtaaacaacgcacatgaac

SEQ ID NO: 1505 - DNA, 192 bp, Rattus norvegicus
  Genbank Accession No. AI030170
tttttttttttttttttgtccttcaaaaaaatagtttattttgcagatctcccggtagcctcttcggcgcacccaagtggtcagggcagcagcgagcgacagtctaggctgtcctccacagcaaaaggaccttgcccagaactcttcatcccccagaacagcaacttttctccactcgccccaaggccccct

SEQ ID NO: 1506 - DNA, 365 bp, Rattus norvegicus
  Genbank Accession No. AI030172
tttttttttttttttttccattttatttgattttattttgtcatgtgctcacagcatttctctttctctcctctccctggcaggtcacagagataaattaaaaataaaatctacaaggaaaataatttataaaaagcactcccaggctccactttctatccctactgctcagttaggaaacccctcctccctgcacagggaggaggatcagtgcttcccacccctcacccctgctagtctggggcaggcagtactccagagctgatcaagattggggggcggcagtggcagtttagaaaaaaaaaaaaaaaaaaagacactgtggtccgggaaccatctggctgtcttggtgctgcccctcactg

SEQ ID NO: 1507 - DNA, 505 bp, Rattus norvegicus
  Genbank Accession No. AI030175
  misc_feature (1)..(505): n = a or c or g or t
tttttttttttttttctcggcttatgagtttattattcctaccattcaaaaagaaggttctgcattaatggcttccccttctggtccatttagcccttagatgctgagagagtgggctaagggcatagagcaatcacatttaggggttctggtcattggggtcacacttgatcataactttcagccccagtccctttttggctgtttcaaaggcttctacagccttctccagggggaacctatgggtcactaagggctttacattcaaagtcttcgatgcaagcatggaaactgccatcggccacgtgttgcagtatcgaaacacgcctttgatgtccacctcccgcacagctgcgtgcactaggggtaaattgatcatctcggggcccattcccacaaccaccaaggtcccgccagagtgagtggcatanatgcccgtctggacagaggactccgctcccgtgcattcgatggtgacctctggcttgctccccagcacactttc

SEQ ID NO: 1508 - DNA, 372 bp, Rattus norvegicus
  Genbank Accession No. AI030259
tttttttttttttttttccctgcctccagtgtttatttggtcccagctacttccctcaccagactcatgacacagggctcgaggcctccagaaggtcaagggcaggcaggagatgggatagggagggtagaatatgttctttaggtacagcatctctcactgaggagtccagaggctccgcacctaccaccaggaagctgtgcatacccacagcccgagccccctggtaatcacagcggtaactatccccaacgtgagctgccgccgaaggctctacacaagcgagttgcaaagcctcacggaaaatccgaggatccggcttaggacagcccacagcctcagaagtcaaaacaaaatcaaaatgttctctca

SEQ ID NO: 1509 - DNA, 562 bp, Rattus norvegicus
  Genbank Accession No. AI030271
tttttttttttttttttaaaatgcatgttttctggaatttattctcccttgagagacaaacacaaacgaactgaggtaaaaaaaacaatgacacagactgaagtggacccagacacttggggacatgtctatataaaaggtatttctagaaaaaaaaaaaacccacaataaaatcaaatgagccaaacaaaacataagaagcctttggtacctttcaataacaaaagagaaacatatttagatgattaaattcacacaatatgaaaatgaaatattgggttaacttcataaagcagaaaaggagagcctaaagaatattagcatccaagggcaaaacttcctttttctcctctttgattttaataaacccccagaatttggcaaagaatttcctgaacttaaattgtcttctggtctgcagatacctagcagtatggcgtttcccactcacctgatgttcaaatggcactgtctggtcatgagcagcacacttcctttgtcccacaagcctacaggaagtcaacactacgccttgaaagctactggccttccagtcatgtct

SEQ ID NO: 1510 - DNA, 415 bp, Rattus norvegicus
  Genbank Accession No. AI030284
tttttttttttttttttataagtcaaagtatttatttatgacatatttacatacttacaaaattgatttttatctaatacatcattctaggcgatatcacaaaatgaatacaatatcctaggaaaaaagtctacacttaataatttatgtttaacacagcaacttttacatcagattatcaatttggctccccaaatcatagtcctatttagttttccttcttttttctctttttgcaaattaagagtaaactaaagggcgagttgaagtaatttagttgaccctgagtaagagctaatttgcataattcagaataggtgtacattacgtgctttcgtttcttttcttacaagcccacatttacctctatctaaagactgaggagaaacttaataatgagagaatcagaaaactc

SEQ ID NO: 1511 - DNA, 394 bp, Rattus norvegicus
  Genbank Accession No. AI030301
tttttttttttttttttgaggacaaaaacaacctgtttatttccatgtaatttatatacaagttataaacacttccttctgctgctcagaacttttccggaaaggtctccatttcttctttaatcctgttttctacgagtaacgtgaagttactgtctgtattggagaggttgtagctgacaaacacctgtttgctggtcttcctggctaaacgctgagcaaggccggtggaagtcgtatcagaagtgtctccaaaaagggaggtgcacacagggatggagtcgaagcggctacacatggccacagcgaggttgcgtagatgcggcgttgcccccacccacaggaagagcgagtccgttagccgcatgacatgaaagtggacgagctgctccca

SEQ ID NO: 1512 - DNA, 394 bp, Rattus norvegicus
  Genbank Accession No. AI030449
tttttttttttttttttacaataaaaataaatctttaaatgttttccagcttatttccctgttcctccgccttccccatgaggtactacttactatgcaagtcagtcaggtctgaaattctgaaattaaagttcaacatggtaaagacaaggaaggcgctctaccctcttgacctccagagactccacagagatagcaacagtaaaggcagcagagactgcctgggtcagactgtaagcagggagaagttgggaggaacagaaaggcagtaagaatgataggaaagaccactgatagactgcaccctgacttcttggagaggtcatggcctcacagttccaccagactgggaggcctggaacggcgagctcatctttttccagtcactagaaga

SEQ ID NO: 1513 - DNA, 302 bp, Rattus norvegicus
  Genbank Accession No. AI030494
  misc_feature (1)..(302): n = a or c or g or t
tttttttttttttttttcacctagcagtcagtgcagttcaagagacaatcacaaaaacaccaccacttttagctatgacaacatgagacatttggcagcgtccatagaaatagccttcctcaccccaagccatcacagagggtccacaaagtcctttctctttggtccagtccaagaagctgggggaggaagacngggtcgaccaggtaagaaanagctgcagaagcaatcacaccaactgcttagtgctgctgtccatctagcacggctgaggacgccgcagcctcaaacctcctgggtga

SEQ ID NO: 1514 - DNA, 384 bp, Rattus norvegicus
  Genbank Accession No. AI030545
tttttttttttttttttaaattttgtacattttattttttttttttttgggtttttgaagcaggagcttgcctgaaactcaatgtgtagtcgaggagactctttctcctgcctcaactaccaagtgctagaattacagatttagtacagaccaactgaacatatacaatgttatcttgttttaataaagaagtcgggcattgtggcacatccctataattcccaggacttaggagagagcactatggtcaggagttcaaaaccagcctcaactacatagcaagttcaaggccagtcccaactacatgagactgaccatctaaaacacaagaactgggatggtagtgtgcatataatcccaacactaaagaggctgtcactggaa

SEQ ID NO: 1515 - DNA, 447 bp, Rattus norvegicus
  Genbank Accession No. AI030668
tttttttttttttttttaagactgtgtcatatttttattttaagctataaaaacaaaattaggcaaacaaaacaacagaaaaactcaaaataggttcaaatgatgtatattcatcttttccaggaaagcagaaggtaggccctaccacaaagaaaagatgtcattaatggaggttaactttcaacgtacattaaatactatcaattaacgtctgaagagaacctagggtttgttcaccttgctataagcatgagttgacttttgttatgtcattgaaaacataaaaatgccttaaaaatctcagctattaagtatgatcttactggaaattcttaaccacaattttccttcctggaatgatgtcgtgcctgtgcatccctctaaacataacggaaagcacagctaatgcaggcgggcttcaacctgttctaccagctgaaacagctt

SEQ ID NO: 1516 - DNA, 271 bp, Rattus norvegicus
  Genbank Accession No. AI030681
tttttttttttttttttgtaacagaaaaggcggtacatttattccatgtctgaagggaggtacaggccttctctctccttaggactctgggttctaacatctgtccagttggcatggctatgcttgataccaaccagctgtttctcagaatcaagggttcctcatggagaaaaggcaaaggatccctaaagcaccagccgttggcctcaacttcccactttctcaaatgcaggtgcatccagaccaaacacagaggggccatttgtgggtc

SEQ ID NO: 1517 - DNA, 222 bp, Rattus norvegicus
  Genbank Accession No. AI030706
  misc_feature (1)..(222): n = a or c or g or t
tttttttttttttttttcactccacagacattgctttttatattgtttttctttttggccaagggactgagagcattctaggcttaaaccattggtctacatggccatcgcacaagtgatcagtgctgtctatcatgtgcatgaacagtgcccatgtcatcctgtcccatggtanggaatggctgatagttagcctgagtcccttgtgaaaggggatgatgg

SEQ ID NO: 1518 - DNA, 585 bp, Rattus norvegicus
  Genbank Accession No. AI030738
tttttttttttttttttacagaaacagtttttagtttttaatgaacttgtaaacaaaaagctcccatttcaaaataaaaacaaaatcccagatcatatagatgtttacagtgattacatttatctaagcaagacacatacatgttcagttgtaagacggtaactaaatttctgtgacaaatatgctttttttaatagcaagaacattatagagttaatgcagagtcctaaagataatctagtaatcgctatgttttttttcgtaagtcttcactttagatgctgttagttctagcacagtaagcaggcagagtctttcaaatgctcgaacactggaatctttggttgctaccctatcagctagcttgcaaacaagaagccagccatttaaagaatgtttttacgtcaacaagttgcaaaccccagggatggaaaaccctaagaacacacaattgtgaacatttacaaccatcacaactgtggctgaagactgttcatgccgttcttctgaaatgagatctcaaagcagtatagttcaaaataaaagattttaacaaaaaaattggcatatgcacaatttctccac

SEQ ID NO: 1519 - DNA, 509 bp, Rattus norvegicus
  Genbank Accession No. AI030799
tttttttttttttttttaaaacctctgcaattattagtttattagtatcatccaggactcatgttcagtattcctcctcaaattacagaacaaaggcaactgtaaagaacccaagtcaaaatgatataacagcactccatcacaaaagcgcggaaaattacaagaacgctattttaaaacactggcactttaagagaatgataatctcaaaaaaaaaaaaaaagaaaaagaaaaaaagaaaaaaagaaaacccacaaaattgccaaattgttccctaaactaagcagattaaacatgattaatgaatgagttcgggctttataaagaaaaagcaaatggcttagacaactggtactaatatgcaaagtttatccgctttccttgtatctgatttataaagggacaaaccacaatataggaaaatatacccttcattttaaatgtggcataattttaaaagctggctcaactaattaaatatacctttaaacagtcaagtttcctgagca

SEQ ID NO: 1520 - DNA, 398 bp, Rattus norvegicus
  Genbank Accession No. AI030835
tttttttttttttttttatggtgagacctaggaattttattttaaaaatattccctgcaaagtaaataaacatagtcacagtgaaggaaaactcatggaatgcctagtacattgagcatgttaaagagaagttataagttcatggtactttccaaggatctgccgttaacatgggctcacacggaagtcctctggtagcacctgatgtgttcactgttctttctcgttgcctggtggttctgttgactgctgctctgtgacctttaattcatgatgctttgtccattgcatgataccaatcatcacctttgtctcattctcttgtgtggggaagaaccaaacttgttctggtgaccagacatctgagctagttgttcttcaactgccatcagtttgat

SEQ ID NO: 1521 - DNA, 233 bp, Rattus norvegicus
  Genbank Accession No. AI030839
tttttttttttttttttgagattacaatataaacacaatctttctcttcacccatccaaaaccgcccatataccccttctggcactcttccaaattcatgacctccttcttcataattattgttatatatacataggtataacttattgtgaagggcagcggtcacagagtcctgaaaataagggacagaagatagcttggtcctaaataggacatttatttcacacttctaa

SEQ ID NO: 1522 - DNA, 152 bp, Rattus norvegicus
  Genbank Accession No. AI030921
tttttttttttttttttgcattttgagattttattatcaaccatgcaccacgcctatcacacccctcttgcagtgacacatgtgggaaaagcaggatggacacatactgtatcctctggctcctcccttagaatatatactcttcaagacca

SEQ ID NO: 1523 - DNA, 451 bp, Rattus norvegicus
  Genbank Accession No. AI030932
tttttttttttttttgtattcaaactagctgcttttctaatctaatcaggttaatttcaatacaaaaaaataaaaaataaaaaataaaaggtgccacctggtcagcaacatcatacactggtgacaagagcaggtttactgagttgtgagctcagactgctggaccttcaggctggccttgtccacctcggtagactgaggataaaagggacctaccagccagttgagaggcgtgttgttaacaaggtaatccataacttcatctaaggactccttcattttctgcagctgccccttgctagaagtgaggacgccatcagacacttccttgaaggaggtaacattgcggaacgccgagtagatgtcacctgccatcacccccaagtgtttggcctggtcttgaatgttctgtggtaacccttggacgttgaacaggaacgtctggcatgta

SEQ ID NO: 1524 - DNA, 488 bp, Rattus norvegicus
  Genbank Accession No. AI031012
tttttttttttttttttgggacaaagaccacaaagatttaatttaaaatcacagtgtctcaggcaggctgccctgctgtgagggcaacctcaaaccacatctcctccaggggttttctagcccagcagaggaagtgtagcagtcctcagtctggtctccacactcctggagaggaggtcaagtccttaggtgcctgctggggcaggagggtccgctggtgctgtggtggtctccttctgtaccagttctggctcatcctccccatcctgaggcgggtggaccaagaccttgtccaagatgccaaactcttgggcctccatggggctcatgtaacggtccctctccatggctgactctgcaggctctgcttggtgtgcttggcatagatgttgtacagctgccttttcagcttcatgatctcctctgcctggatagcgatgtctgtggcttgggccctggctcctccagagggctggtggatcatgatt

SEQ ID NO: 1525 - DNA, 510 bp, Rattus norvegicus
  Genbank Accession No. AI031019
tttttttttttttttttcaggttttaaacatgtttagagtaaactcgcatcttttacagacaacattctgtgacagtgccatgtgaatggctcctgcattggtgttttttctatctggctggatcctgctgagggcatggagccagatgccgtcagctacagtgtctgctgtcttgtgaggcactgaaggtgtgtactcagccgatgtcaccgcatctctcagtgatgcagcacggctggggggtccctgctcctgtgccatctctcctcagctttgcagtctgtaattaacttgttcttccggagactgagtctctaaaaaccacaaggttgcttcaccttgcttctagaactgggaccaggcttcagatgtgacagcaagagtaaaaggattcttcaaggcctctgaaatgagcccttggcatacaggtctgaaagtcccattgttggcccctggctggctggagtggaaaggctgctcaccctgcacaagatgtgctccctgcatgt

SEQ ID NO: 1526 - DNA, 304 bp, Rattus norvegicus
  Genbank Accession No. AI031023
tttttttttttttatttcatttggctaccttttattcattttattttaacttttcctgattctatcttgaacccaaaaaaccctacccttaaggcaacaagagaaatgttctgaaaacaaaacaaaacaagaaaacctactctttttgatttccactctcacattaaataacaataaacccagtaacccccaattatgcagttgtgaagtcctaagaaaccagagtttaaaactccgtccggagcacaccacacagggtgggttaagttccctaacaagaataccagtgacccacaaagagcaa

SEQ ID NO: 1527 - DNA, 366 bp, Rattus norvegicus
  Genbank Accession No. AI031035
  misc_feature (1)..(366): n = a or c or g or t
ttttttttttttttgttagtggtgttttattttttgcttcataatcaggttcaaagaatgtggatgataaaaaccaggagggctgtgtgcctcctttcccaacccaagtcaagtcctacccaccccaaggcagacagacatccctgatgcaggtttccttctatggagaacatggaatttatctagtcagtggaatctggctgtcacaggttgcaagttagatgaagactggcaacttcaaagttgcctgccttgctgtcagcactgccagactgagtctgaacagccgaggtgccgcagtgcatcactggagctgaactgtatgtagcactgcttttcctgngctggctcaagacccaccatact

SEQ ID NO: 1528 - DNA, 295 bp, Rattus norvegicus
  Genbank Accession No. AI043611
tttttttttttttttgtcattaaatgagatttattgccaaattccaagaaagatggatcataagcagaaggcactggatgcctcccccatgagggcagggaagcaatcctgtgcggtccccaccctactctaccccaccagcatgggaaccaacagcattggccagtaaggcagcaaccccagaagtacttgcccgactgtcacttgacagcacagacagaatctaattcctggaagcaggtgacctggcagaggtacagcatcctggttgctgtagaggacgatcctcgtgccg

SEQ ID NO: 1529 - DNA, 410 bp, Rattus norvegicus
  Genbank Accession No. AI043655
tttttttttttttttttacaggaaggggaagatctttattgcaaagtggagcttatcaaaggaaaaagacacaattctccatgtccttcatttcagcttctgcttctctttctttcatggaatctccaggatgtcactcaaagccagaattgactcttgctctgcgttggaggttcaggaaccttctatgggcaggaggatgtcccctcctcgtgatctctttgggttcatcataaagaaagccaagtagataatcatttcttcgtcggtgggatcttgccatgtccccaaaaatcatctcctcactgctgttggactcggatgtggacgcccagcggcagtgagcccacacatccttcacctgtcccttggacatctgcactgtgctcctgcaagcagctgttggcaca

SEQ ID NO: 1530 - DNA, 493 bp, Rattus norvegicus
  Genbank Accession No. AI043662
tttttttttttttttttcaaatgaaaatattttctattttattatctcattccatagtaattaggcaaattattttcttttgtaaacttatgaggaaaggttgagtttcacaagagatatgactgtttcttttcttttcttttgtcctgactattctttcattttatttaattatttctttttacagcccggattttatccccctctgtctgttccacatcccatatgtcctcccctcatctccatgaggttaatttcaccttgttaaatgaaagcactattgctggatccaaacacacttaagcacagctaagctgagcatcacacaacaatttattccctgaaattcaaaaaggatcagttgaggggattctgcatggaggcaggtggggcagggattgattacagctcagagtagtctctcagagataagctgctatcccaagggaagagttttaaacaaaattgtcaattgttcaatcttaggagacgt

SEQ ID NO: 1531 - DNA, 497 bp, Rattus norvegicus
  Genbank Accession No. AI043664
tttttttttttttttttgcctctatttgctttatttggtgttttatacaagtgactaaaataaatagagtaacaaaggcagacattttctcctagtgctccctttcagtattctgccctaaacacgcccaggcagcatagcagcgagtgtcccactgtgccacagcccatgcaccagtgacatgcagagctaactccctccatactctgctgcatcccacccttcctgtaccctttccacgggtcctagttctctctttccgtggtaagggacttaaagccccaagcccttaaaggatgaatccaagggcatgtaacacttattaagtggggagagctggtctgtctgccactgcttctagtgtatatgaatcattcccagaacttaaaacgtagattactggggccaggaggatagctccattggtatactgtttgccatgcaagcaagatgacctacttgcatggatgtcagcacctcagtaaaaagccagatgt

SEQ ID NO: 1532 - DNA, 372 bp, Rattus norvegicus
  Genbank Accession No. AI043720
tttttttttttttttttgaagcagttctcagtttattaaaaacaaatcatgccaaacccaggcatgatatgttttgtttagcatcttaaacaaaaagactcaattttaaacagtgcacttggaaggagaaataaatgaatgaatgacagggctgtgtggaaaggagagagtgccacggtcggagtcagatgatgtcattacacaaggggatggcctaccacattccctctgcacccacagttcacaggcaggaaataatgaggcagaaggaaagtgtcagtagtcgctggaatggaggacttaaccaaaccccaggagatttcagagaagagctcaaatctaacacactgtgatttaccttgacagttttgc

SEQ ID NO: 1533 - DNA, 370 bp, Rattus norvegicus
  Genbank Accession No. AI043724
tttttttttttttttttaagttttcaaaaaggaatttaatccatcacagcaagacattctcagcctataaaaacatccgaacaagggtttcaaagcagttcccacccccaaagcaacacacacaggacaggcctgagatcagttcattcaaataatctttgtacgcagagcatcccagagtatcaccccagcctaacctggagaaacgtcaccgacaagtgcagcagtcagggtcagcaaaataaatagagttaatatatatgtgtgctatccttgaatatacagtgaagaccgggcccggtgccatagcacagagctccttacaagtgtcctagtggctggacagtgggcaccccaggaacccaagcaa

SEQ ID NO: 1534 - DNA, 382 bp, Rattus norvegicus
  Genbank Accession No. AI043745
tttttttttttttttttcacagcttttgtttttattttaaaggaaaacaaaaacaaaaacaaaaaaaaacaacaaacccagtgcaaaaccccattttccagtgtcagccatgcccccctccccctggggtcaacccctggctcgggcctgactttttccccctactgtgcacccctcccatctcctgcatcccagagggcagcaggttccacgtccctggaggcccagatccaggggcagtgaaggagaggaaaaagactgggtggcagctcctgatcttgctttccccaggcctccagccatggctccgggtacccaccttggctctcattaaccctttcctggccacactactgggtggtgaggctgatctgggggaatt

SEQ ID NO: 1535 - DNA, 485 bp, Rattus norvegicus
  Genbank Accession No. AI043752
tttttttttttttttttgcacaagaatgccatttattcccctccccacttttcagacacatgaacacaaaatatccctgcaagccaaaacaaacaaacaaacaaacaaacaaaaccccccccaaaaaccaaaaaagcccaaaccagtaacagtaacaagaacctctgcaaaatttaaacaaccgttactcatctcacataaggatacaaacccttccttcatagcttagaaagtacctcgcatcgctggagacagacatccagtccaaattagtaaaatgcattttaaagcattacaagtctaagcatacagaaacagaaaccacaccatcggtcagatgaacacaagcacttttggctggtggatgcagaaagaatgtgagtgtcggcaggaaggggtaagaaaatggttgatgttgaagcagtattaatatggcgcccgccctaacctctgctttctcaaaatgaaagcagagcagccacctt

SEQ ID NO: 1536 - DNA, 429 bp, Rattus norvegicus
  Genbank Accession No. AI043759
tttttttttttttttttgaagaagaaagtgagaagccacagccttttattttggtgaagaaatggagtatcagggcttctattcaataagatatggaaggttgaggaatgcttgcttgcaaaagctttgcacaaagaagtgctggtagatacttttattttggtgggaaaacgaatgctgtctctttctctctcctctctctcccccctcaggcaactgtgccctctaccatcgtgggggctggtggtacaatgcctgcgcccaatccaacctcaatggtgtatggtatcacggaggtcattaccggagccgataccaggacggggtctactgggccgagttccgtggtggggcgtactctctgaaaaaggctgctatgctgaaccggcttgttcggttgtgactgtcccatgagtacccccccaaggg

SEQ ID NO: 1537 - DNA, 346 bp, Rattus norvegicus
  Genbank Accession No. AI043761
tttttttttttttttttggtggcatatacctttaatctcagcacttggaggcaaaggcaggtgaatctctgagttccattgttacccggtcagatcctgtctcaagaacaaaacaatacaaaccttcttccccttaatattccaaaacaaatgaagatgaacatgaccaaggtgcagaattcagctggggaattagaaaatgttaagcaggtagagagggaaattgtaataccatagcatttaaaaactgaaagattgcagtcaagcgtcttcacacattaggatcaaaggaagacaatgtatcgatcgattaatcccaaaatgtagctaacatctagctacacac

SEQ ID NO: 1538 - DNA, 498 bp, Rattus norvegicus
  Genbank Accession No. AI043805
  misc_feature (1)..(498): n = a or c or g or t
tttttttttttttttttaattttagtatttattgccatcaaaattagcgatttagggcttacacagaaaaatctgccaccatacaatctttcaaaggaaagctgtcttctctatgtgtgagaaagctttaacttattcctgttctaacataaaccatgtttaacaaacagatgcttgaacatgtgccggaatttagattaggcaaggaagttcactccacctagcaagcaagtctgaaatatcatctttgttttttaaaagtttgacctgaattactgaaatctaatggattctcatggtcagtcatatgaatacgttataatcagtaagaagtcagtattgcacattaagcttggaccaactcaagtttcttttttatgagttctttgccatatgtgttttgtgaaaagcctttttcatctagacagtattgcaaagatgtcatagtttatttgtctccacagttttatctacaggagcattgcacgttgcccgtan

SEQ ID NO: 1539 - DNA, 230 bp, Rattus norvegicus
  Genbank Accession No. AI043840
tttttttttttttttttgtctatagaaaagaaggttggtcgtgttttgataaaagctataaaatcagaagaccctcagcagagaccctgccaggcaagttgtgatgatctgaatgagaaatgcctcccccacatccccagtctccagcacgtgattatttggttcccagtcagtggtactgtttagggatagatttaggtgtgggctggctggaggcagtctgtcaacta

SEQ ID NO: 1540 - DNA, 451 bp, Rattus norvegicus
  Genbank Accession No. AI043849
tttttttttttttttttaaaggtcagaaaataggcttatgtttattcaaaagcttatcaccttgcacattactattttgtcttgttttaaacacacacaactcttttaagtgtggactttgcatccctgatatctagcaaaaatcatatctaatgacaaacacaagatttcaaggaaaattgatttgaagcatagacactggatctccaatctctaaaaaattgcttctattaacaaagattggggtgggaagtcagggagaggaccagaaaaaaagcagcttcaaattcagggaagcaaagtaaaatggagaggaacagaagtaactcaagtttactaatcctgaaacgtccaacaaagtgtcatcgtttagagtccagagcaactcatctggaattttaaataaataagcttaagtttattcacatcttctgcttcaagcatagcccta

SEQ ID NO: 1541 - DNA, 465 bp, Rattus norvegicus
  Genbank Accession No. AI043904
tttttttttttttttttctaaataaacctcaactttattcagctgacatgttctgaaagcaaggggtgaaaatattgccaatcaaagctatttaaactcaacagggcaagctggcttttgagaaaaagcctgaaacgaaacctgtaacacctactgtttacttggtccttagatttagcattccttcaagtggccgtacatgaaatatacatctatctacttggagtccttctggcaccctacctgcttcaaaccctttcacttatctacctgctaggctgcagtttctgacaagctccaagtaagtacacagccctctccactagagggcactccaatcaggctaggtgcccttccctctggagatgtaaggacagttgtacccaatcagatcagagtgatctcacaaggcactgaatggaaattcgagggagagcaacctaggcaaccagctcaatgcccctt

SEQ ID NO: 1542 - DNA, 469 bp, Rattus norvegicus
  Genbank Accession No. AI043913
tttttttttttttttttaaattttttttacatttatttactttaattttgtatgtatgaatgttttgcttgcatgcatgtctgtaccacatgcatgcagtgccaacagaggccagatgttagatgcccttcctgggattacagtcagttcctcttgtacctccctactcaaaccccaaacctctgcctggccccacctggactaggacccctgtggacaaactccaaggctacctctgcttggtctgtagtatatgggtgctgggcccagagcaagtactcagtgaaaatctgtcaagtgcagaggcaatgtagagacagagaatttgagatggcagaaacaaaaccacaccacagttgggggccagcaagatggctcagtggggtcagggacttgtcactaagacgcacctagggaaagtagaagtcactcccacaagctgtcatctgactggtatgtgtatgtgact

SEQ ID NO: 1543 - DNA, 330 bp, Rattus norvegicus
  Genbank Accession No. AI043953
tttttttttttttttttcccattttatttatttatttatctattttagttttgttttttgctattttttgggatagggtctctatagagctctatcctgaaattctctgtagaccatactggcctcaaactcacagagacactgactttggctagggggtgagccacagagcatcctctcccttcccccccccccgttcgaggactcacagaagttaggttgaacttgaacgtgacatctgaggcgagcttctcaatgtctgtgttggtcaaaaagatggcgttgatgttcgaaaggaacgtaagtgtgacgctctgaaccgggcttcca

SEQ ID NO: 1544 - DNA, 374 bp, Rattus norvegicus
  Genbank Accession No. AI043961
tttttttttttttttatacataggagactgagtttattgaacatgtgtttggtaagccgttgcttactgtatgttaacttaagtgctgggaacatgctgcatcgatcaaaaacgttcaacatcactgccttcgcagtgtttaacactctatacatcataagctacaagacactagacatcataaataaggaaatgacattgccagttacaaagcgggacatccaacacgacagagccatgggggaacgaatgacagttcttcctggacactttcccaataaattcgaagtaacaacttctttcttgccaagtctgcatggctgaacacgatgaaatccaacactcacgggtctgtgctgcatgtgggattctag

SEQ ID NO: 1545 - DNA, 483 bp, Rattus norvegicus
  Genbank Accession No. AI044042
tttttttttttttttttacatataattactttaattttacatttgcctttcaatatcactacattcttccttagtgtttgatttaccatcacttctacaattgtctgtgtttacacaggaaaaccattttagttagtaagattcccacaagttaggtaaaatcactttttcctttggaggtttcctgtagactgactgtacttaagagacatgcttcaccagggaacttccccagttgtccctccgctcctggaagttttgctgccatctctcgtctgagacttaaggcttatctgactgcggctttggccgttatcttctcaacctgaacaaaaggaagctaagctttcaaggatggttctaaaccttgaagatgggctttagattttacaattcctgtgttgccctttaagacaaaaaggtgtgcaccctcacagaacacccctccagtgatcaacacagaaataaagtagctgtctgaaa

SEQ ID NO: 1546 - DNA, 487 bp, Rattus norvegicus
  Genbank Accession No. AI044101
ttttttttttttttcttgctatcaatctttattgatgattgctctctgggaagtgttttgttttgaaagccaagcctaaaacaagcgggtacacaaagaaatccttcggccgcatcacagagagaaactacgcctcaagatcccgtttgcagagtattaacgagaaggtctacttgtgggcagcagaggaaacaaacattaagcaaagagcataaaccgtaggcacagcatgtgtgctgtcttcacatccagcctcatgttgacacggtgagatagggattcacatacaccaagctgtttcggagggcacgggtcctcggtgaacccaggggtgctgggggaagggggctggcttccagctgagtatttcatagagttaaaggaggagagagagttcaaatgtggccttgaggcttgaatatcctgggaaagttgaggcaccagcctgaaaagcctaagaatcttcctcttctcctccctcttcctc

SEQ ID NO: 1547 - DNA, 178 bp, Rattus norvegicus
  Genbank Accession No. AI044137
tttttttttttttttttaattttttttaatacgaatttattttttatgacacgaattcaatttattgtacttcaacaaaaaatttttacttcaaccttcaaacctagataaaccaagctaacgtgtaaacagggggttaagctcaaagactgggaacacaaaatgggacaccgagttc

SEQ ID NO: 1548 - DNA, 139 bp, Rattus norvegicus
  Genbank Accession No. AI044176
cggccgcaatgtttaatcgctattcctctctttaaccactactcctctcctctccgaaacctctcactccatcagcgacccatcgtcccactattgtcccactgtacaaatcttttccatccttttacatagtttccat

SEQ ID NO: 1549 - DNA, 391 bp, Rattus norvegicus
  Genbank Accession No. AI044225
tttttttttttttttttatttatagcctttagtttcctgtcagctcatgaagcacgagtggggagtgggcaaaaataagaagcgagcaatgaggagaactggggaggggatgtttctagaagaccacctgggaagaaactaggcacacagggaaatgggttgggatagggaaaggggatcctaaagccagaaatcacaaagaggcagaggatgctgagagtctgagaggaacagctcaagaccagcagggctagtccttagacccctgaactccccggatgtgtgggaaggactggaggtacagtcacctgccacagtgctctccatgaaggaccccggtactgctcacttcccaggctctgcacacactgaagggtgggtctctcccagc

SEQ ID NO: 1550 - DNA, 365 bp, Rattus norvegicus
  Genbank Accession No. AI044259
tttttttttttttttttagtgtccatgtgcatttaatttgatagttgtatcttcagcaagctgcgttcttcacacaggttgaagcaaacggagcagaggaacgctggaggtcaaacctttgtctctgtccatttctccttgtccttaagatcaccatgtgagctgggctagggaaggttccaaattcttatcattctagtagtcagggcgaggcatgcttcggtggtttgcgtagggattagaggtctgactcgggacccctgttttgactttggggaagatgctggtgtctgctccgaagttggagaagccggttggcctcattcgcaggttatgaaagtcatcctcaacctcgtgccgaattc

SEQ ID NO: 1551 - DNA, 356 bp, Rattus norvegicus
  Genbank Accession No. AI044292
tttttttttttttttgtaatcacacgaggaagatttattgtgagcgagatgaaacgagagctcaggccagcatgctggggtcgagactcatacaccacacagggagtagaggagttcgaccccgacctgaattttcacagagcttataaaggaaaaaaccacaaaccagggggatcaagagggagggaggaggggaattccaaaaccataaactgcccatacaatttaggactttgtgacattgtgattaggggtagtgacattttacagggccattggaccattgtggccggaggctatgggtcattgtggctgttccaggaaacctttcatgcaagaatgttccgggaaccatt

SEQ ID NO: 1552 - DNA, 428 bp, Rattus norvegicus
  Genbank Accession No. AI044322
tttttttttttttttttccttgcatggtctatgttttgtttttaattctagtaagtcatcaataactttatgacacgattatttataaacacttgttaatcaccagctctccaagaagaggcaacttcaggagctaacacacatgtcctgttttcattattgtcatgtagtggtcagatgaatagaaacaaatggtaccaatacactcgaaggaaggctgggacacaaacctttccgtcttcagactgggaaaatgttttgcagcgttaacatgaaaccaaggagtggaaaaggcagaggtgcttaaacacatttactatcttaaaattttagaaaaaagatcggatagtaagaaaaaacaacatatacaccacgaaaacagtctttcttttttaatgacctccaattttgtgtcttctagaagcatc

SEQ ID NO: 1553 - DNA, 283 bp, Rattus norvegicus
  Genbank Accession No. AI044345
tttttttttttttttttacctaatggaagcctttattttagccaaactgacagctctgagccaaagctccaagtccacctcctggcccactggtacccagaaaagatacacaggctaaggttgtcccctaaggggaagggctgaagtatatggcctgtgggctgaagctggctctgttctgggcaatccagtgtcccagagagacagggccatcagatgtctttttccatccagaatatagggcaccccttcagatctcgatatcgtgtctctaacgggcttt

SEQ ID NO: 1554 - DNA, 449 bp, Rattus norvegicus
  Genbank Accession No. AI044348
tttttttttttttttttaatattaaatagtcacagagatttattttcatacataagaaaacaatcatttgcaaaagagcacacactctaaactgaaaccaagtttatttggaggaaggaaaggctgaacgagagattaattcctttttcttttttgtatttcaagacataacatttatttaagacagtttatttaaagggatataaactttaaggtcaaatttaaagatttaaggcagcaggctgcactaccaaaaaacacaagtcaagctgatctgatcgaaaatagaattccatcaagcagataagcataactggtcgcatcactggtcattctctgtggacactgctggatggcaactgacattcgcctgtctctcaatctcccgtcattagtgctcactgcaacaatactgattctttcaagtagtacttgataatggaagaaac

SEQ ID NO: 1555 - DNA, 447 bp, Rattus norvegicus
  Genbank Accession No. AI044404
tttttttttttttttgtatcagaatacaatgttttattaatattctaagtagatgcttacatttaatcattctttatgcttcacaggtattcagcgtttttagaaacttttttcatgtcagatgccattaaacaccttagggtttatgaagacctgtacaacatgggtctttttcagggtttcaggttggtggagatgtcacacatacatacctccctgtactgtaacacagaaatcaataaatatcacaaaagaaccagataccattggacttgagagacagaactcactgctaggaaatgggagaacgctgtcccacgagagctgaatttgacttgtcaggagtaaataggatttccatagcttgtggtgaggactaacgatctaaggaatgtaatacaaatgtatcggaaagggcagactaaattgtgaaaacaaacagttcag

SEQ ID NO: 1556 - DNA, 498 bp, Rattus norvegicus
  Genbank Accession No. AI044478
  misc_feature (1)..(498): n = a or c or g or t
tttttttttttttttttacattgtatattatcaaacatattttattgtatatcaatgcataataatcagcaaacatgaagtttcatggtctggaatgtattaaatggttatttcaggcctttccagtgcttttccacaactattcagtgagcgttcactgtgtctatcagttgcctataaaccttcctttacagaagtgtgaacacagcactggtcaaatctgtagaatcctcagagcagcactgaacccaattgcttgttcatagttccagcttgcagggttgtccttaatataagaacaaaatattaagaagttccttcaagtataattttagccactgagtgaatttcaggaaacacaaaacatttgtatatgtgttatgtgtgtaccagtgtgcacatgtgcatgtgtgaaagccagaggacaacttcaggtgttgttcatcangaatgactacagaccactttattttgtgtgcatatatagttagaggacaa

SEQ ID NO: 1557 - DNA, 455 bp, Rattus norvegicus
  Genbank Accession No. AI044568
tttttttttttttttttcatgatcagtgtttaatacttctgagtacaagagggcaccagaccagaagccaggggcagcctggagagagcctggagaacacggcaggcaaagcagcctcccctcagcactgtcttccccacagacttctcctccgtgtccccgcctcaccttgtccttccatacagcgactcccaccccacccaaacattcaaggggcttgccacctcctgtttgtgctcacaatgtgacctgaatgtggctctgggtgacaggaggccagcaagcatctccccctggccaaacacaaacagactccgccacccccacatccgagcacaggtctgctgcattttataccacccacccaaccacaatacgtgaggggctggcgccatttcaagtcacaccggctctgcttttcctgtcttgtatcacatgcaagttgactgccttta

SEQ ID NO: 1558 - DNA, 458 bp, Rattus norvegicus
  Genbank Accession No. AI044610
tttttttttttttttttagtattgcacacgggttgtttattaagtatttagccacacagaggacaagttaacagccagagatatcatctgaaggcaagaaagaccaaaaaccaccctagaaaatatttctataagccttttctaccacctacggctttatgaacactgagacatcttattatcaacaaaaatcacggccacacaaagaacagaagctagagccactggtgttaatttccacacagattaatactttccctggataatgcagaaagtatttcttcattgagaagtcactgaaaagtcaatcagcagtttctggttaattttggagacacacatgacgccacatacaagcatgatttcacgaagacggaggggtggttatttttctcttcccagttttcggaaaaactttttttcaactttgggtctctgaagcggctctgcttttactc

SEQ ID NO: 1559 - DNA, 263 bp, Rattus norvegicus
  Genbank Accession No. AI044621
tttttttttttttttctgctcacatgtaactattaggtgaatcaaatgaagtgggaaatgaaagaccacagtggaacgaaagtccccgtccccgcctttcagtgccttttacagtcactgccagtcccccaactctctcctagtaaacggaaaagagtcgagtaactcggtgggagctttggaatcttccaaggctagtgtcggcagggcacggagtggagaactgaagcaacgatctggataaatcgcaggggaatgggtgg

SEQ ID NO: 1560 - DNA, 504 bp, Rattus norvegicus
  Genbank Accession No. AI044643
tttttttttttttttttggtataaatgaacaaaaatagtcattttaaagtcaccccccttaaaaataaccatttggaacttgggcactttttactcaacattttctttggtgatgtcatttctgcccccaggaagagcatggtatgacagacagctaatggctgggtggcgtaagacctctttccaggccttctgtgaccaaaatttgagatcaagcagatgtacattgatgttaaaatagtagaactgcttaaaattatattacaccataagcatccctacactaatatcagagacacggcttaacatccagttggagtttgaaaacatatgtatttaactagcaccaactacatccagagcacagtcaagtatcatcaatcaatggtgatgtcagagctctcactctcaatgtatgggatgttgtagtattggatgttttcacatgcccactgctgtaaggcatcctccacaatttcgttggccaggcggtctgcaaattca

SEQ ID NO: 1561 - DNA, 479 bp, Rattus norvegicus
  Genbank Accession No. AI044653
tttttttttttttttttgtgtttaaagatactttctttgaatatgtgcactatgattaaaattaaaaacgataaaaaaataaaataattgcttgaaggagaagaccctcccccaccctatcagaagactccatctggctgtggcacgacgaggctgtccctggataggtgctggcgctaggggagggtgggcccctccgtgacacctcttcgcagagtcggcaaaggctctcgttgacttttaaaaagaaggaagatgaagaagaaaggaaaaaccaaccaggacgccatgggctttcagtgcgctgaggctcctccaccgctcagagaatatctctgcagccgttgtacaagctgtgccaccatggtgtcggagatcccagggcaggcctcttccgccaagtagatggctccccatctgagtcctccgagctggagtcctcgtgactctgctccgccttccacctcttgtacctgtcg

SEQ ID NO: 1562 - DNA, 288 bp, Rattus norvegicus
  Genbank Accession No. AI044706
tttttttttttttttttaaggctcatttttaacactttattcacttcaaaacctttaacacaggtgtttctgtcctgaggaaggggtggccctggacttcaaaactgatgttaccccttttccacgctggaggccaacgcccggggacaggccgtttgcgtaatgggcgctcttccgcttcctcgctcactgactcgctgcgctcggtcgttcggctgctgcgagcggtatcagctcactcaaaggcggtaatacggttatccacagaatcacgggataacgcaggaa

SEQ ID NO: 1563 - DNA, 478 bp, Rattus norvegicus
  Genbank Accession No. AI044836
tttttttttttttttttaaatgtagaaaacaaaatgacatttatttttttcttaaactcaaaattaccaagtagggtaagaaattaaatataaacacaaagtccatcctagccctgtttatccaaggcagcataaccaaatagactcatggagaccacctggtcaacagaggatttattaagtatctcatcggcgtcttcggtctggactcctgcttcgtcttcggccacctcttcaagtatcccgtgcgcctgtccaaattcaggtggatattttttatttccccatattcagcgaacttgtcatggatatcttcttcagtggcttcttcgtggactccagtgacaaagagaatccaaccttcaacagagcgctgtggtccaggttcatcgccatcctgctccacactgtcataatcttcccgcatccgcgctcgggacccctcttcagaaccaaaaccgcggcccttccgtttctt

SEQ ID NO: 1564 - DNA, 462 bp, Rattus norvegicus
  Genbank Accession No. AI044883
tttttttttttttttttcacatcaaattcattttaattctaaatgggtctgcactttaacgctggtgtgcgatccgcatgtgtccacagaaagggtcctagaaaatgcacatcttactgttcaagtaaaaaacatattccattgtacaaatattttggaaaaacggcttaaatgtacataagaattaaaaatacaactttagtacagtctgcacgtgggagccctgagctcaggctctcaggaggtcctggcacttagcagatggccccgaggctcccgccgccttcgccttcggggctgcttgcaggagagccggatgctcccatcgtctgctcagtggctggccgaccctgcctggccgtcagcaggctcctcaccctcgctctccttgtcccagtccttcatgctggcgcccatcatgaagtcatctcgcagaatcttccaccccggaccctcctctga

SEQ ID NO: 1565 - DNA, 401 bp, Rattus norvegicus
  Genbank Accession No. AI044892
tttttttttttttttgtggttagctaatacggccctgggtaggactatttatttcttgaataaatttgcctttaacatatttaaagtggaacatactttaaaaacccagttaataaaaaacataaccttcaaagatggttgcagtaaggtggtataaagtcagggtgactgaggacagagtcccgcaggtggagtctagccctgggtggcactatgtgattttcttcttgatggccgtgagctctttgtgaaggtcactgaacttagggcggttttcaggcttgtaatcccagcacttcatcatgattgtaaaaatttccccgggacagttctgtggggctgacatccgataccctctctccacttgttcccgtgcttgctggtttgtcaacccaaggtac

SEQ ID NO: 1566 - DNA, 388 bp, Rattus norvegicus
  Genbank Accession No. AI044900
tttttttttttttttttgagactgggtacccgcattgttctgaggaggatctgttctttagtgtactggaaacacgaggttaccagcaggcacaacagggaccctttggaacccttacaaaccagaagggtcacataaatgtactgcatgtgaggtggtgagggaaagggacaaggggaaggggttaagaagagaaatctctggtccactgtgactttcttcagcctggacagttgctcttaaaggggtagctttcttccagtgtactgtactcttcagagcagcagacggctgcagggtgtgcagccagcagcagacgtatcagaaagagtaagtcctaaccccttggttagaaaaacaggagacagaagttttaacacccacctta

SEQ ID NO: 1567 - DNA, 498 bp, Rattus norvegicus
  Genbank Accession No. AI044906
cggccgcggcgctggcgctcaatgtcaccgagtgcccgcgtggggagggcgcaggcggggtgggcggggcgtgctgccgtgacgcagcgggcgtgcgggacgtgcgcgacgagcaaaggacccggccaagcgccctgcctgcctgggcatgaaggcggaggaggaagggcgatgtctgccaactgtgaagcgctgagtagtgttttcgatctgtgcaagcgagtcacacacgcggaaggactcgggagcctgggtcctatggctttctggcttcgggaatgtccgagggaagcctgctttccacttagctatgttttaaaaaaaatctagttctcaccgcttgcccactctcacggccccaaacgcccctgtttgtcgacgcttcttcgcggtctcattcctctatgctctaggatcagagagaggaaggcaagccttgctctccgctccccgggctcacagtacttgctgtcaggcagtaccgccctcgtgccgaat

SEQ ID NO: 1568 - DNA, 415 bp, Rattus norvegicus
  Genbank Accession No. AI044915
tttttttttttttttttgccagtccttgtccatcaacaaggcttctaaaatcattcctggtcttgttatgaacgaggccacaggtaacagcattgtgtgacattttgcaacatgaattattttgtggtctggggtttgaactgagttctgtgcatgcaaagtaggcatcctgccactgagccacgccccagcccctcaccgggggagtctaggcaggggattctccttattggtagactctaggcaagctcctagtactaagatctatcacaagccttttgaacatttttattttgagagtcaacttgttgagttgaccggggaagtctttaatctgtggtccttctgcctcagtgtctcaagttgctgggcccacaagtctgtattctaccacacataatctagaataagttct

SEQ ID NO: 1569 - DNA, 432 bp, Rattus norvegicus
  Genbank Accession No. AI044947
tttttttttttttttttaaacagcaccagcaggggtttatttagtgacagtaaggttaatgattccctcaaacaatataggacaggccacctggtttattcaaactgaatctaaaccttagatctgactcaacagtaacataaaaacctttaatgacaaacccgtgttaaaccaaagacagtttaggtgagtcttaaagctctactactgatgggctggcatctacacgacaagtgttcagttcggttacaaaagcacatttgagtttcttagggatatacaagtaatactccatgtagcctgctaggtcctcaatggtcacatcatccacatagacacgagcttgctcggaacaggatcgaggagagccagacagagttctggtgtgcagtgactgagagtagtcctcaagtgatcttcgttctggggcca

SEQ ID NO: 1570 - DNA, 423 bp, Rattus norvegicus
  Genbank Accession No. AI044987
tttttttttttttttttagaagtttgttttgttttaattccagccactgaaaccaacatagaagttattgctcagataaataaacctagcctaccagaaaggaaaaggagagaaagaaaggaacaaaaaccccaaagtgaaaacttaaaagtcccccaatgtggtgacagagaaaggagagcggctgctcagcgagggctactggaattctggtgcccgtcctgggccctgacactgagttagactcttaggccggtgtatccccaggcacaagtacaatgttaatgctgtacacaaaaaggtgcaaactccaagaccttcgaaatcagtagagacccctgcaaaaaacagtcagcattttaaacttcaacaaccacaaacagcttttaaggaaaaaattacaaaaaagtgtcaaaaattttt

SEQ ID NO: 1571 - DNA, 512 bp, Rattus norvegicus
  Genbank Accession No. AI045003
tttttttttttttttttcatcatcagtgcattttactttcagggcctcatgtatgtgaggcaagtgttccatcacgtgcctgacaccccagactaacaattaattcttgttaataggtgatgaggcttcagtgcgatgacaattggtttcctgctgatgctggccttctgctttccaacagtggatgctgtgtccagaagagccgcaccttcccaacagttatctggcacgacctgctttccctattagctggatttggccgctgctactgtctggttgggagtggttatagctgctgggagatggtccatctctggagcgtcaaagaagtaagccaagcagcccacagagagcagcacatgaagcaacatgattgtcacaatggtggccaaggcaacacgccggttatcctcacgaacagctggccaaaatgtcattgccaacacggaccctgagatgcccagggcaatcgtgacaaggacccagcgaatgactctcctcgtgccgaattc

SEQ ID NO: 1572 - DNA, 269 bp, Rattus norvegicus
  Genbank Accession No. AI045008
  misc_feature (1)..(269): n = a or c or g or t
tttttttttttttttttccttcttaatctctctctgggcctcttccttcctcttctcttctctcctttcttcaagcttttttgttaatctttccactctgacggtgaggtcctctgctggtctctggtttgaacatccaggaggctcctganagaagctgtcatgacctgcgcattctcctcctgctgcagtatctgactttgggtcagaagtagttggtgtctcacaaagctctgtatttctggactcggcactttcacatatgtcag

SEQ ID NO: 1573 - DNA, 434 bp, Rattus norvegicus
  Genbank Accession No. AI045040
  misc_feature (1)..(434): n = a or c or g or t
tttttttttttttttttggctgttcttgtttccatttattagtctaggaatatacaaaagtgtgacatggcaaaatctcatggagaaagcagaatacacaggagggtggctttctcccgacgcctcataaaggcacacaggtgaggcttggttgggggtggcctcctgtcctggacccagtgtgctgcacaggaagccaggcacctctgtgaagaacagaggcctctcctcacaccagacttggggtgtggctcaggagagctcaggtggctgggagaacatctccagaatgacgctgagctgtgttcacgatgccaatctccagagtaaaaccagccaacagcagcgagataacccaacatggcacctgtgggacagccctgtcnctagcacagtgtacaggaggatgtctttctgggtcgggtgctccagct

SEQ ID NO: 1574 - DNA, 387 bp, Rattus norvegicus
  Genbank Accession No. AI045056
tttttttttttttttttatcgcttcaggcgcttttattaggttccacagcagggctggggtccacacccagccaacacacacttgtgagcccaaagcagagccgaagcgggagcacccatgtcccaggagccggctgcggctagtcagagcaaggccagggctagaccccatctctgagcctgatgaggaccataacagccactgggttcgtgtgggtgtatgcacacaggcgcctctttttgcgctgtagggcctgatggcaggagggattagaggtgggaccagggccacctccatgtaggaggaggtagctgagctgcccaggtctgaacctagtgtagggctcactcccaagccagtagctttagccctcgtgccgaattctt

SEQ ID NO: 1575 - DNA, 541 bp, Rattus norvegicus
  Genbank Accession No. AI045083
tttttttttttttttttagttttgcttttgtttttctttagaatttggtcttctttctttagtcattatttttcattacaaagtaagttgaaacaagtctgagttttctaaacaattcttagaaattgacttggacactgttaaaagcgaagccagagatcataacaaaataagagctataaaaagtctgttgggaattataaacacagtgagggactggacagtggaagatgcggagatggaggtcagggacatggccgcagccagcacttcctgagttaggtacttgggggaggggaactgaaatcagggtgctctttgctcacgttcctgctgggcttcggctgctggtctggagtccaggtctcactgtcgaccaccgactccagcccctcggccatttccactgcttcctctccactttgctctgcactgtcttcctcggagccaggaagggctttgccaagctgcagcgtctccatagtcctctgggtctcggagacccaggactcaatcctactattgagctcctcgtgccgaa

SEQ ID NO: 1576 - DNA, 320 bp, Rattus norvegicus
  Genbank Accession No. AI045116
tttttttttttttttttaatagttattaatagttttattgatggacaaattagactttcaaatccattcatacaaacacacattgatgtttctattctgaatcagttgcaattagcatgtgaaggggtttttaatgcgtagaaatatcggttgggcttagtagcacataccaactctagcagagtcaggcagatctctgtgagactaattccagtctggtctacacaaagatgtgtaagactgaaagagctacatggtgaaaacgtctctcaaaaacaggagcccaaaaagataggaaaaatattcagaccctcgtgccg

SEQ ID NO: 1577 - DNA, 299 bp, Rattus norvegicus
  Genbank Accession No. AI045118
tttttttttttttaattaaaaatgataataattatagcataaaacaaactttagaaacacacatcaaagggcttaaattctccccaggacctcattctgacctctatcagaggcaaagatcccacctcactgttaaaggaaatcaaatagagaagacagagcagcaggagaacagatcgcagcagtgtgaaatcaaggggaggtggcaaggcggggcatgtgttttcttgttgatgtctatttctgtcttctgttttttttttcggttttgctttccgtgtatggtaagcaccagcaca

SEQ ID NO: 1578 - DNA, 363 bp, Rattus norvegicus
  Genbank Accession No. AI045119
tttttttttttttttttaaaataatgagaattatttaataaagcctttgaaggaatacaaccaacattcaagcatgttcctcctagtgtttcattcttctcaatgcagactgtcttaaagcctaactgggcagctttgatggcagcaacatatcctccaggaccagaacctatcactgtcacatcagcatcaattggttgatctgaataagttcttaatggaactgaagaagccccctgtaggccatgagacagccgattgaaatggcctttcttggccaaggagcagtacacacgactccagctctgcatctcccctcgttcccgtccctacaccagggctttcacctccgccctcgtgccg

SEQ ID NO: 1579 - DNA, 496 bp, Rattus norvegicus
  Genbank Accession No. AI045136
tttttttttttttttttccagtgatttctctaaatttttattaaatatctcttttgtctacagtttgatctcgtggaaaggaaaggctgaagatgaaaagtcagttacatttgtcgaagacagcactcagtccttgttacagagaaaagcaaaagatctgtggcacattatctttggaaagatcgtttgcagatttcctttaaaagacctcacaggtcatgtctgcccctttcagagtgtattccacaaggcagataaatcctgttgaccgaagccccaagtttgcagttccattgctgaagccgattttaaatctgtggtgttcccctggtttgtgtcacacatctttgctgggagcacagttgcctccccagcctgcacacacaaccactgatcatagccggcacattattccacggtaatcaaagacaaaggcagaccagtgactttcattatcaccttgacaacgtattcctttttaaagcaattttaatac

SEQ ID NO: 1580 - DNA, 491 bp, Rattus norvegicus
  Genbank Accession No. AI045144
tttttttttttttttctgtcagcaatttatggctatgttagtttacatataatgagttttttttaaaaaagagtttgtttaggttattatacaaagtaatgggtttttatcattacattcctgaagatatgtgttatcatactttgctcccatccattcactttcctcacttcctgtccgttgtttttgaataataaattcattcatcactagcagtgctaatccaagcacctcccaggattcagtatttccaccttcctgtttgcacacctcacggctcccagtgtacagatgtttactgttttcccacgcattgatgatcccattttgacacagtggagttggttttcatccttggggcattgtgggggcaataggcagacacagttggaggtgtgggctgaacatttttcccagtcatagcaggtatcatatccacagggcactctctttgtgctcttcattgcgagttttaacctctcaagacccca

SEQ ID NO: 1581 - DNA, 461 bp, Rattus norvegicus
  Genbank Accession No. AI045151
tttttttttttttttttccagaaaatgaatgattgcatttaatataagaagcattgacctgaatttaaatgggacagatgcggaaggggcggagccatgcttcaaaccctgacgaggcttgttgtggttccaatcaattttccagccacatccgggtcagtccccctatgagcccacagcggtcacttttgaggtagatgctgatggcttaaagagaggtaggtaaagtccgaacttgttttcaatgcccgcaaatgttgcaactgccagtttatagccccctacgtggtcaggattgggagcgggcagagtaatccgagatttaggaaccagctcagatcccacgggcttcacgcctccaaaatcgacgtagaaccatcgctgcagcagttcgtaagtaagcaaggtgacaccaaactgcggtgaggagcggaagactcgagcaccagctcctttccaca

SEQ ID NO: 1582 - DNA, 517 bp, Rattus norvegicus
  Genbank Accession No. AI045154
tttttttttttttttttcagatttcaagatatttttattttaaactgttttattataaaactaatacaaataacaaatgaaatgtagagaaggaaagcagtccacttgctgccctgccatcctacagggaccatcgctggtgatctgattgtctactttcacagcctggtgtgtcattcgcatccatgccacgttaacgctgtggtccttctcttactgtagtgttgtctccatgctgctcacggatacctgcctatcgactagagctgtgggacagcagagacacagccagcctccgccactctgaacgtctccttggtgtaaacccccatgactgtactgtctctcagatagtcagctttatccagaacaatatacacagtctgatccttgagatgttcagcactggtcacttgcttaaacaaccggacaaagtcattaaatgtttcacaagtcgtttctgtagaacactctgcctctgaagaactaagatgactcagctcctcgtgccgaattc

SEQ ID NO: 1583 - DNA, 464 bp, Rattus norvegicus
  Genbank Accession No. AI045171
tttttttttttttttttgagagtataagaggagttttattttacttttaactattgaggaacaaacagctcttgttctttgttagacaatcaggggtcatggaattctgggagtctgggcacagtatctcctgacacctctactcaagtttacttgttgtttttgattcagatggtgacagaactgacagcttgctattagttcacaagcagagagtggccttctaatcagagcccagaaaggccacatgattatctaattcagctcccaaacccagagcatctgtggactcagacccaagccttggatggctatgtgtgggtattgccatcatttctggaatattaggatgctgtgtgggggtcatttagctctatagacatcccattaattgccaagcctcatatattcaccggcagtgaggagagagactgaaggctaaaaggcttttcatttttctgacg

SEQ ID NO: 1584 - DNA, 481 bp, Rattus norvegicus
  Genbank Accession No. AI045191
ttttttttttttattttggatgttttaacttttaattttattgcagaacttaattagcttttattggaggggtgatggcatagcagccacaggggatggggttgaggttcaagagaccggaagacaatttataggatttggttctctttctattatgtgactctcaaggaatgaactctggttgctcatcagcatgctgaaccatcttgtccttccagtctttaaacagtggctgtggacataacgctgttgacctggattccggcagctgcagttgcagatttgccactgtcacagaggaatttattcttgcaatcagtctcttcaattttgcagagctcagatgggacacatggttgaaaggtcaccaagggctctgtgcatggttgtcccccaaactgacttgggcgcagaacagatctaactttaacctgttttctaatacaagggtcacagtctgaccatgttccatagtctccta

SEQ ID NO: 1585 - DNA, 489 bp, Rattus norvegicus
  Genbank Accession No. AI045201
  misc_feature (1)..(489): n = a or c or g or t
tttttttttttttttttaacaaacacctaatatttattaataaattagtatacttgaaggcatttttctgatatcagttcctcaccactaagcccacccacacaaaggcagtgggcgtctagctctgcattagagtctgacaactgagcatcagaggacaggttgataaatgagagagcgtagttgcaaatttatcggacaggagttcttacagctgcagccatttttaacgaaagtggttggatgacaaaggaaacccagcaaggccttgagggcagactggacctatagactatgtgtattgagagagagagagagagagagagagtgtggtcaagtttccgtcgtgtatatgaactatagaacaagacatgaaaaaagacaactcaaaatctaatagagttacagtcatcaacagggtcgtagcctcnctccgtccttagaaacgctcgtgaaggacanacaatacgacagagagcagtgataatt

SEQ ID NO: 1586 - DNA, 457 bp, Rattus norvegicus
  Genbank Accession No. AI045340
ttttttttttttattttaaattgttttttattattattattataaacaaaagaactttcttgatttgtcagtaggactgttacatggtgagaatgcattgtactaagccatcaaactctcttccctcatcccccaggtaccaaacaatgcatggccaacactgaatgcagcagcgctacaaaaccagtagcattcatcacatgtaacagatacacattacattttcattacatgttcatgtaaggcccaaccctgcaactctggtctccttaacatccactaagctacaactgtctcaaatcatcttcagcttcacaaccattaagactactttcaacaacacaattcaaataagacttgaaagttaggatagaacaatctgacaaaggggaattgtacttaattcttatgagaactgtttatatatgttacagtttgagttattacaaaaatttag

SEQ ID NO: 1587 - DNA, 438 bp, Rattus norvegicus
  Genbank Accession No. AI045451
gttttttttttttttttaaactgtgtatgtaccaaactttaattttcatttcacactcaaaagttctgtacaaaaagaggcaatgcaggcaaaagaacaaaaaattacaatgagttcggcaaacaacatacaaccgcttcaaagccccttctgatgtgcaaccatttttacagatgtactatgacaatgaagttctgaaggctggggctggcaaagataaaattccaatgttagttattaatatctagaacacttgagagatgtctacgatagaagattgaatgagaagtctgaactctactgcacaactggatccctagattgagcaggctttatcttgcgcttgcaaaagcatagcattattttgacttaattgtgatggtgtttcacgaacttaggcttgccattctcatttggcatcatgataataactaagaa

SEQ ID NO: 1588 - DNA, 376 bp, Rattus norvegicus
  Genbank Accession No. AI045488
tttttttttttttttttgaacttgacattcttttatgtttatttttagcatgaggaaactgaggaacagagaggcggtggaacctctctgccaacacagtgctcttcgccgaagctttttgcctctctctgacaatacataatatttttttcagggcatggtggcacgcacctgtgactctagcactggggagatggtagcgggaaaatcagaatttcaaggccatactcgatcacacaatgaatttgaagccagccaagaatccatgtgaccttgtctcaaagtagtaatgactggatcagcaggatgacttggggtagctgaggcattgttgttcatcccaggccttgactcaggtagttccagttctgtcttc

SEQ ID NO: 1589 - DNA, 455 bp, Rattus norvegicus
  Genbank Accession No. AI045546
tttttttttttttttttataaataaaaatgttttacttagaaaaccctacagtacttgtgggaagggatagccaggcccccggacccagtgtgtctagccctgggctacactgggcctccagcccaactggcagggacgcaacaggtagggacagagcgtccctttgacagcagcatcatcagggttgacgtaggccaggacgtgtcacagctcgcggcctcaggcagacactctgccagccctggtggccgtgctgccctggggcagctccttcattcccggtgcccaggggctgggctcctactccttctcacgcgtccacttgatcatggtctctggtgatcggtacaggaatatgagcttggcatagagttcctcctccagctccagctctcgggtctcccgtaccaagaagatgtcctggcacagcttgaggatgcggtccacgcacggc

SEQ ID NO: 1590 - DNA, 453 bp, Rattus norvegicus
  Genbank Accession No. AI045555
tttttttttttttttttgatgaagacgtttggagttctttattgctatgaaaactattaaaagggggagtagtccttttcagctcctctaagaagcaaggtgttggctctgcaatcctcaatcatctcttcagttcctctacgtacccaaaagcatcccggagaagctggagccgttctggatggtgaggactgccccagaactgttgtccacgaacacagagacatactgtccagactgtaaatacagcagcccctgaacctgcacggtgaagaccctgctgttgctctccaggcctgacacagcctccagggacgtatgacggtgacacaaggactcaatacagatgaggacacggaccgtgtcccgggtacgtaaccggcctctgccctgcagttcactgtggtccacgtgcaggctggcagaaaactggaagatggcagagactggcgc

SEQ ID NO: 1591 - DNA, 439 bp, Rattus norvegicus
  Genbank Accession No. AI045672
cggccgcaagtgttttttttctgtttttacaagaacatttctttataaaccgcttaacagatattcacatcaggacacagactttaagacaacgaaactggacttcgggatctcattttagacagtgctcgatttccggtcttgagagagatgtgggaactttgcctggagaatgttccctttctttttctgtaagcttctctttcttgcttcagtgcgggcatgtttctcaattctcagtctgataaagctatccacgtaaggcattgcgaagaaccgcctccggttgtatctcttatttaggtaccaaggtatatgccactgcttgaatttgtgccagacgattcttccaaagatgtgctgtctgcaagcaccgggtcttggcttttcttgaccggtctgaagcagccttaaagcatcttccctctgctggacaact

SEQ ID NO: 1592 - DNA, 407 bp, Rattus norvegicus
  Genbank Accession No. AI045767
tttttttttttttttttaaaaaatattgctgtttaattttctagtcatgtactttaaaaagccaatacaattaagactttcagttatctttcagctctgcccctgaagtcacccacaagcagctgcagaagcacacaggacttgttcccatggtgggcacatgtgaagggcattgggtatctagaaatgggaatgcaagcctgtgtagctgacaggcagcctctgccctgacagtcttaacctgagggtcacacggcaccgaagtaataagcagttctgagttacaaagcgacagtaaagacctttcttcaggtccctgcatcggtgagcatacccagtatgctagagaatttatacgaaacctctaaatcaaggcctctttcataaccaagaataaaaattaaaca

SEQ ID NO: 1593 - DNA, 405 bp, Rattus norvegicus
  Genbank Accession No. AI045768
tttttttttttttttatattcaaaacacatttatttatgaaatcatttgaagttgacttacataatttcaacaagtaagggcattcattgaaaaaattctgacacacaatgcacctgtcattagaaaagtcttattgacacactgaggagcaaggtctttccttgtcttttctaatgcagatctcggcacaacatccatcaagcagccccagcactaagaatacttcagcaagggagcccaaaagtcatagtcttctcagtcatactcggagaatcgaatgtgctgactggcttgctgggtcttagccagtctaatcttctcagctttggtgattagctagagagaagggagaaatgagaacgtcttgggaattccaaaatcaaacaagcatcactctggaagcc

SEQ ID NO: 1594 - DNA, 551 bp, Rattus norvegicus
  Genbank Accession No. AI045802
tttttttttttttttttaacagcctaaaaagaggaaatgtttattttggctcagtttcagccaagtcagctccagggtgcttggccctttgctttggggctgggaaagaagcactatgtcatggcggaggagagctgctcatttcacagcaactggcagtggagaggcaaggaaggacctggggtcctgatacaccccagtaacataacttcctccgacaaagacccacttcagttcctaccttctttaagctaagggccaagccttcaacatagatttggggtacatttaagatccaaataggaccagccaccacgaagaaggattttataggagcaattatatggagaatgttaagagctaactacaccctttctacactagagaggcaggtaatgccgcagaaaagggggtgggttgataaagtcccacgcacaggcagcaagctcagaggattcaaaagcactttagagggacttgccctcaaagcctgctgctccctctcatccagtgtccacacagagctgaccgcatttccgggtagcctggct

SEQ ID NO: 1595 - DNA, 607 bp, Rattus norvegicus
  Genbank Accession No. AI045807
tttttttttttttttttgatggcttacttgattttactataattgagacagtaaggtcagaaaactcaaataaagcagaaaatacacatttaaaaataaacattttgtttttgcttacaattttactttttttatgattaatacaggcaacatggttcttagtcttagttttacttttgtctataaaaataaaatctttaatcattcctgttatttgtttttccaataaagcaactgttaccattttaaatggcagtgagtaactgaataagagttaaaaaaatcagtggcacaaattacatacacacaagatgatgtaaccgatacagtgttaagtaagcagttaagtacagtacagtactagctgtatctaagaggtagaattcttactcacagtcttacagaaaagacacagtggattccgcttcatcactgatggtacctatagcctgcttctcttgtacttaaagtagggaagacaggatttttgggcaatgatctcattgacctctgttctgcatctattgtaggagcttggcttggataatgggatattttcttggtcagttattgatcatataatagtacttatctcacattttgaaaa

SEQ ID NO: 1596 - DNA, 375 bp, Rattus norvegicus
  Genbank Accession No. AI045836
tttttttttttttttttgctgaaaacccacagctttaattaggtaactccagaaagggttttgcctctgctagataggaaggcctggccaaccgcgcctttgacactctcacacacagggaccagatctggagagcagggctcaacctagatagtgcctcctcttgatcccaccttctcaggccctcaagccatccatctatccatcccgctgtcaccatgccttcctggctccaggctgggggagggagagccaaaagtgggtccaatctgaagtcttgccctctgtcaactgcctgggtggaaggtagcacctttcagggaaagggttaagaaagactggaccatacatgattttggtgtaatcctcgtgccg

SEQ ID NO: 1597 - DNA, 504 bp, Rattus norvegicus
  Genbank Accession No. AI045945
tttttttttttttttttcatgtctgtaatagcattttactgatgacccacataaagtcagctttgcctaatttactggtccacacctgttatgatatagctgtctcccacacaggacgtgtcacacccaggaagcaacagttctgttcttctctgatgaacttgcttttgttagtaactctacaggggccaactcaatgacagtggtgtcactatctggggcccctgtgagccatctggggttcaagccccccactgggctgtgatggggttctggtgaggatcagcagctcagaacaatgctctactcaccacagagcacactctacatgttgaaacagtggctgtgattcagtccttctgttcagactcaaaagtggagtcctgtcccagagcattcattaaactcagaacagaccacccggtgggagtggacgagacctgtgtgacatagttgaagggtgctggagacatctgcagaacaatttgcagagacacctgtgtc

SEQ ID NO: 1598 - DNA, 460 bp, Rattus norvegicus
  Genbank Accession No. AI045948
tttttttttttttttctgaaagtctgcaagtcttttgtgttaatagtcactgtcctctgcaaggtgcagagcagaacacaatgtattccaaaactattctgcaggatttctttgtttaaggaaatactattttgggaaaaagatggactccatttccagcccacataaataagcccacatctataacctaacagtaattctcctaggatccaagaggatagattgctctaaactcagtacctgtcatacttaaccgaaatgtggagactgtaaattgcaaagaattctttccttttctgttgctcagagcaagaaaaccctgtgctgtgactatatcccagcctcttcttttccagacgagtcactgaattctctctgcaaaccaacttactctatcacctagattcattcaataatcatgtcttaaaatgttaaaagaaacaaaacctcgtgccgaatt

SEQ ID NO: 1599 - DNA, 378 bp, Rattus norvegicus
  Genbank Accession No. AI045972
tttttttttttttttttatcggcaacatgaattctgtattgacatttggttcttaataataacatccaaaatgcattctgttcttatagcgctgtgaccgcgactgcatcgggtggagggtttatgttgccggagtcttccttggaagtgggaggagctggtgattgagatacactagtttctccttgggacctatatgcagcttggtggggtgctgcagcaggcacctcggctctggtaagggttggggatacaaccccagcaggtctgcaaacacatgggcagagacctctgccccaagcccacaagaacacggacgctgatggggccaatggtggtagctcctggagagtgaaagggacgctgagatgttacatt

SEQ ID NO: 1600 - DNA, 328 bp, Rattus norvegicus
  Genbank Accession No. AI045973
tttttttttttttttttgcttttatgaaaggtttattcctagtgctagaacccagtcttctgaggctctaagcacagttcaactgggtgggtggatgaggggaaggcccattcagatgcagggccacaagtggggctccccattattcccacccctttggtcccagttcccttctctgcaatggacacacattgaggagggacaaagggtactggaggcaacactattggcccatgggagcccaagaagagctgccattggctgacagagccttttgaggtcctgtctttggtcaggggcacatcccaagagctggggataggcctga

SEQ ID NO: 1601 - DNA, 503 bp, Rattus norvegicus
  Genbank Accession No. AI058291
tttttttttttttttttcatcaaaataattttcttttaaaaagccccccactgctgacagccccactggctggttctccatcatgtcccctccaacccagacacagctggggaggtcctgaatggcccaagtgcctttgagtcttttccacccaagtctttgtgggcagcaaggagagtgccctgaggtccatggtgggtggggtggttctgcaatgatgtggtctctgattactccaggcccaggatgtagctgatgccttgcaccaggccaatgataacaggctgccaggctaccaagtaccgaagccagtctagcagctgtccatacatgacatgaggccgctcccagggattgctgaacatcctcttcaggtccaccttctccttgcagtagggacatgtctgcttctttcccacgatgcaccagcctcggatgcagaattcatggaatacatgattgcaggaaagcctgtacgtgttctcgatgatgccctcttcatt

SEQ ID NO: 1602 - DNA, 319 bp, Rattus norvegicus
  Genbank Accession No. AI058319
  misc_feature (1)..(319): n = a or c or g or t
tttttttttttttttttgatagcaaatgatcttttttatttatttatttatttttttttaccgcaacacatgtgagttgggaaacatattccggatcctttctgggaaaactgtggtctgttgaaaggtgtanagcagactctgagacagaacacttggagtcctcgtcagagaagaggcatgaattactgaaagcagcttcattgcacgaactgtatcatctgctgtgcttgaatatggtgccatgtggaacaatcgccgtgttgtacagatgggctgcagcgattcactcttgagcatgacagacttggaggaaacg

SEQ ID NO: 1603 - DNA, 325 bp, Rattus norvegicus
  Genbank Accession No. AI058364
tttttttttttttttttaccattttatgaggcttaaagataaatacaggactctcctcatattgtcttctgaatgatactttccatgtcccaatgtagacaagagaataaactggctaaagctggtcttaaaatcttggagcctgtggtatgggttctgcggagcctatgcacccgacaccagaatggggagcatgattctcaactgtcacaggtgcaaagctttgtgactgagcgtaaagtcttactcttgccttgaaagcttcaagctcatttttgaatgcttcaaaataaccttcttcctctgctttggctttctggaaaaa

SEQ ID NO: 1604 - DNA, 327 bp, Rattus norvegicus
  Genbank Accession No. AI058365
tttttttttttttttttgagttttcaaagaagagatttttagttttttaattgtgtatacttttgtggctgtggacacaagtgaggtgcgcatgaaatcaggacaagacttcagatcccatggagccgcaggcacaggaggttgtgaggcacccaaaggggttctgggaaatgaactggggtcctcttggagagcagtgtgccacctttacaaagatctctctctctctctctctctctctctctctctctctctctctctctctgatgactatgaaacatggttttctgttctaaacagaaacatttgcccgtgggacccttcctt

SEQ ID NO: 1605 - DNA, 467 bp, Rattus norvegicus
  Genbank Accession No. AI058430
tttttttttttttttttataaaacttgataaaaaatagtatttcaaactgtacagtcaccagaagtacacagttatcaaaaacgcacacacgtcacttggcatctccagcaccgtccgctttctgtgcctggtctgttttggcatctccgttttctgcaggattattcgcatccttaccagcatccgctttccccttcttccccttgggtaccttctctcccttctttgcaggggcctttttaggcttgggctctggctttggaggagcaggtttagcagacaaccttgcagatcttctctgtggctcgtccttcaccttggctttgtctcctttagcatccccttcagcatttcttttgggcatggcggcggcaggggacgtcggcgctgagcacgggtttacagcggcgcacgggtttggtccgtccgggggtcgtcctcgctgcttcttcctcgtgccgaattc

SEQ ID NO: 1606 - DNA, 489 bp, Rattus norvegicus
  Genbank Accession No. AI058453
tttttttttttttttttaatggaatgcatacacttccatgtatttttacagtaaaaatgcattaaaaaaatctttcacaaaagaaacttaaaaaaatccaagtacgctattgactccccctaccccccaaacattctttcaggcattggttgtgtcatgggggctggggaatcttaaattgtttgatttaaccatacaaaatactcaaccctcatcagcactcttatggtaagtgaaaggttggggaagaaggctcacaagaatcagtttccaatatagtctacagtagattgaagagaattctagatttcggcttaccacacgtagtttcccatacagtgcaaaccaaatctgatgtactgaatttaaggtgaacttgtcatagcaaaagtcctcagatactgagccaggctcacttgggtagcactgactttattttttaaactgagacagatatcatgatgctaactttggacccactccaaaaat

SEQ ID NO: 1607 - DNA, 359 bp, Rattus norvegicus
  Genbank Accession No. AI058503
tttttttttttttttttaaagaacgacttaaaatccagaagaatcctaaagccagcgaggagtagcttcaccagtggaagggaaaagcttcactaagtatctcccaggaacagcactgcagaccagggcagatctcgggtccacttggacagtattaattggatggtcgagggaaagtacttttcagttcccatctgcaaactgatgacaccgatcttctgggaccgggagcggcgccgagacctccgggaagggagcgctagcagctcccgcgccgccaaactcgctccgccgctgcgcgcgcccgcctgcactccttgtcgggtccccgccacgcctcgcgtgccctcctcgtgccg

SEQ ID NO: 1608 - DNA, 423 bp, Rattus norvegicus
  Genbank Accession No. AI058509
tttttttttttttttttactatttatagcaatctattagatttaatagaaggtacatttgatctaacagtaaaagggagacagctgtcagtaaaatgcttgctaggcaagcatggtgacccaaacttaatccccagagacaagaaaaaaaaacaaaacaaaacaactaaccaaacaaccaacaaaacaaacaagcaaacaaaaaagaaaagaaaaccagatgtggtggcgctcaacatgtaattccagacgtggagaaacagaaagatgtaggtccctggaacttgctggacatccaatctagcctatttggtaagtctaaggtcaatgagaaagcctgtctcaaaaaaaccaaaccaaaccaaaccaaacaaaacaaaacaaaaaacccaaggtggatcacatccaaaataatggtacagca

SEQ ID NO: 1609 - DNA, 418 bp, Rattus norvegicus
  Genbank Accession No. AI058524
tttttttttttttttttccttttcgaatggaggggttgctctgcctctcgcctcctgtttatttcaattcctcagctctcaggtgtcatcagtgcctcctctttacccatggaagatgaatgtttggagggataaacacatactgattgatttacagtaaataatactctgctccctctcagtggcctttagagagcagtcacgtgacaatgacctagcaatgtttgtttgatatcaagctttcgggcagaacagtgtcaaggagaggccaaaacatttttttttttcttttgtgagacttgccactcattcagcactggatgtctagaaaaaggaacacggaagatgtccacatttaacagtttgctatcctggcctttctcctgtaatgcttggttcattgtaactgaatcttcca

SEQ ID NO: 1610 - DNA, 376 bp, Rattus norvegicus
  Genbank Accession No. AI058603
tttttttttttttttttgctttgttcaactttatttttctttcaagacagattggactagtaagtcgagtgatagttggtgaaaattctagaaagcaacaagaggatcaggaaggagatggagcatcgagacatggacggtgaagaataggatcatgggtattcgttagctttcttctttctctgttgacaaggcagctccagttacatgttattagggagcctgactttgtagcagaatgggaaagaagggacttaagagtgagtccagggttaagcatgtgctatggaaggattgtttgattcagccataggcccatgaaggagagacactgcctgccaccccatcccagcccaagttcctttacagctactca

SEQ ID NO: 1611 - DNA, 436 bp, Rattus norvegicus
  Genbank Accession No. AI058606
tttttttttttttttttctttggctcaaccttttaatataaaaaattcactgatgtacaaaaatgtgaaagagtgacaatgacaacatatgaaagcctgtgattgacagtccccttgtgtgcacgccatggtgcacatgcacccgcccacacatcctcgggtgtggaaacacaaagtaatgcaaagcagtgctacccagaagtgccgccatatgtgtcctccggatacccgccagtcacaggccagggtctactccaacattcagtaacaacaagacagcatcctcccaggaccagcgaggccggcttcttactcacgatggaccagcacaaataaacccagcagaaacagtactgcatacttaaatttaggatagtcattcatgaggatcgtcacgattccaatgtacggaacaaaccctcttgcctcgtgccga

SEQ ID NO: 1612 - DNA, 389 bp, Rattus norvegicus
  Genbank Accession No. AI058669
ttttttttttttttgttccattggtccatctttattttctaaaatgctctagataatcctattcacatattccatgaggaggtcataagcagttgagccctaccatgctgacattggggtcaaaggggactgtctgtagataactgggagggctagacacagagctgatgtgaggtgtggctggcccagagtcctaggacaccaggaggcctggctccatgtctctgggcttaagtctcagaaggtgcagctcttttaccctggcttctcattctctttgtcctctgccctctgcccaggatgaagtgaccaaagtccggacagataccaaattaaacttcaatctttgtcacctgtcgcataagcaggctggggtgtgggaagcactt

SEQ ID NO: 1613 - DNA, 419 bp, Rattus norvegicus
  Genbank Accession No. AI058674
tttttttttttttttttaaagaacggtaattttatacctggggtggagaggaggggcagaatgttaaataaataattctcaatcatttccattaaaaacacctctatacttgaatgcaaataagcctggcccatgttgtaggtggattcttaagtggtgatggggaacagcacagggcacaggtatcatatatttagtgaggtgacagtaccttctgttcccaaagaaaagggcctaacaggcatatctgtgtgttagtgacttccacctcgaagtactgagaaggccactacgatacagggatcccacacctacagccaaggtcaaggctaccatgtacatgaactgaagggcaaacatagggagacggactgagacctggacaggtcctcaggacaggcggcagcctcgtgccgaat

SEQ ID NO: 1614 - DNA, 308 bp, Rattus norvegicus
  Genbank Accession No. AI058730
tttttttttttttttttgctaggtgaggattttattaagtccgatgataggaaagactgagaacactcaagacagttagtaaaacagtgctctgtcctagagggttaaggcacaagtggaaatccagagtttgtgcttccacacacacatctgtgcctttcacataatgacctaaagccatcaacagcagtcaaaatgaccagaaggtggccgagagtgggctggtagctcagggaacacacgtgactccaaaagggttaactacaagtggcaggtgacatcatcttacagacattgcaacaggatag

SEQ ID NO: 1615 - DNA, 346 bp, Rattus norvegicus
  Genbank Accession No. AI058746
tttttttttttttttttacattattgactcagtgtaatggcttaaaaaacaaggttcctcaaggactgccaggggcccaggcatagtcacatcctttgtgaagagcggaaggaaaaggaggtgaccgaaaattaagttaggggagatgaaaacttcctgggaagagaagaggaagggtaaagtgctgtgttaggagccaagcgacaggagaccctgaggccagtgatgtcatcccagaaacaacatggtgacagaagtttaaaatctttaagccacgactttgaaggactagtgcagcagagcgagcacctatgctgagcatgacagcctttgctaccccagcaca

SEQ ID NO: 1616 - DNA, 342 bp, Rattus norvegicus
  Genbank Accession No. AI058759
tttttttttttttttttgaaccatctgcaactttattctggagcagaaataagtcattttctaacaataaatataaaaaaaaataataataagttaaggttccaaaaacaaaaacaaaaaccacccaataacacagatctgtaacactgacagcgacagttgtccaaaggggctaaaaacggggtggctgggtggtaagtctcctacaagtcggccaggcctcagcccgggaatgtctgttgcagggtatcctctgtccccagccctggcaaggtccctgccacacactcattctttccacaagtataaaatatatatttaaaaaaaacctcaacacagcca

SEQ ID NO: 1617 - DNA, 193 bp, Rattus norvegicus
  Genbank Accession No. AI058821
  misc_feature (1)..(193): n = a or c or g or t
tttttttttttttttttagtatggtatgttgatcccctcaagatcacactgattggctgacccagagtatctagggctgtgcaggagcaatgatgttgctataaacatgaaagtgcctaatgaagccttttctaacgacgcctgtatccatccccactggttaagtgacatggccnnatatatacataaaagt

SEQ ID NO: 1618 - DNA, 449 bp, Rattus norvegicus
  Genbank Accession No. AI058881
  misc_feature (1)..(449): n = a or c or g or t
tttttttttttttttttgtccccaacaattttattataaatagaaacaagactccctcttggtggctgcagcccctgccttggtggctctgagcacctgttggtgggacctgtccctttagtctggaggccaaaaccaaggaaagggtttgctgtcccaccaagtacatgggggcctgaggtactgaggataaaaagcagagtgggacccagggccgtgctgcccacccaggctgggtgctgccacctgggcccaacagtggcactgctccttcctcagggcaagaggctgccctttttttcacaccagaggggaaggtgaggcctcagcatcccgaccccgagagaagagtggatcaggtgccagggtggccaggcggttggaggtcaggtccaggcgggagagctggctaagctgggcaaaaacacctgngggcagcgcatcaatga

SEQ ID NO: 1619 - DNA, 458 bp, Rattus norvegicus
  Genbank Accession No. AI058889
tttttttttttttttttacttatgcaaagataagtttattaagattaaaaaaataacatccaggacagaaataaccatggaatctgctgggtgtagcctctcctttataatctcagcacttggcctgagtgagttccaggcagccttggctccatagagaattccagcctagcatttgctaaaaactaaaacccaagccaattaaacaaaagccatcagctacaaacaaaatgacaaccattttctggagtaacaaggttaattaccatcatttagtgtggttccaaattattggccaaatgcaccacctgaaccaacatcaagaagcaccatactttaattatagttagtgccaaaagaatgtttgagttttcctaataccaggggtcatttataaccattttaacttttttttttttttttttttgcaagcacacacgtattggtacccatgtcac

SEQ ID NO: 1620 - DNA, 154 bp, Rattus norvegicus
  Genbank Accession No. AI058911
tttttttttttttttttaagctttccactaaagatttaataccagattgctgtactacagtgtgcgggcggattttaatattgaatgtgttggtcttttaatttgtctcagttcagctgacgcttccttaggtggtctgctggagcatcatttt

SEQ ID NO: 1621 - DNA, 487 bp, Rattus norvegicus
  Genbank Accession No. AI058942
tttttttttttttttttagtgattctgacatctttattgatgctccctgtctttgcacttatatcgtacatgtcatttaaggagcccggcaagcctcataaataatgtctcttacatccaccttggtagcagagatcagtaccagcagccaagtgtggaacaacccaggctaactctgggtccaggccacatcagcacttcagtgtttaagtcttctacatgcagtgtggaggacgcgtccgctacagtgtcttccagctgcatcaggcccagcccagtcagggagcagcatgggcctccactgtagcaccgaaggggcccaacccagaagcctctggcagaactggcggcatataggcagcacaggagaagccagcttccagcaaaggggacttgacaaatcttctggttgtccagttacagtgacagaattgaaccatgtgttgcctccacagctgtctggaaacgagaggtgtccgtctctaca

SEQ ID NO: 1622 - DNA, 371 bp, Rattus norvegicus
  Genbank Accession No. AI058956
tttttttttttttttttgatttaaatggttttattaaaaaaggtaccacttgatgggtgagagggtatttacacatgtatacaaataaagaaccaaaacagtcaaatattatatacaggttaaaacataacagtccccattcctttccttaaggcagaaatgcccagaccccatgccaactgaactggggatggaggaaatgctacatctcactgggtctccccatgtcacttgctgtggacccagagaaggggtagagacagacagctgtagagagaggggcagtgcaagctgggggccacgtatctcatagcaccttggccaaagctgggcacttatggaagagaccagctttgttctgctgttcccgt

SEQ ID NO: 1623 - DNA, 455 bp, Rattus norvegicus
  Genbank Accession No. AI058990
tttttttttttttttttacaattttaggcaatttttatttgtattttagtatctaaacaacttgcagggaatacccttgtggagcaacagagtggttttatttgaagctatttgaaagtcacgacaggctcactactatgttctcaaaagcagtcaatatgtcagccagaacagccaacttctcaatagtcatctgtgatagatacttgactatgtgagcctagagagcctccccacctctggtccccctggagaggaaggggtgtttgtgtgcttttctgtgttggttccactgaattcatcacgatggagatggacatttgaaattcataacggtctaacatctgagcaatcttctttcgagacacgccatgtttattcctcttttctaattcttcagggtcaaacttccaccaagtttccggttcatgaaactctactctgtatccttttcc

SEQ ID NO: 1624 - DNA, 350 bp, Rattus norvegicus
  Genbank Accession No. AI059010
tttttttttttttcctttatttcgttttcattttcgtttttttttttttttttttgccctttggaagagagaacgggagtgtccgatttcgccctatttatgtttctactcgggaacaaacgttggttgcgtgttgcgtgtgtgtttccttgtgttggttttttaaagaaacgggaagaagaaaaaaaaaatcctccccccttatcccccgcgctctctcctcctcccgacaccatcccctctctttttgtttggttttgttttgccacgagtccacattcctgttccgtaatccttgggtcgccggttttgtgttttcagtaaagtcttcgtgacgccaaaaaaaaaaa

SEQ ID NO: 1625 - DNA, 118 bp, Rattus norvegicus
  Genbank Accession No. AI059014
ttttttttttttgttttcaacacagtacaaagcaaggaaacatttatttactacactcacacagtactcatcaagcatcctgatgtttgcccaggtagcttaaaatagcagatattca

SEQ ID NO: 1626 - DNA, 475 bp, Rattus norvegicus
  Genbank Accession No. AI059046
tttttttttttttttgtgcaagcatctctgctttcaccatttattacaaaactttcctgagaaagactcaacacaggttccgtctactgcactttaccctcattcctatagtcccatgacggctgccagcctgccctgtcagtgggagccttaaccactgataaggctcatggacagaggaaatccacgctcttccgacgagtgcagtgactcttccatagtccaagccgctcttgtcaggctttgagcgttgagtccaggtctggcggtaaacaagcctcatacccaaccttgttatctttctttcgatagtacatgcgtgtcagcactgtcaacaggaaggtctccaggatgagcatgtgacagttcatcacttgggacctgattttagaagaatacggaggtgagcaagcgatctgcccgctgttagccaagatggagaaaatggatggctgcatggcggtcaggatgacaa

SEQ ID NO: 1627 - DNA, 316 bp, Rattus norvegicus
  Genbank Accession No. AI059061
tttttttttttttttttaacaagaagcctgtatttctcatcatacgaggaatttaagttaatggtacttttggacttttaacatttgtgtttgtgagacagggtttatacactgcagcccagggtgtcctgggtctcattcgtgtttcttaatcctctcctgtgctgggattataggcatatgtctggcttgatttaaaatactttaatccaatctgtaatgtctgttagcggtttcccgggtccttctggtttgtaattaaataactcaaaatgagaaaatctggggctatattaaagggaagaaaaaacaaaac

SEQ ID NO: 1628 - DNA, 477 bp, Rattus norvegicus
  Genbank Accession No. AI059063
ttttttttttttttattattcagaattgtatatttttttcaaacatttaaaaaccaagatgaatcacagaaagcagatcccaatgggacaactaaacgatatttggaataaaatcactgggcctaattttcataaccacagatttcaaggaataccaccacccacgccaggtgtaccagacaacaccattatcggtttctgctctgtagggaccttggtagtacacgccgttcaggtttgcagagtgacacctgttaaaccaccagccagactgttcctcctcagcacagttcccgttgtagttgtcgttgtctctgtcccgtgtgctgaacttcattgtttggtgactagcccaccactgcacttcagggtgaaatgttcccgacagggagtctccggcggtgccagaatattctccaatattcagttcgtaaaaagacttttcatcgccaactttaaatttttcgtattgtgcga

SEQ ID NO: 1629 - DNA, 423 bp, Rattus norvegicus
  Genbank Accession No. AI059117
ttttttttttttttgttgcaaccttgtaacttctgctttaatggcaatcaagtttaaaaatgtacagttcacttcttcatactgtttgttcctttataaaaggcagaattcaggtaagcgtctagatgcatgcataacgtagaggcagatattttctggcagtccttggttcctgaaagttggacttccatcagatgtggttttaagcttttgtcaaaatagtcatgaaggatatgttacttctgcataatgaggtaatatctcaggggtggccactcgccataagatgtacaaatccactcatctaaacttgcacgaggctgcatatgctgtaaaatgtatattcccctcctgagtggcccttccatgagttcttggtctgtaacagcagctatatacatgttgtacacaggattacatgga

SEQ ID NO: 1630 - DNA, 316 bp, Rattus norvegicus
  Genbank Accession No. AI059122
tttttttttttttttttagactcatgaaaatttattccgattcctccagctattttaagaggaaaatcaggtactcagagaaagaaacacacatacacaatgttgaattaacagcagtctgcccaccctttgttgtccccctgtggctacccagggcccatttgtaacacttttacagatgcaaatttaagtcaattctaacatgatgtcatggcaaaggaggtttgtatttttaaagtgacaaacatcataagaatttgacacatccctttctgtggcaaatgtcaaaatgactgccacaaaaaaaaaaaaaaaa

SEQ ID NO: 1631 - DNA, 470 bp, Rattus norvegicus
  Genbank Accession No. AI059204
tttttttttttttttttcttgggattcaccacctcatagacattgaattgtgactgtcctcttgagagttcccgatagcttgttgtaaattccccaatgaaatcatgacttccgtctcggtcccagtcatagacctccactttgattgttctgtcataatccccatgcacaaggctctcactgagatcttgaaggcttgccacacagggttgagagtgtttttgaccacttctgtcttgtgacaaattgtaaagcttccgtcctcattgcttcgataaaatacaaggaaaggatctgacttcccaaagaaatccttcttatccaatttgtttgcacagaactgcatcaggacggcatccctgcagcagttgagctcctccgcggttagtatgattgttccacatttcctgcctggaattcctatgtttggacaggttgggactctttgaatcaacacctcgtgccgaatt

SEQ ID NO: 1632 - DNA, 402 bp, Rattus norvegicus
  Genbank Accession No. AI059290
tttttttttttttttctccatttatttttattcctcagagaattacagaagcttgttttacagcctctgtgttgacacagagtcaaggcacagtgttcactcagctacatgcaccatcagcactgtgccactaggagaccagactggtaacaagcttgagcatcgctcgcctgcctggagtgccagggcccctctgctcagatggctctgtaggagtgcttcaaagctggtcttacaaccagaggcaccgcacctccggagatccctgtttgcaatctacaaagtataggcatgtgatataaacctgttccccagaagcttcctgggtgacttacatgaacaacgggactctcaacaactgatgtggagcactgccatttcctgatggagctgcatgtctga

SEQ ID NO: 1633 - DNA, 302 bp, Rattus norvegicus
  Genbank Accession No. AI059298
  misc_feature (1)..(302): n = a or c or g or t
tttttttttttttttttaagagaaccagaactttattcacagttagaaaggtcctaatctaagattcaaaaattgaaatccaatgtcttttaagaatgaaaattcttaaatccgtcagaccagctgacagggcaaatggaggaaaattccccattaagacaacaacaacaacacaatacacaactcagtctccctccactcccagcaccccagccacctcccacccctttaagacacagttaaagccaggcataatgcacacattcanacaaacaaaacgccaaacacccgaggagacctca

SEQ ID NO: 1634 - DNA, 306 bp, Rattus norvegicus
  Genbank Accession No. AI059352
tttttttttttttttttaagtcttcagctttattgtccggaatttacaattacaaagtagtccaaagtcatttctcagtactgctgcataaaatatacatatacacatacttagaaaaattataaaatgttctttaaaaattacgctataataagatttctcctcatttactgaccaagcataaaaaatatacctcatatgcacctttatcttttacagtcctattgacatttgtgtttataactgatccatacattcaaagaactgaaggcattgtttcactgcaacaaacttcataaaaggatt

SEQ ID NO: 1635 - DNA, 243 bp, Rattus norvegicus
  Genbank Accession No. AI059386
  misc_feature (1)..(243): n = a or c or g or t
tttttttttttttttttacaggtgaaataaatttttattgatcagtataaaatatttcaacacacaatgtcttacatttgatattgtcttcagtctggtgactgtttccttgcaatagttgggatagaatctgaggcctcagacatgacaggcaggtcctccactactaaactatgccccagacccgaggggttctangcaagtgctctcctattgaaacatggccacagctcctcagtggta

SEQ ID NO: 1636 - DNA, 405 bp, Rattus norvegicus
  Genbank Accession No. AI059389
tttttttttttttttttcactgactcctggatgtttattgcgtcatggctccaactgaacacacaccacgggacagtcagtcattgaaggcctccattttgagcacttgggctcatttcaaaagcagaatttttaaaaatgtacccagtgttgatttcacccatctaaaattgttgtagaattcagagggccaagctgaaaacgtacatagaaaaataaaggtatagaaaataatttcagattgttttgttggagacgttggtggcactgctgagggtcttggctgcggctctcactcatggtggtacaccgcggtgtggcctgctggcttctgcttggcctctaaaacagctggatcatggactctctggactttccaacgccaaccaatttgactgcaacacc

SEQ ID NO: 1637 - DNA, 156 bp, Rattus norvegicus
  Genbank Accession No. AI059403
tttttttttttttttttaagtcataaaaaatattttattggtaattatacataagtgagtggggctgtaaatactttctatttcaggatattgataagtgcataaactggaggctgtatctggaacccagagtactatggtttccagaccaattgt

SEQ ID NO: 1638 - DNA, 493 bp, Rattus norvegicus
  Genbank Accession No. AI059444
tttttttttttttttttccaaaagtacacatttaatgaggctttgtactttaaatgggcctggaaaaagatcctaaaccaggcacatttccttcccccttaattgggtctcagtatgtaattcaggctgccctggaagtctgtgtggtcttcatggccaagggactttaggcccactcagctgcccaaatcccagggtataggagtgtctctcttgccagcctgtttcctgattactcaaagaggttttgttttggcagtgctggggatacaacccaggcttttttatttggttaaaaaaaaccctaaaaactatcactacaaaaacaaaacaaaacaaaaacaaaacaaaaaaaccctaatatattaaaagctacttctttctgtgaaagagaaaatttgaaattaaatttgttgtcacaagatgaatctttgtcttaagctgttttctcacagaaagtgtatgtttagaaaacgttattattccaagtgat

SEQ ID NO: 1639 - DNA, 425 bp, Rattus norvegicus
  Genbank Accession No. AI059477
tttttttttttttttttgcaatcagcaagaggatttggtttattgtcgggatacacaggcacaggcacctgcgggcgctacagtcactcgggggactggcgcaccccacgggaccaaggatgggcttttataggattttggggatcagaagcatgcatacagaagcagatgcatggttacagggatataattggtggattctaatatggcaagggtttagcccgggggcaagtttcctagctaccttcctgaaacataacggctgactcggccccccaagggttcagcccgggggcaagtttcttagctacctttttggaacataacgactgactcggtcccccaccacggtgtgggacctctcccggggctttttttcattgtcaggtgttcaaccgaagtcgtccttttgccaggccttcaac

SEQ ID NO: 1640 - DNA, 532 bp, Rattus norvegicus
  Genbank Accession No. AI059511
tttttttttttttttttcaggcagtcacatcagcttcttttattctgaaaagtcactacataataaaaactctataaaacccggcataaatatcgagttacaaaagcaacgcaggtagggaaagcttactataaaaaagcagaagaggtcaaaaggatataggtgttcttgtcgacttgtgtggccttagtacagtcgccctctgttgctcctccactctccacataatccgtgggactggggctaagggagcataggtccaggaacaagccgctgaagcacagcctgtcctctcattttttgtttgcttcaaaaataggatgcccagcctggcattgccaagaggcatggcttcagggccagccactctggatttatgtcctagcatcactggctgcatgacattgcttctctggccctgtctcttccttcataaagtgaagccagtcagtgcacagggtagtggggtaagccctgtgtggttctccagtgcaaacagagtcagctaggagttcgtagcgtgttctcctga

SEQ ID NO: 1641 - DNA, 374 bp, Rattus norvegicus
  Genbank Accession No. AI059604
tttttttttttttttttaattttaaatctgaatttatgttttgaaataaaaatgcaagatatctgacttttataaaattgtcacatgggaacacattttaaaataccaccacatgctgtatttacttagaaaagagttaacagtaaatccagtctaaacaagaacctactatcagttataatgtgagttccttcctttctttgtgcaataaggaggcttatgggaaatgctggccccacagggagagccagcgatgactcagcacctccatgattaaggaagcctggagcacagacgccctgatggggaggaggggtggactccagtctgcagctcctccacatgggctgcagggcctattgccggatgctttc

SEQ ID NO: 1642 - DNA, 433 bp, Rattus norvegicus
  Genbank Accession No. AI059638
tttttttttttttttttaaagtttaaaacatgaatttattttatgtatatgggtgtttggtttgcatgtaaggcaccaccgtatgcatgcctggtagtccatggagcccaagagagggttttggattcctctggacaggagttacaagatggctgtgaaccaccatgttggtactgggaatcaaatggcagccagtgttcttaactgctgagctatctctggcctgtggacgattttgattccaactataaaaggctcttgtctgccccctgattcctggggaccctttgttatgtggctgttgagtcatcaaggtcaaggcagagtcactgctccccggactgttcttcttccagttgtagctgaaggaaaacaccagaggacttggcatacactgtctgcttgtctctgctctgggcgatacatgacatgt

SEQ ID NO: 1643 - DNA, 273 bp, Rattus norvegicus
  Genbank Accession No. AI059723
  misc_feature (1)..(273): n = a or c or g or t
tttttttttttttttttaggtgggtaaagcctgaaggcagaaaggacagatttaataagcacacagtccaaaaggtttccttctacggcttcaggctggcgcaggtcgctaatggccacttttccttccaatggccctgcagcactctgtctgggtggaatggcttcccacggttgctagttgcctcggtcttgccaacgcncctgtgaatagtcccttagttgtgttcttttccgttaaattgtgttgattgtagcatgtttcctgcctaga

SEQ ID NO: 1644 - DNA, 192 bp, Rattus norvegicus
  Genbank Accession No. AI059824
tttttttttttttttttgcataaaacacctttatttagtggccagagcccaatgtgtaatgtcagtcttggcttgattctgttatgatgtgctgttacattcactcttattaaagcatagaagtgcgtcaccgtcagctctttaacttggcagtgtgtaaagtataactgtttgccctttgataaaaatctt

SEQ ID NO: 1645 - DNA, 190 bp, Rattus norvegicus
  Genbank Accession No. AI059835
tttttttttttttttttctgaaaatatcttgccttttttattaatcatgtcatctaacaccaattaaaaagacaagtctgtgaatatgatataaaaatacgatccccaggttaacacttcgtcgcaggcacagttacctcacagaatacatgtttggagggccgggaaaggagtctgggtctgtgtctct

SEQ ID NO: 1646 - DNA, 501 bp, Rattus norvegicus
  Genbank Accession No. AI059856
tttttttttttttttttactcagacaggatcagacatttataaaacaggtaagtattcacacactgtaggagaaacaaccttcccagcaatggggaatgctgtaaagtgctcttgcctgcaaccatctcttccccatgctcgggcccaggagcaggacatggggcactgttctgtgacagtcctcagggccactcaggctaggcaaaaggaggcatgaagtcattccagggctccaagacactctatcccacagctgtggaatagtctgctccattcactggaaggctgtcctggaaatgggccaacatgtcaaggaggtggaaggacagatgaccttgccaacttgtaccttgaggagagagccatcatcaaaaaagcagagaaggccattgtccccatagctgaagatgttgcaaaataaatactggccccagaataagcctttgctcctctgggaacagttctccagacgcattctactgtccctccagcaagagcct

SEQ ID NO: 1647 - DNA, 214 bp, Rattus norvegicus
  Genbank Accession No. AI059947
  misc_feature (1)..(214): n = a or c or g or t
tttttttttttttttttaagtgtaattaatatattctaataaaaaacactagtaaaaaaatagagccatcctgggcaacttagtgagatccagcctctaaataaaaggtcaatgcagctcattggcagggcacacgctcagcacgtcaaaggtttagggctcagccttccacatgcaggtttcttcaaagcctccaaagcagtgtntgtgcctt

SEQ ID NO: 1648 - DNA, 495 bp, Rattus norvegicus
  Genbank Accession No. AI059962
  misc_feature (1)..(495): n = a or c or g or t
tttttttttttttttttaccttttagaagcaatcatgtttattgtaatatctatgaatttttaaacatacatgcctattatgctttagagtatttgagaagatactatgatttttaagactacttaaaaacacacaaaatcttagatccacatcctacccagggataacaaattctgattagacttccatttaatgcttcaaaggcactcattcttactgtattcttacagatgtcacttaaaatgccatagtattaagtgttaaaatgtataaaatgttcaaggtatagataagtatacactaagttactttagcatagtcttgattctgaagaatcagcacagcacagtaatctgggtcgcctgtgttggcagacacacagcctggtatagacacagttgccctcagctttcttacttgatgtcctttaagatcacgtactctagactgtgctgtngaaaaatgaagcatagtttcgaaagttcctgttacgg

SEQ ID NO: 1649 - DNA, 534 bp, Rattus norvegicus
  Genbank Accession No. AI059963
tttttttttttttttttgcatttgagaagagaggctttatttacaatatttaaacgggatttagcaaggaatacctctcccctcataccttagcagcatgaactatatacactttataagcaagaggagtatcctgggggacaggatatgaattctctcccgaaaattagttctgaagttcccagttctgaagagtatagctgggaggtaggatgtgtgtgttgggggagtcttagaaggtagatgtgaaacaccagcttctcactggggtccacaatcaggaattacttccgcactggccaggaaagcatcaggatttcacctcactcatggcttccatgaggcgagcactgtttgtaacagcagttgtcagaaaaataaatctgtaccctttctctctacccaggaagcgcagggctgatatctctgagaacgtgcagccccccaagaacaccaccaagatgaggcggagtgactcactggaagccttgtcttccttagccatgtctgtgaatgcaaagtcactgcagttag

SEQ ID NO: 1650 - DNA, 411 bp, Rattus norvegicus
  Genbank Accession No. AI059968
tttttttttttttttttgggtttgaaagttaattttattaaatgaagataatatatgaaatacattcatcatgactagaaaggtgtggccagatcatgtctcaggtctgtagcaaataatcttgactcatataaaagtaacttcaaaattccagtttctttaaatagttatgcacaaaacatacagatacacacatacacgtacagttcctaccactgtgggtcagaggtgccctctcccttcactgagctgccccccccccttcactgctcaaagacctgtgcaacggggttcgaccagatctgtctcctaaggatccgcctcgggctagcttagacttgcctgaggcttcagctccctagtcacacagggcgagtcccaaacactaggagaaatgttcgctcttcctta

SEQ ID NO: 1651 - DNA, 130 bp, Rattus norvegicus
  Genbank Accession No. AI059983
tttttttttttttttttcactcaatagtattttatttaaaagttcacaattaaggcacagtaataaacaaaacacttaaaagcaacaaaagctaccttgaaagaaaaacatccagcatgtcaagggatgg

SEQ ID NO: 1652 - DNA, 558 bp, Rattus norvegicus
  Genbank Accession No. AI060050
  misc_feature (1)..(558): n = a or c or g or t
tttttttttttatttttgtataatttaataaacagctttctagctgttactgcttctgtctgaacttcttatgtctgtgtttctgtccctctgagtcattcgtcttctttttgttcctgtttctgtttttcacgttgtgtgtttcatagtagcgcacaccgacttttttggattgttgctgccgagctgctctcctccgttccttacacgtcagcatcctctgagtcttatctgaaggctcttcttccacctgtgcattccacttccttgcccttttggtgggtgctgcatcactgacttctgcagacgctttcttctcttcttcatacttagcanaaaccttttcacttaagtctttggatattctgatggcagagaactttttagctttggctttatttagaaacctctggtacttggcaatcttctcatctagggctctgatcacagctttggtgtcatcttccacgggccctcnccgcgtgtctcgggaacactcttcctcagcatcctctcctgnctgctcctgctcctgctcctcctcctcctcagagcttt

SEQ ID NO: 1653 - DNA, 442 bp, Rattus norvegicus
  Genbank Accession No. AI060052
tttttttttttttttttcagttgggatatgctttattctaacgttgtttgactatgaacaaaataaaaatagacacagagacatctggtgactcagtcatgcagttcgcacacgtgggtactggtatccactctcttttgcttggccagctcttggatggttgctatctctccagcagtaaacttcggagtgagagtcacattgtcataatcaaagtcttcatcaagaaagaatggctgaacttcatctccaagtatctcttcagtttgcgtctgagttcttcccacagcgggcgttggcttcccctcagaggtgagtggcaggtccacagaaggaacataagcaggagcactgatgcttatactctgttccacctcacctggaagtaccatccaatccttgttcatctggggcttactctcttcctccgtgtccacatctt

SEQ ID NO: 1654 - DNA, 250 bp, Rattus norvegicus
  Genbank Accession No. AI060071
tttttttttttttttttgctgggcctttgcttgtttattttgcttcccgactcttctcttggggttcagagccactgaggggtggggcaagtccaggcaaggagtggaggttggaggaagatgcggaccacacaaacagcgccactgtacacattaccacaggcagcacgaatgaggaccacatatgcctagcatggcacaaaaggaggccaagtcagtcacagacacaaacattggcaaaggtggggga

SEQ ID NO: 1655 - DNA, 422 bp, Rattus norvegicus
  Genbank Accession No. AI060178
  misc_feature (1)..(422): n = a or c or g or t
tttttttttttttttttcaaggtaaaataattcattaaaatctgaagttaaaggtctgaggtgaagggctaagttcccgtgccggggagctgttaagccattatttataagatgaggccctggctaccagccaggagacccgaatccaggatggcttttctcttatctcgatttgtctttgccacgacattcacctcctttgagttcagcttttccgtttgtaaaacggacaaacagcctgtttccctctttagcatccggagtctgatccgtangaaaacaaaaagcaaaccaaccaaaatgctttggagaggtaaacgcactgggccgaggtgaagcatcactccagccgcctgcggggtgggctgggctctttgcaaggccttgacgtcctccaaccgcccgggggcgctcgctcccgg

SEQ ID NO: 1656 - DNA, 493 bp, Rattus norvegicus
  Genbank Accession No. AI060224
tttttttttttttttttgggggtttaagtttttatttgcttataaaaaaagaataaaaacgagtcttcaaaaaacatatctgcatttacaaagcaatccctgtagtcaaggagaggcaagccctgaaacacacttctggacaaatgatttgtcaaaaaatgggtctcttctgcattgaaattggtaggaagtcattattttatacgaatcaaaactgccggaaaacagattctatagtttttttttaattgccaaatctagaaaggctacactctagctcttattccgaatacccgtgaaaccagttactgagtaatctatgaattggaaagatcgggttagacacgaaggaggtagtttcctcagtgacggtgttacttaattaccagaaagctcgtagccacgggtatggggtcagtggcataaacagggagtctctgaattcactcttctgttgtttgggcccccaattctctctgatataaccacactt

SEQ ID NO: 1657 - DNA, 515 bp, Rattus norvegicus
  Genbank Accession No. AI060271
cggccgcctggcccgcgggtcgggcttctccagcggcggggcctccggccctcctccgcactctgtggctcgtgacggtcgccgcgggacattgtggggctgctgcctctggcgctgtcggaggcgaggagacgcccaagtgtgaggacctcagagtgggacaatatatttgtaaagaaccaaaaataaatgatgctacgcaagaaccagttaattgtacaaactacacagctcatggcttgttaaagttttgcactgtgggattttgcggaattgggagcctaattgatttcgtccttatttcaatgcagatcgtcggcccttcggatgggagtagttacattatagactattatggaaccagactcacgagactcagcgttactaatgagacatttagaaaaacacagttgtatccatgagtgtttgaaagaggaacagatttgagcctccctgatttcaatcaagagccctgtgtgtggaattccagatttccttttcctttagtatcactt

SEQ ID NO: 1658 - DNA, 442 bp, Rattus norvegicus
  Genbank Accession No. AI060279
tttttttttttttttttgtgtttaactttatcctttataaagccatacatggatggtgagagtaagcagctgtacagaggggacagcatcagtgtacatacattcatgtccagaacacttagcatacatcagggtttatacaaggtggcagaggctataggcacaatgatacaaaatataaagtatatttccatctataaatacacagccgggggcaggggcagggcatggactccggatatgggtttcccagcagagggcctgggaggcagagttgggatgatcaggatgtgagggacgtcttacatttgattcgggtgacagaagggaagagactggggagatacctcatgcgcaccccaacgtgctcacacacatacgagccaaatgtgggtcctcatggagggctggactgtgaacactgacacacactgggtgtgtc

SEQ ID NO: 1659 - DNA, 319 bp, Rattus norvegicus
  Genbank Accession No. AI060283
tttttttttttttttttatgaaagaaaataacagaacgaagattctttacccttaactgggggcaacttggggaaggggacccggaagaaggaactttctctgtaccttcctcaggactgggctcatgtctcctgtcctcagaggaagagaaacaatgtgagatccctttgtttaaactgtgaatgtatcctaaagcatagtcacaccagcacggggtctaactaactttagaacccattaatacaggcatagaattgggcctttgtttgggagctttgggggaagggaggcccatggaggcttctggagtttcatggg

SEQ ID NO: 1660 - DNA, 463 bp, Rattus norvegicus
  Genbank Accession No. AI069912
tttttttttttttttttggaatttggaaactttattaaagaattaaaaaggaaacataaaatgtagcatattaaaatgagctctataatgaacacttctaaagacaaacaggtaatacaacactgtaacttgaataagttcaaacacctgcagttgagggaatgaattactgcatttggggacaaaataccacatcaacagtttttacttgtaaaatattttggtccttacttaaatttttaattgttgcacagggctaagaaattcttacattgccattttctgcccaagaaaagggcttccactttgtacaagccacagcattgtcagcgggagctagaagttatccctttataatcacacaagggagtaacttagctcatcatggtgaagcaaaagaagtcacccaggacgctgagatgggagaatcaaaatcatttaaggccatgcaatttggactagt

SEQ ID NO: 1661 - DNA, 390 bp, Rattus norvegicus
  Genbank Accession No. AI069920
tttttttttttttttttcttagaaaggaaagcatttaatgggcgctcgcttacagtttcagagggtcagtccattatcacagcagggagcactcgggcaggcaaactctggggttgagctttacagtctgagcccaggcagcaggggcagactgggcctggaatgggcttatagaacctcaaagaccacccacagggtcgcacatcctcccagaggccatgcctcccaatccttctaatcctatcaaacggttccaatccctggtgacctaacctccaaatatgagaccatgatcccatattcattcaaaccaccacactggtggaggcaggacacaattttaatgggctatagagtacagaggtgatgttttttttctgtcaacttgcc

SEQ ID NO: 1662 - DNA, 325 bp, Rattus norvegicus
  Genbank Accession No. AI069975
tttttttttttttttttagctgtttgtaatatggatttacttgcttcagagtatgaacatatatcaaacatactacacccccataagcatataaaattactgttaaatacataaggaaacaaaagagcttcttacaacttgcaatcaaggacatgttttccttgaaatgtttggtgcatcagtctcccacccaatactccagaactcttaagcggagtctcagctgtcagtcggcaactcctcactgctcccagcttgtctcttgctcattcttcaggaagttgttttagaacatctgtgtgagcaacacccacagttctgtgtg

SEQ ID NO: 1663 - DNA, 404 bp, Rattus norvegicus
  Genbank Accession No. AI069986
  misc_feature (1)..(404): n = a or c or g or t
tttttttttttttttttaaagattgcagaggacagctttatagcacgatgccacaccaagcaagtgtggccctgagggccacagggaagccctgtggcgagggcccagctgggctttanaagcagtaggacgtgtgggtgacccagtgggcagactcctccttggagcgcttggcagagctgtggcttgtgaagatggacttgtaggtttcagactcctcactgtctgcgatggatctcttcagggccccacatgggggcttgccaactttcccagaagcactgccattagatgctgtgcccctgggcgccaaggagcttttcttctccctaggatcggggtccgcctcctcagacttgcccgccttcgcctttgatggccctgcagagtcttttaatgccact

SEQ ID NO: 1664 - DNA, 495 bp, Rattus norvegicus
  Genbank Accession No. AI070058
tttttttttttttttgtaaacacttccagtttattgggtgtggcagtaactgattcccgcagtccataaagtgcttcattcatcgagccgaatcccacagcaccagcctcttcacgcccttaacccagagtccacacagcagtgtcccagagcccctctgcccctgctgtcagcttcttcagtcagagtggcatcaaaaaaaaaaaaaaaaaaaagctcttcccttcactcttactctgatggccccaggaccgtccagttaaggctacagctgggccccacccagcccaggaaaagggacaggcaggcgggagatccggtgatacttgtgcttctccgtctttctagcagccccaagcatggctgtggtgcagcacaggctcggacagcaggatgcccaaaagggtacagggactctgcattcctttgaaccctggagaggaacctcaagtttggagtcgggcacctacagcccagtcagggaaagactgcatg

SEQ ID NO: 1665 - DNA, 504 bp, Rattus norvegicus
  Genbank Accession No. AI070068
  misc_feature (1)..(504): n = a or c or g or t
tttttttttttttttttaaggcttaaccagtttattggaatgtctctgtagtagaaatttttaaaaaatatgcaagcgatctgtcttgctcagcacaatactaaagtagatgtgccttagctgcgaagtcccgggctcgagtcccggctcccgcgtcgagggtcgccgccctccgctgagttacgcacagttcactgtccagcggggtgggggacgcctcgccccacccctgcggcggtgtccagaccgtctgctgctgcgtgcagaggctggctgcatgattgccaggccttggctctaaagtctctgtctcctccagcctgaggtcccctccttcctgtcttggcgaccacctgtggtgctggctcctggctccatagcccaaggggcgggcgggcgcacactcccctctcctcgtctcagtctcggtgactccgcccctcccggaaggtatcacgggtagggtagcttttgagggattgttctggggaatganggggcgct

SEQ ID NO: 1666 - DNA, 146 bp, Rattus norvegicus
  Genbank Accession No. AI070073
tttttttttttttttttctgattatagacatttattgaactcacttattgatttgacacacttccccactccaatctagcacatgatacaatctgggtaggccaggcgctgacacaggaaatgatgggaacccacagcaggagtgg

SEQ ID NO: 1667 - DNA, 477 bp, Rattus norvegicus
  Genbank Accession No. AI070087
tttttttttttttttttatttggagtctgtttactggaagctttctgtccctgaggatctggacaacagcagcaggcagcagatgtcttattaattcgttgaaggcttggcccactcgacattgaggataagatggtcgtagccaaagccagacacccctgcaatggcacgcgcagcatcctcccggcggtgaaagctgataaaggcaaaacccttggactgcccagtggtcttgtccttggccaagtagattcgggagatggagccaaaaggccggaagagttcctgtaagtcagtctcacgagtgtcctcagacagattagtgacacggatggtggcattgtcatcagctctgcggtttggctgcatagactccccacggcggcttgccccatcccggagactaggaggcacatacttccctgtcttgttctgggcggcctgcacaggctccagttctcctggcaatttctcctt

SEQ ID NO: 1668 - DNA, 388 bp, Rattus norvegicus
  Genbank Accession No. AI070132
tttttttttttttttttctggaaaaaaaatgaaatttattcagatagccagcagtgggaggtaaattcatcaaaggggttaccacaataatattccttataaaatgactcttacaaagagacaacatggtttctccccaaaagtcacaggtgcctccgagccttgggtactttaggagtctaggagtagacacagtgatggtgaccctctcctcggaggtactgtaatgtggaaagactggtggttctctgaccctagatgcatgcccatctgaacaggacatttctgctgggccagaaccaccagaggccagcaagatcttcaccatggagaaaggggtgggacctgtgggttaagggttctctcatgaaactggtcacctcttgta

SEQ ID NO: 1669 - DNA, 453 bp, Rattus norvegicus
  Genbank Accession No. AI070133
tttttttttttttttttaaaaccctcaaattagggtaccctaatcaaggcaaaaaacttaagaaatggcttaccgttagcacaacacttgtacagtactacaaaatgcactgtcactaaccaagacattagcggcatgctgaagggtcaccttaaacaaaatgtacagtaatcgaaatgctaaaggcatttacatggaatagacgaggaaggaaaaaagctcgaggttcgatattaaaacaggtgatctggggaggggcttgtatccacactgtttaatggaagcaggcacaacgtgtggctgctgccaactggagtcctaagagaggccttcctttgcagagaattttatataaaagtaacagaaataaaggtaccaaaagaggaaaaggaggaaagagaaacgacttgtataaggctttccgctgcatacagcttctcctcgtgccgaatt

SEQ ID NO: 1670 - DNA, 320 bp, Rattus norvegicus
  Genbank Accession No. AI070134
tttttttttttttttttaagtgggatccaacatctttaatcagtttcactctgggtagccagggaagggagatctgagaggctcagaggaaaggcgtgaacagagaagttaacattaaatgaccttgtcattctatgtccatttgtctcattagtcttgtgacttggaaagtaggatttgcagttgtgggggttggggggagtgcaagagggttttatatagcccaggctggcctcaaatttgctttgtagcctagaatgacattgaactcattatcctcctgcttccacctccctcgtgttgagatcaccctcgtgccg

SEQ ID NO: 1671 - DNA, 402 bp, Rattus norvegicus
  Genbank Accession No. AI070195
tttttttttttttttttgctgcagcaaggcctgcgctttattgtgggtgatctaaaggaacacggttgcccagcaggagctgggccttgctcttggtcctggccacacagccctcaaccaccatacataaatagggacagactctgcataggtggccccttcagccacagagcaggagcccactggtaaggggcctcgtgcccagcctggcactgactccgtcccagcggtgctggccatggacattccacgctggccaggcagcttcagtccagttcgatggggctgctgtcatcctggctctcttccccttcttcctgctctgaggagcccatgaggctgctcagcaggttccctagcaagcctccataggaggatgtctgctttggcggcacaccgaag

SEQ ID NO: 1672 - DNA, 344 bp, Rattus norvegicus
  Genbank Accession No. AI070233
tttttttttttttttttgtttaaagcttatatcttttttaataaaaaataaattgtctgtgacaagcagttgtgaatcccaaaacaaagggaggaggaagaggtcaagggtcagccacactagacaagtgaacaacaaggctcagattatgcccaccattctagccagggcagagacaataacaatctgtccaaactgaagcaagaaggaaggtggttagacttcagaaatgactttcccaaacacatggcatgattggtaagggaaacacaaggggccaactccataaagaatcttggagaccctgggaggagggagggctggtgttcaaagcagcagctttc

SEQ ID NO: 1673 - DNA, 506 bp, Rattus norvegicus
  Genbank Accession No. AI070241
tttttttttttttttttaaacagtatgtaattttatttcctcttaaaaacagcataagcaattaaatgtcttctcataaaattttgagtcatccaaaatggctcagtctctgtataaaactgttaacacgcaacagttcactttagtgccacgcggcgtccttctgctccactgcctgcagttgaaacaaaagcagccagacaagttccctctgaattcatttgattttgagagaactaacgaccgagaacagaacatatacaagttaactttgtaaagttaaaagtgactttaatctctaatctactaatggcactatgggcaaaatatagggtacagtataacttttatcttggttgacatactaaaattccttagtcactttaaaaatgatccaaacaattgtcttagggtaactgttttgaaaatgcgtctaatttatactgcttcataaacagaaaattactcttcttaaaaaaaggaatgatttttttaaaaaacattaa

SEQ ID NO: 1674 - DNA, 525 bp, Rattus norvegicus
  Genbank Accession No. AI070275
tttttttttttttttttcatggattttttttttatttaacatatatagtacatgtaaacaaggggcataaaattcataaaaatacaatacttctgtgcaggactgcttttttcagacacatcctcccgttttctcctcgtgctgctggcacacactctgccaggcattttagaggtttatgttttaatggacggatttcccagctcacttttttaatgtcacaataataactattcgattgcctcccgtcttcccttccttcctcacactgaagcaaaaactatgcagaacactgagctttaatactgcactgtcagctacataaaacctatcactgctccaggctgccaaagtgtttacgccgcagagcactggctgccaccacgtgctggaggccaggcacacaggggaccccacggcctcagctccaagctgccttcctggcacacaagcagagcttgctggtggagttacataagacacacttacaaaaggtttctgcagagaaactaatttagactactt

SEQ ID NO: 1675 - DNA, 443 bp, Rattus norvegicus
  Genbank Accession No. AI070294
tttttttttttttttttggcactgaaatcaaaaccatttgttgagtaacgagctgtacgtgatctgaggatcgacacacactagtcgtcctgggcaccagatggccctctaactggccacaccaagatgggatgacaatgaaggggcgtgaggcggagccgtccacagatcaacctaggaaggcttcccaggaaggacacactgactcttttccaatcctttgctttttcctgtccttacctccacgcacatacttggaataccatgaattctgaaaccacatttggacataaactcagaacacacccaactcccactgaggtctttccaggctaggtgacattttcccgctgtttgttaatgtctaacctaaaaaaccaggagctgtgactgctccgagttcagagtcctctctactaggtatatatatagtgaggatcctt

SEQ ID NO: 1676 - DNA, 350 bp, Rattus norvegicus
  Genbank Accession No. AI070308
tttttttttttttttttatttgactattctttattatgcacgtcggctcaggccctaagtgtacccggtgaagccgaagttggcgttctccatctcctccttggtgcgtaacccataaagctcgccgatgaggggtggcacccatcgtgtggtatggaacatagactcccccaccttccagttgggcacatctttcatgatgatagcctcctcctccaggttctcccgaagaatctgcagggtcctgcggtccttctctgcctggaggagtggcatgagggcgatcctggcctccaagtcctcgatcagcaggcgcctacgctcccggttccacctcattattctccagt

SEQ ID NO: 1677 - DNA, 408 bp, Rattus norvegicus
  Genbank Accession No. AI070319
tttttttttttttttttcccccacacagggctgcttctcccgtttattgtgccccttagaggacagatgacagtggctgatgaggtggatactcccagctcaaagcttctgccctgcccaacggccctccccatatgttgctgaactggagggctgggttaccatggcaactgtgagacctggaggacagctacagacaggcctagctggggccactgctgctcctgggtttcggttgtggtagtggcggtggtgggtggtaaggctccatctggacctccatctccacctcctccaatccactttcattggccttctagaactgagatgtacaccgctcggctccaaaaagggtctctctctgcacagattaggcaagcaatctaccgctgagctacaacagccctc

SEQ ID NO: 1678 - DNA, 346 bp, Rattus norvegicus
  Genbank Accession No. AI070323
  misc_feature (1)..(346): n = a or c or g or t
cggccgcgttctcgaacttgagcgcgagcgtctcctcgatgatgcggttgttcacctccagcaggatcatggcggcggctgccccgagcaggggaaggagaaacaagggcggtgagggtgggcaagcgagggtaggactgagggagcggccccgctgcccctgacgaggggggctgggtgcggtaggtgaggggagaaggggacggggagcggggtggggagaggcggncacacgcgctggcccggcacgcgctgcccgtanaggcagccaccacccgaccgacctggcccccgaagcttcaacccgcctgccgagccgccgccgcccctcgtgccgaattcttgg

SEQ ID NO: 1679 - DNA, 477 bp, Rattus norvegicus
  Genbank Accession No. AI070336
tttttttttttttttttagggaatcagaatttgtttttatatccctagagttataaacatttgtatcaaaatatttacaattatagtatatgaaatatcctattaatgaagaagccaaatacagtactagaataacccaccaatgcaatgcaaattacatgagacataaatgtcacagaaaagaagtaaaagacaagggaatgcatggttctttctctccagtcataaatcaactttttaacaaaatgtgactatctttttctgttaattttcttatgaacataagacagcctagaacaaatgtatggtggtcaaattataatttaagaattattatagctttcctgaccagtatctctaccatcagctcagcaattaagtaacctacttgaacattcccttaaacataatacactagagaaatatacttagtaatgatccctttacataaataccagcaagtatagcataacaact

SEQ ID NO: 1680 - DNA, 495 bp, Rattus norvegicus
  Genbank Accession No. AI070408
tttttttttttttttttccccatgtaaaacattgctttaagttttaatgtttatttccccaagacagcctagcctgtactctacttgaataaattttacaagctagttttctgctgcttctagttttaaagtttaaccatgttttttgatgacaaggaatgctgcaaaaatactctagttcaacaaagagttatgatcacaaaataatttttatccattctacagtgtttcagaattaccagttgatttttaaacacaaagtagatatagatgctaatggtggctaacctggtatgtttcttatagcaaactgttgttcatgcaacacttgtgctcaaaggggaaggcacaggatttcctacaatgagccaccttataaagagttctttttgtacaaattaatttatgacatatttaatttagtgtgcataacctcaaaactgaggtattattccaatttataaaaaccacttgcataatttttatgcaagtttt

SEQ ID NO: 1681 - DNA, 355 bp, Rattus norvegicus
  Genbank Accession No. AI070411
ttttttttttttttttgtgagaaagacgcgttgagtcactgttaccagaggagcggaacaactctgcagttcagtcagaaactgccaggcagaggtttaacgtaaacaaacaaacaaacaaacaaacaaaaaacaaacgaggccctgagatctgcccagcaccggagaaggcaatgggtgcttggggcctggcaattgtcttctgtagtgagtgattcggggccacctctggcccgaggttccatccaacacaccaccaaacagtgcaacctaagagtacagacgcgggccacgtgggtgcccaacgggaaaagtgcgcagagagacgtgaagtgcaaatctcccatggacagta

SEQ ID NO: 1682 - DNA, 332 bp, Rattus norvegicus
  Genbank Accession No. AI070421
tttttttttttttttttaacgtttcctaatgtctgctttctttgcaactgtgagtggcgatggtcgccagctcagaccaaggcgactgtgcaaacctctgaacgaggttttcctttctgacagaagttggtctatcggggttctttctcaacagacatgatttctagaaacacagcagccatcttgtgactacgaagcaaggagcaatgagattactgagaggaggccccgccctcactgagcattgatacggcactccgttagatataatactgtgttagtcacctgctccaaggttcaggctatgcggataacaagccctcgtgccgaat

SEQ ID NO: 1683 - DNA, 425 bp, Rattus norvegicus
  Genbank Accession No. AI070459
  misc_feature (1)..(425): n = a or c or g or t
cggccgcaaaggttggagtggagcacttgttacgggacatcaaggacactacagtggggactctgtctcagaggatcactaaccaggtccatggtttgaagggactgaactccaagctcctggatatcaggacctacctggagaaggtagccagcggcaagctacccatcaaccaccacatcatataccagctgcaggacgtcttcaacctgctgccggacgccagcctgcaggagttcgtcaaggccttctacctgaagaccaatgaccagatggttgtggtgtacctggcctcgctgatccgctctgtggtcgccttgcataacctcatcaacaacaagattgccaaccgcgatgcggagaagaaagagggacaggagaaggaggagagcannnnaaaaaaaaaaaaaccctcgtgccgaatt

SEQ ID NO: 1684 - DNA, 554 bp, Rattus norvegicus
  Genbank Accession No. AI070511
  misc_feature (1)..(554): n = a or c or g or t
tttttttttttttttttgttggcaaaatattttattgctgccatccctgtttggtggaacactgggggttggaactgggggtgtcacagcatcttctgaaacagggcgatggcctcatccaccttcctgagctccgcctctgtctgttgtaacttcacttcgtcggcctcctggacctcaaggggcacctttgctgagtagccagaggcagcacggcgctcctgcagccgctgagcctgtcgctgtgcctcactccgcttggcctgcagcttgcccagctcccgggctgggtccacgagcccctgcagctgcaggtggatggagcagcggtctgaggccacagccacagcgcagccctgtggtgcaggagcacccagggccaagacggccaccacacccgcactggccagagtctgcacgtaggccgacactgccgaggccaaggcacccgtagcctcatcagctacttccaagaaacagtcgggcctggtccgggtcaggttgtantctgcacgcanggagcgcacagctctagtgatgctcagcgctagctc

SEQ ID NO: 1685 - DNA, 444 bp, Rattus norvegicus
  Genbank Accession No. AI070531
tttttttttttttttttatgtttgaaaatgggtatgttttattgatatcaactataatctaacattttactttcttattagaatacatgacaagcaaaaattagtaatcataattatatgaccataactgagaatatacttgatgctttactctataaattagactaaatattgagttcaacaagcgtgagtccgaataacacacagggaatcccaatgtccaaataagtcatttatattcctcctcagggaaaaacatcataactttcatctcaattcaaatctgcttaaaagtagttctcctgccttatgtactcacagtttctggggcgactttataaaacactgagcataagccacgagctggtgttgaaagcaagccttagacataactggtggaagtttttctaggcacagtgaccttcctctgcctcgtgccgaatt

SEQ ID NO: 1686 - DNA, 435 bp, Rattus norvegicus
  Genbank Accession No. AI070584
  misc_feature (1)..(435): n = a or c or g or t
tttttttttttttttttaaggatgtgaaacacagtttattcttcgtggaaaggttgaacaaggtcaaaaaatgtccttcgagagcactgacccagccccgccctgcaggtttctggggtcagccaagcttcggggctgaagttgctgctttgggctcagccgagggaggcgagcgtggtgccgagcgtgagcagggggagcaggaggctgcgggagggtcgaggggcgggagacatggtccgcggcgtcggggcgtcgggcagtgagggctccgcggcggggcccacgccctggggtcgcgccgctgctctcttgggcgcctttgtcttctaaaggaacggaatgtgattcctagagcgcagtcgccttggaggtgagggaattgctcctggaaatgcctgtttgctcttctcttttccgtnttttgatctttct

SEQ ID NO: 1687 - DNA, 496 bp, Rattus norvegicus
  Genbank Accession No. AI070597
tttttttttttttttttaaagaaacggtgattttattttctgagatggtctcagcctctcaagcatttgaaatccaggcacgtagcagattggccggctgagctgtatgaaatttgttaataaacagaaacagggaaagcgttcgtgtgattcaaagtctaagtgtgttttgaaagggttgagctagatgggaagtaagagttctgtgtgtatttctgttccatcacgggggcagctgctaagggtggggctcagctggaattgcttgcccagaatgctcagatccctgcttcccatcaccagcacagcagggctgactagaagtgtgtgcttctgatcccagcaccggagatggggagccaaggagcatcagatccttccatggtcctacattctgaggacaatgatgacccctcacctgctgcttggtgctcttgttgggtttgacggagtagtggatgtccttcatggctctctcgatgaggataacggtgta

SEQ ID NO: 1688 - DNA, 303 bp, Rattus norvegicus
  Genbank Accession No. AI070621
tttttttttttttttctgaggtccttttatttttttcaaaggacccttttaaaaatttataactacaaaacagtcgccatacattctgccataaataaaaacaaacagtaaggcaggactacataagcaaactgagaacaaatgtttttcagaaagtgtgaaaatgttttacaatcataaagccatccagtttttaaaataaaactgtggaaaacgttcaagtggcacatacaagtcaccctggaaaaggaacaagatgtggcattgttgttttgtactgttatttaaaacctaatcttgctt

SEQ ID NO: 1689 - DNA, 329 bp, Rattus norvegicus
  Genbank Accession No. AI070784
ttttttttttttttcttaggaaggacatttaattggggggaggggaggtatacagattcacaggttcagtctattatcaaggtggaaggaatgtcagtgtccaagcagacatgatgctggagagagttctatatcttgatcagaaggcagccagaagactcttctgccctgggcagagtttaagcatggggtctcaaagcccatcccccctccacagtgacatacttcctcaaaggccacatctactccaaaaaggccatacctcctaacactgccacttgccatgggccaagtatatttaaaccaccgtacctttgaagatcacagta

SEQ ID NO: 1690 - DNA, 491 bp, Rattus norvegicus
  Genbank Accession No. AI070809
tttttttttttttttttggagacaggatcttcctagatagcccaggttggccttgaacttaaaaaatagccacctacttccaccttcagaattccagatcatacaccttccaggcaatgcgtccttggtactgaaaattcctgggccctaaagtagtctgtgcagattccaaggctgtcacatgtcacaatcctggaggaccttaaagcatcctttcccccttggtgctgggagatgctgatgggaaggcaccgactgcctcttcgtcctattttgttttgttttgtttttgacatagtatgagtccacactggccccgagggggtttatgcagcactggagactcaacccaaggccttgtgcatgctaagcaagcactcaagtcactgagccccagccccagctgtctccccatctcccctccccattttctattctcgtctccagtatgcatgccaatggatttgattcctaagcaaatgacctctaga

SEQ ID NO: 1691 - DNA, 428 bp, Rattus norvegicus
  Genbank Accession No. AI070879
tttttttttttttttctcagttctgtcatttattctgatctcttctagcttaaagaaaacaatctgaaaggccaggtgctgttatttgccccaagcatcgacaaacagagcaacagcaaatatacaaagttcaaaaactagtccacaggcactcgcccaatctacagggtgccgttttaatctcaaggtcgaaaactgcttttcccaacaaacagcgttttgccatggatatgtattaggggtagtcagaaagtttaagaatagaacttcagaaagaaacctagaaaggtatcttcatgagaggcaacagtacacttttcacaaggaactaaccttaaaggaaaatgttaataagtgggactaccttaagaattaaggtaaggacggttgtatgggaggagttagagggtggaaagggagaagggatg

SEQ ID NO: 1692 - DNA, 384 bp, Rattus norvegicus
  Genbank Accession No. AI070903
tttttttttttttttctcaagggcagaaaaacatcttcagtgccttttaattcttacaaagtagctggaacatcttggttctccaaggaacactccagaaaggccacaaatcaaactgaaatcatatttgtgaagaggaagaggagaacaatacccagggaaagccaaggacatggtgggatccccctccaagagtagtctccaaggagaagggagagaaacacagggatcagcaactggttaagaggttgaagcgagttccactctaaacacctctggaagagacactgcgagggtcaggccatggcagacagaaggccaggttggacccgtttgaatgatggcttgcccaggaccagcagacatctctgggcatccgaagga

SEQ ID NO: 1693 - DNA, 459 bp, Rattus norvegicus
  Genbank Accession No. AI071023
tttttttttttttttttcacctggatttaattttaatttaatttaatcaccctggaatccatatgacagattctacaatgcagaaccagagatctgactctctgacctccatgtacacatttgcacaggcacacgacataaatataaaaagatataaaaataaatgtaatcatagatgtgttgtttcttacagaatcagtgcaaagtcaggtatggtggtttataacctcctcccatcaagctgaggcaagatgctgccacaaattcaaggctagcctgggctacccacccagttctgcctagaataaatctcatgaacacgaagcccctgagaacagtgagccaaggatggtggtgtcccagtatgatcacagaccacttaacgaccccacgctttgctgacgtccagcctcgtctacatcatccttcactgtgagccagtcaccacagctccgctac

SEQ ID NO: 1694 - DNA, 375 bp, Rattus norvegicus
  Genbank Accession No. AI071137
  misc_feature (1)..(375): n = a or c or g or t
tttttttttttttttttcaacttgctcagtgctttattgaaccaaggccccaacagaggatgcattgggggccttccagcatgaccttttcatatgtagattctgaacccaaaagttgcttaccaaaatacttcactcgatttgtgtgcatacatgtgtacaaggcactgtgcatccatgaccatccaacaaagggcctagactctgtcactagtacagcaacacggaaaaaccatgcatactctggaccagatatggaaagaaggacagagagggacagggagggacagagaaggaccaaaaagtgaagctcagtgactggttcattgcccagcaacaagtgctgaccagcgaggctctanggttcacagcagt

SEQ ID NO: 1695 - DNA, 375 bp, Rattus norvegicus
  Genbank Accession No. AI071155
tttttttttttttttttccacggcttgaagatcttgccaaaacctgagaacttgcttttccttttggtgggaggtgttgtgtcccctgcttccacactgtccatcaccaggcctgggtctccagagggccgctccgcttcttcaactgcatctggatttaccggtctggagacatcagcttgccccatgattataattgtcttagatgtgtcccacgacaacaaactctttctggcaaaagcaaacgtctcttaaaaagataaatccatgtaagggaccagcaatcctgtatcactgccaaatgccaggaaacagcgtgagatctggagtttctgttttgccggccaccaggtacgtgtggctctcacaaaccct

SEQ ID NO: 1696 - DNA, 472 bp, Rattus norvegicus
  Genbank Accession No. AI071177
tttttttttttttttttacatctcaaatatttttatttctttatagaattacacttcaacaaaatctattgttatacattataccaggacagaaatgggaaatgctaccatgacattaccaggaactgaaagtacccagcacaacaatcttatgcactttgaagcatgttagagaggacgatggcaccattggataatgaactactgaggaaaggagagccctggccaagttacctttggtctcttaaaggctcctgagcactactgagacatgggaactctccattactgagttggtgcagtgtccttctctctagcttcctgatgagatggcatctaaagggtctaaaggttcactcggctcccacaaagagaagggaacacttagctgctgcccctctctataggcacgaccgtgcagcacttcactgcccgctgaactactagcattagaagtactcctcgtgccgaa

SEQ ID NO: 1697 - DNA, 555 bp, Rattus norvegicus
  Genbank Accession No. AI071185
  misc_feature (1)..(555): n = a or c or g or t
tttttttttttttttttgttttaatttggactttattgaaacagcaaaaacataactaatgttttgtggattgttttttaaacaaaattgaaatgaaaaacatcacaaataaatgtcattaacatttctggtgagaaatccagtgacaggaaaacataaacaatactgagcaaagtcttctcccacctagactattcaagatactgcctggtcctgggttgggtttagccatgttttctaacaaaggcttctattctgtaaagagaagattggacagcttgtgtagaacattcatggttactattactatatgttctgtggccacatgcacttaacagccacacatgtgcacaaagtcatcattcctattaggcttagctaacaacaagaaaaaagaatacctttccaccttgttctgcaatgtgacaagcgttaagaagagggaaccaatgtatgtgttcagccattccatatagtcattcctttatggcactttccaggagttaattaaaggagcgccaagatctgcangaattcaagccttacctaaaaata

SEQ ID NO: 1698 - DNA, 519 bp, Rattus norvegicus
  Genbank Accession No. AI071194
  misc_feature (1)..(519): n = a or c or g or t
cggccgcttggtggccctctcgtccctagtgctggtcctgccaaggtgccgggctgaatagttggacagtgggtcatactctagatctgttgatggctttgagctatccaccacgtatttgccaccgcgacgaggctggcccacagccttggggacatactccagggcaccagcgcctcctgcagctctgctctgacccctgtctgaaggggcaagtgagtacttgtgccctggctcggcagggacagccaatggggtgggctggtaggcagcgtccgggctcagcaggccgcctggcgtataagtcagggccaaggagaaggtgtcatcatcatccatgcttgtggcanggctgcaaggggccagtgctgaagccccagcaccgtggccccgtgcagtctccaggagctcctggtagcgcctctgctccagctccacctcgccacgcacagcctcgatggcctggttgaccagctccaactccagcatgccatcgccctgacccagagcaccattctc

SEQ ID NO: 1699 - DNA, 293 bp, Rattus norvegicus
  Genbank Accession No. AI071197
tttttttttttatttttgatagaaaagaaatgctatttggaatacacatttgtggagaaagcataatcttatttttaaaaatactttgctttttttggaagacaaactcttgctatgttgtccagatcggccaggaactcttggattcatgcgtcccccctcctgtctcaaacttccacctctgagggactcaggcacatgccaccatatctggctccatttttaacagtcagacaagacaaagcccctcctgtcgaggctgacagggcgacccagaaggaagaagagtctca

SEQ ID NO: 1700 - DNA, 429 bp, Rattus norvegicus
  Genbank Accession No. AI071230
tttttttttttttttgtgtgaaactcataaaccttttattgatatgcttatcatgccaaaaacattgtttattgaagattcagattccacttgagaaagaggcaaacaaatgagagttgaaatcccatcctttccccccaggagagatcccttgtccacgagaaaaaaaaaccataacctacatctacttgattggatccctcagaagtgcattctgggaaatttctcctagagctcccttgtaggataccagtgtgtctttagttggctgcagctaggaacaataaatccattctaagatttcttagaatacctctgggtttgaaactactgaacctcaaagatctaccacaactcgacctagaatatgcatcacttgctggctgtggcatccgccccatacgatggcttcagtctcccctcgtgccg

SEQ ID NO: 1701 - DNA, 419 bp, Rattus norvegicus
  Genbank Accession No. AI071240
tttttttttttttttttagcaatggaaatattgtttatggttgggggtcgctacagcatgaggcactgtatgcgggtcccagtattagcgaggttgaggaccaccggcataaaagaaggaataagcaggacagtcaaccaggaatggtaagaaaccttctgacgccatgttgagtaagtgctagcggtaggataagtgatattctcaggtccaacttcccaataaagcctagaaggggaagccaggaaatagatgaagaaaatccaaagcttgcaggtgacacctggctgccactaggctcagtgacagaggtgtccttgaaatgggtaggtttcattcccagggtctatgaaggaaaaaaataaacaaattgggaagtccgaatgtctttttcttttcagtttcatttttttctttct

SEQ ID NO: 1702 - DNA, 547 bp, Rattus norvegicus
  Genbank Accession No. AI071251
  misc_feature (1)..(547): n = a or c or g or t
tttttttttttttttttaaatttttcagcttgtttgggctttttcttttaataagataacatgataaataaacctgcttctgtacagctatttaatatttcagaaatacgtacatgttacatgccaagaaacgaccctggttttcttgtgagaaacaaggtgagaccataattggaaaaggaaaaccccacaaatgagaaaaaccaacaaagaaaacaagatcaccaatacacaactaactacagttctgtaactacaccgctagccgcgcataacacgagtctcaaaggaggggagtgcggagggacacacttgaaggcaggaggcccctgtcccctcaaactgaatgagaaaaacaaagtcaacaacaagtcaacattgcttaaaccagtggccacacagtaaaaactgtacattgttgtccattcatttaaaagcaaagtcactaggatgattaanaaaaaaaaagtgagaactggtgcctttgaactttctgatgatgaacacttttactcagagtttgacaattatctccactctccctgca

SEQ ID NO: 1703 - DNA, 442 bp, Rattus norvegicus
  Genbank Accession No. AI071285
tttttttttttttttttaaacaattgtttaagaagtttaaggaggagactgtgggaggaaggaagaggtccagagtctacaagatgggctgtaagatgctcagatgaggcaactccttctcttcctctttgttcatgcccactccctgttctcttccagcctttccctgtaatggtcttaaggtggggactggggttgcctgagttctatgaggtctctttcctaccaggggcacctttctcacgaagaagcaggaccaggcagcccggaaaataatgaggttcctgcggcgctgccgacacaggttctagccccttacctctctggatctctgtctgccctgtcaccttttctggttcatcaatctcctctgactcatctctgtctctccgcagaatgagggaactgaagcagaaccaagagctggaggggctgccccagc

SEQ ID NO: 1704 - DNA, 295 bp, Rattus norvegicus
  Genbank Accession No. AI071481
tttttttttttttttgtgtccgagcctgtggagcgattaaaccgtgcgcggagctgcttctttggcggcagcggcgacagcagtagccagtgcaggcacgcggagctggccggggacgccaggtggccggagcggtggagcggcggcggagcgggcgccgcggggggtgtggcgcgaagaatgaccacaaatctagaaccaaagaacatgatgcactagcaggcagacttgaagctagggaccggagatctgggttctgttgtccttcctcaaactgattttgcagccacggaga

SEQ ID NO: 1705 - DNA, 515 bp, Rattus norvegicus
  Genbank Accession No. AI071509
tttttttttttttttttgtgagcacaagggtaaaagcaaagaccaacaatgaatttgcagcatgtggagttcacaatgcttaatgaacaggaacaacttggctcttcagaatgaatcaattaggtgaatgggtaaaaggtaagtaaaacatatggaagtttccctatgcctggtctttcttgaaccagtcatatttacaaattgaaatgtttatgaaacaaggcaactccccatgtggcatgggagacaatgcaggagatagagctcctgctacaacttcctctagtaattaggaagctatgtgtctctgttagaaggatgttaacaagctcctgcagtttccactctagcaagaaatcaaagagacccaaagcagacagctcgcttcagtaaaaggattatgaagtctggttattaaggcacagacagaatgcttgaccacagttctctttctgaagagactttctaaaacaattagcttctagggccagcaggatttgctaactgaagagcaa

SEQ ID NO: 1706 - DNA, 510 bp, Rattus norvegicus
  Genbank Accession No. AI071538
  misc_feature (1)..(510): n = a or c or g or t
tttttttttttttttttgggattttaaggttagttctctttaacagtctgagctcttcttttctatgaagaactcatctgaaaccagcacatttgacatggtctgggacatacactgtggtttgaaaaaaataaaaggatgattcagttatgtactaatatggtcaatctgcttgtgagaaagattctctcgggagaacacagtgctgtctgcccttcaagtgtggcactggtacaagtggcgacagcacgctgggacttctctgacgttgctacgcattcttcctgtcccagttgtcctggctgtttcctgagctggggcaggagcattctgcaagacagcccccagaagggaggagtaccttcgatgttggggcttttttacttttaacgggacacagaatggtttgtggggcanggaatcaaataggaaactgttttcttggcaaacatagttcattaacacatttaacattaaaactgcaccaagcgctggggacgtagctccaca

SEQ ID NO: 1707 - DNA, 520 bp, Rattus norvegicus
  Genbank Accession No. AI071563
tttttttttttttttttaaatttttttgcttttttaccagtactaggaattgaacctgagatcccacacatgaccgagggaaagagtgaactctctgacctcctatcacagaccaaagacattgcaggtagacttctagaaagaaaccaaaaaggagtgggtatagtagccttagcctgctcttctcaacagagcagaactcaggagggagcctactgcagtgcctacatggtcgatggtgattgtgtcctttgtcagcacaatgacgtcactttcttctaagtttcctgtagagatcatctgattagaaattggcctattttacttgttctatttcaggagaccagttagctttcgtgtttatttctgagcgacagattctgaacagctaaaaataaagtttttcgttcctaaataatttctcatcagatttttgtgtgtgagtcatatcaggctacattattcttcttgcaaattatccccagatcttaggggcctagaacaataaagctttatttcc

SEQ ID NO: 1708 - DNA, 456 bp, Rattus norvegicus
  Genbank Accession No. AI071566
tttttttttttttttttaagaaaagaaggcttatctttattatttttaattacatataggtatgtgtatctgtgtatgagtgcattgcctacagaggtcagaggtgtcaaaaaacctacagctgaagttatagatagtgtgagtcttctgacatgggcactgggtctcctggaagagcagcaaaagttcttaactactgagccatcttgtcccagccgtccctgggacaaaagtcttcaaacccattccagcctggctattctgcggtgttctctacacagcctttccagcgcagggacagggcctcaatcgtgtcccgcagcatctgtgtccagtcatctcctctccgcattggggtacagcgtgtctccttgtgctccagggccaagatctctgcgggggtctcaggagtcagcccagccgcctggactgcttctgggaatttgactgctgaag

SEQ ID NO: 1709 - DNA, 498 bp, Rattus norvegicus
  Genbank Accession No. AI071578
tttttttttttttttttaccctaaagcttgcatatttattgaacaaatacgactaaaatagctaaaatacattgggtacttatggaaggaccacatgttacaaaagcctgcgttttcagcagcgtacaactgcaactctacgtaaatgccacaaatgcacaataccgtttccttgctctatttacatagctgatatatctaccctaacagaggtgggggtagggaggatgcacaagaaactcaggccagaggggaagcaagagagaatgagagggacagtgcatgcgtcattggtgtctaacagtcagaagcgcaaacagttcagaacaaggcctgccctgtcaaaggaagagctaaagacgttatataaaaattaaggtgggctttcagtccggctaacacaacaacattccgtgaagagacggcattgtcagattttatttttgtttatccatttcattgggagcaaggacaaaaatgtaaaatctataccttgct

SEQ ID NO: 1710 - DNA, 346 bp, Rattus norvegicus
  Genbank Accession No. AI071727
tttttttttttttttttaatatttctagaggtatagatagagcattggtttatttctaaatcacaggtttacagatatttgcatctcattgtctttaaaataaaacggttaggctatctgaaggtgatactcttatcccctactcctttcagaaacttcttctcatcacgtggtagcaaagccagaccacaatgactctcagctcccaggttgtctgtttctttgtttcttgcttcttttagataataaatgcattagtgcacagggaagaatatttttggctcaattcagggaagatatttctcttatgagaaggagtttctctaacttttctcctttgtaaatt

SEQ ID NO: 1711 - DNA, 232 bp, Rattus norvegicus
  Genbank Accession No. AI071749
tttttttttttttttttaagaggaccaacttctgagagtatcaactcattattaaactctgggggcatatagttcaggggtaaagtgcttgcctgacacgcctaagtcccctgggttccacttttcaggactacaaaactactattcacctaaaaacttagtggccacaggacaggacctaccttttgtgtaggcaccagaactctctgcggtgcggtttcatctgctgcca

SEQ ID NO: 1712 - DNA, 285 bp, Rattus norvegicus
  Genbank Accession No. AI071773
  misc_feature (1)..(285): n = a or c or g or t
tttttttttttttttttncccccaaaagaaacaatttatttagaataaaacaaaagcagctcaactgtgagcccatgtttgagtgacagctacttttaagctgtgtgagccataaaaagggtttttctttacttttccagaaatcttgtgtacacagcacaaagcaaagaggtcatttttccacttaaaacaccggcattggcatcacaatagcagatacacaatgttaagctgccattttagtaaaatgcacaaaatactaaacagattagctttcttccatca

SEQ ID NO: 1713 - DNA, 334 bp, Rattus norvegicus
  Genbank Accession No. AI071867
tttttttttttttttttgaagattaacagttgactacctctctaatgtcttgcttgccaccctcccaagtaccaaggccttgcccttaggggcccaatgctctgtggttcccttctataactcccaagatgtacttgtaggttggaatgttccagaggccctgccacttatatgtcttcaaggacagccactcgagggtcttcatgccacagtagatgcccagcccgttgcagaggagtacgtccatgatccaatggtcccaccagcactcgctgaagttgggtagctggtgctccaggctgtactccaggaactcgaacatcacactgatgat

SEQ ID NO: 1714 - DNA, 443 bp, Rattus norvegicus
  Genbank Accession No. AI071886
  misc_feature (1)..(443): n = a or c or g or t
tttttttttttttttttagcaaggattattgtttcaagtttattcatatagtcctatggttcaagaactacagagagttgaattcactaaactgtggaagctcccagagaggacttaggaatccgtgcgacatggaaaagagccagagtcatgtccttctacactggaggaagacactgtcaatcttctgccaaggaggctcctggtaggtcgccatctcccagggactgtagaggaggggaggggccaaccatcttgaagactggaaggcatcatttttctgtaatttttttggttttgtttttgattctatgttgcttccgggactttccaactcataaatcccgactgcaaattacaggactttgaatgcttacaaatgcactttggaaaggcagtggaggcaacatagaatcaanananaaaaaaaaaacctcgtgccg

SEQ ID NO: 1715 - DNA, 385 bp, Rattus norvegicus
  Genbank Accession No. AI071895
  misc_feature (1)..(385): n = a or c or g or t
tttttttttttttttttagaggaggatgagcacgtgacacgtgctttctttttggctgtcatcagggttttccctgagcattcagaaaaggcagtgggtaactttttgttttgtttttgaacaggctacctatgtcaaaagggatgttcctttgtgggaaaaacgtggacagagcttctgaagcacacgagagaagcccataaaggtgaggcaggcaggagctgtggaagagcggacggtgtgctttgggaggctgagatacatgcttgggccggaaaggaaggggttctgcatcgagttctgtgtantgctggcaggcgagggagccctgcaggcctcggctggtgctgctgtgccctggctttcctgaggccctgcaggactt

SEQ ID NO: 1716 - DNA, 376 bp, Rattus norvegicus
  Genbank Accession No. AI071934
tttttttttttttttttagactttacagaatatcattctttaataatagggctgaagcattgaaatcatcccttgatctgtggggctgtagagtggttattacatttccagatacagaaacaatctctccatgcagctccaccctgataaatgaccaggaaaattatcagcgagcagtatagattttgaaaataacctcccggccccgattttcaaatatcaaaaaaaggtgcctgatatattcaataatccatgctgtatccaggcaggctgtccccacacctggttgttctgttcagaaagcacaggcagggtaagtgtaacaacgttcttaagggttccagaaccttcagagtaatacctcctgaggagcatt

SEQ ID NO: 1717 - DNA, 334 bp, Rattus norvegicus
  Genbank Accession No. AI071958
tttttttttttttttttgcataaatgtgcttttatatttttttatgtaattaatcttctgtgacattattttcttctcctattggtgctgatatttgagcccagggtctttggcatgcttgtcgatcattctacctttgggcatctgacacagacagtggctcagacttgggccctatgcatccacgatgtaaagaggcaaaggaactgtcccaaagaggaaggaagctctgggtaagttgagtacggtgtgtagggaaattgttgggcggcttgggtaccagttaagtcgcagggaggtggtgggtagacagatgtgcttgccttgtggtcca

SEQ ID NO: 1718 - DNA, 431 bp, Rattus norvegicus
  Genbank Accession No. AI071989
ttttttttttttttttgataaaaacatttttaatgaaacagaatacatgttttttttttttgaacaaaaggaatgattataagaattaatctctagcctatgggatacggtgatttctatgcggctcacggcgacagcgaggcccaggcaactcacttcttgcacggataaagctgcactgtgaccagttgtttcactgagttctgcgggtgggtggggtcacacaggtgaagtctccagatgggaggtagatttctaacaccttccactcgggcgcacagaagctcatttggttctgaagcactcatggaggtgtacgcctagctgtagctctcagcctcgaagcccagacccgaacagagggtctggaacgaatgaatggggccttgtcatcacgaacgaaatttcctggctcaagggtctctgactga

SEQ ID NO: 1719 - DNA, 362 bp, Rattus norvegicus
  Genbank Accession No. AI072014
  misc_feature (1)..(362): n = a or c or g or t
tttttttttttttttttcagatttttaaaggatttttatactatattaaaaaaacacaaaataaaaaagggatccatcaacatatatcttagaagtccatccaagagtttcagtgtccagcagccatggaggctgacgcctgtgccattgctcagtctgcagctcgtgtaaggatcaaggaggtgactttaagttacaatcacacttgctctgctagatccaagaccctgaatttatccaaattgtagaaacaggctttaaccacccgtccaccaaaatacctcccattcagatcgacaacagctttaattgccgattcgactctctcanattctagaaatatccgtactgcttcatcatca

SEQ ID NO: 1720 - DNA, 429 bp, Rattus norvegicus
  Genbank Accession No. AI072034
tttttttttttttttttggaggccattcaaattgtttattccctagctctgactgcacacaccacctacaggtcgccaagtcccaggctcaaaaacgaaggcactgtgtcagagttaaggcccaggtggctctcagggatttgcctacatatcactatggcaacgggaaaacactcctgttaatgaccactaggactctgggcttccacgcagagttctctgagtacagagtaccaggcaagagcccttggctgtagtgtaaccattttgggtagccaggggttatgaggcacagaaatgccaaaccggtacctacccaaaggatagaacccccagaaggacgacggcattgctgagtctaattctgggaaacgatgggataggctcaagaaagcaccccaaagttgatcagggacccacagttgcaca

SEQ ID NO: 1721 - DNA, 381 bp, Rattus norvegicus
  Genbank Accession No. AI072035
cggccgcctcctcgagcgccaagaggcggcggctcagtggtgggcggctgggctctaccgcgcgctgccagcagtcatcggcacactcggggcatgggaagggcccgtcctcctcggcccagaagcgcaccacgcacgcccggcagaaacgatggagataggggtctgtccaggatgaagagatgccaggcagaggcctaagggatgtaggtaggggtgctgcaggccagctgtggaaggtggttccttttgcctcgagctccagggggccagcctgctgcgccagcgtcatcactgcagaagcatgctaaggcccaggttacggtgcttcttctccagctctgacaccgcctgcagcagcgaccggaagccctcgtgccg

SEQ ID NO: 1722 - DNA, 210 bp, Rattus norvegicus
  Genbank Accession No. AI072081
tttttttttttttttttagaacaaatttttattgtgaatgctggtctggtcagtccatggccacagggcagtggtaactagaaacagctggagggacacggagggagggaaggaagagcaatcaggagcagaggacaaaagagacttgggaggggaggcggggctgtatagggccacagccagctgcctatttgtcttggcctcgtgccg

SEQ ID NO: 1723 - DNA, 419 bp, Rattus norvegicus
  Genbank Accession No. AI072107
tttttttttttttttttgctaaagaaaatgattcttttatttttcagaaaggagaaataaatagtttttgcttccttgcttgtagattcagtagaagcagaattgctcataagcatggattagagtgatatataatcatccctttttgagaggacccatcctctatactcttttcatgcagtgacttctggcataaagcacaacacagacctccatgttaatattcatccaaaaatggaaaatcagggtggccctggaatctagaaccactcatgtaacggatatttttatttaggccatcaaggactttcatgtcttctgaagtcaactgaaattcaaaaacctgcatattctcttttatcctcttctcagtgaaactcttagccaggaccacaaccccacgctccagctgataacga

SEQ ID NO: 1724 - DNA, 302 bp, Rattus norvegicus
  Genbank Accession No. AI072121
tttttttttttttttttacaactggatcaacacttggtaacactttaatagccaattccaagttcttggcactaacatttccttcacctcccccaaatctgacaagacactcacgctgcacgagcctctcccctgtagacagacacatgactgcaggacggcaggcaacagaccttggcttcccgtatcgagccactctccactccgacagaccgacagaccggccgtctccatgtgtcccccctgctcgtacccggtgcttctcctgacacctgcagcttccagctcgctccgtcctcttt

SEQ ID NO: 1725 - DNA, 380 bp, Rattus norvegicus
  Genbank Accession No. AI072214
  misc_feature (1)..(380): n = a or c or g or t
tttttttttttttttttaagagctagtcgagtgatttattactaaatgtttttaccaccagagggtgatccacattgtattccttggctttgtatgtcttcactaaacctgaaattgggtaagacatgccatggcacagatgaacaccggcgtttccgaagccaatgttggcaaccacctggcaaggcatgtggagagtatgcaggggatcaaccagccccagggtttctgacagccctcttcagatatttggcaacgatgcgcagtgcatggactgcccagatgtcactgattgggttgctaccctggtatgctggtcgttggatgggattggaagggcaggggctcctcatgctgtanggaatggcggtgtatgactc

SEQ ID NO: 1726 - DNA, 346 bp, Rattus norvegicus
  Genbank Accession No. AI072278
tttttttttttttttttaaagttttccatgggcacatttatttcttgagaggtcagtaaagttgcagccatgtctcactgcatggcatcctgcaccactcatgtctgttgtaacaaacacaatcattttcacagatgccagttgtcacacaccagcttcaggctcaccacatacctgggaagcctttgcttttattctccttgccatagagatttgacatgacagtgggcagaaagctgcagcttacagcccgagggataatcttcattccactatcagcacagtgagccaggcagcttggtgatcccaaaacttatttatacgcagaacacggacattttgcgta

SEQ ID NO: 1727 - DNA, 423 bp, Rattus norvegicus
  Genbank Accession No. AI072308
tttttttttttttttttcccaaaactcagctttatttgcctccattttcccacagtctgagctcagctcatctggctttgatgggtctcagaggcccagtgttacagaggccggtcacagcctgctccaccaatccccttgctggccttgggctccccaggcaggaggacaggtggctcatggaggatgaattgatgataagaaagagtgggcgtagaaacagagcggaaagcaccagcccccgggctgaaggagaaagacgaggaggagaaatcagagttgccaggaaaggaggaagagaaagtaaagaaagggccggtgagtcgggaaccctggttctgaagctccgagaaggcacccaagtcatcaaagagctccgaaaaagggtctccactcccgaagaactcccgggagacttcctca

SEQ ID NO: 1728 - DNA, 298 bp, Rattus norvegicus
  Genbank Accession No. AI072358
  misc_feature (1)..(298): n = a or c or g or t
cggccgcggagagttctggctgcgggcggttgagtccgcatcatttattcatcttgggtgtcaggttcccgggacgccacctgcgccatcactactggggtgagggtangtgtgggtggcaccccgcctaggctatcagacttttagaccttctactccatcccaagggcactgacgtggtggggagcaaggagggagaaagggaaaggtttatgggtaggctcttgaccaacatattcccccagcccctgacccttctcccttgggcctcagtttctccctcgtgccgaattcttgg

SEQ ID NO: 1729 - DNA, 412 bp, Rattus norvegicus
  Genbank Accession No. AI072380
tttttttttttttttttgacttaagaacaaaatagcatgtcagcaggtagtgagaagtaagagggtacgtttttaaaggggacagagatatctaaggatgtgctagtttctttgtttcttttggagaagggtggtactaggacttgaacccagggctgcccacactaggcatgcacaataccactcactgagctaacggctcaccccaccacccaagtcccttccacatacggtcagagaatcctcattaagacggagacaaagggagtggccaaaagagtaaaaaaccaagacccaaagaaactattatccttggtgcccatagaggtcagaaatccaagtccttttaccatccagaaacagacaaagtgagtggtaaatttgtatctgtggagtcatctcctataacgat

SEQ ID NO: 1730 - DNA, 432 bp, Rattus norvegicus
  Genbank Accession No. AI072393
tttttttttttttttttactagagtaagacgtaagaaaatatatttattttttcatgacaatactatgataaaattgttaaatacatgcatgttttaaaaacagacataggtaacatctttatataattaacagccaagcgatactaattttatatttgcagtgtcttagttataggttatttacataatctatgttcttgtgataatcatgtttcccaaaaggtatggtagctaaattctgaaattatgatataaaaagttcaaatttccaattttaacagcgacgtaacatttcccaaggccggaagtgcccctgctgtcagtctctgtgagtgctgttttattccacgctcaacccagagtcgtttgagttggggtgaatcacagagacacacacatcaatctcatttacttcctgtgtgtgcgccttg

SEQ ID NO: 1731 - DNA, 371 bp, Rattus norvegicus
  Genbank Accession No. AI072402
tttttttttttttttttcatagctgggtaagaatgtttattactttacatccatgatatcatacatagaaagtgtcatggagatgccaattgtcctgaaggagctgcttgacaaagtttcagtgcttggtcaacaactggaagacacttcactgccattggtggaaatctgcttaataccttttgttatatttctcactgtagcctctctccgaaagctagagccaggaatacaaggttgctgtaattctccagcatcaattccctgtacagattccactgagcaggctccaggcattcccactgctctacagagaaatcaatggccacttccctgaatgacagcatttccttcatgtcagagagcccact

SEQ ID NO: 1732 - DNA, 384 bp, Rattus norvegicus
  Genbank Accession No. AI072403
  misc_feature (1)..(384): n = a or c or g or t
tttttttttttttttgtggaccaagtctttattagtactgaagcctgagggaatggtattagggttcacactttggacacttgctgagttgagttcaacaaaagcctcaccactctgcctgccttctctagtataaatgaaatgaacacctgcgaccccatcatgaattgtgcagtcggagaggaagttttgtacgtcctcaattgagcaggaccagggtaggccacggagtttgaccacatagccttcacctccctcagggcccagcatcatggacacttgacagggttgatgtcacacaagcttgggcaattttttgtagcttaaagaaccaccacagatgccttctgtangaaacacagaatggaagataacaagttttcc

SEQ ID NO: 1733 - DNA, 390 bp, Rattus norvegicus
  Genbank Accession No. AI072485
tttttttttttttttttccaagttctcatttaatcatgattagaaacaggcagtctgggtgggtaacccaacccatacatataaatacatagaaatgtatgttaagcgttcatggtatttaaatgaaaacagtttgcagggtgatagtgcatgcctctgatctaagcacccatgaggcagaggcacatggacctctgagttctggaaagccagagctgcattagagaatccctgtctccaaaacaagacatttcatataaatctacattttcagacttttagaagaggcactccttgaaacattcctccatcctgattcctcttcccaccatcctttaggtggccaagttgccggacaccaggattatattttttggacagaagtttcac

SEQ ID NO: 1734 - DNA, 144 bp, Rattus norvegicus
  Genbank Accession No. AI072559
tttttttttttttttgaagtggcataatatagaagtctgcacataacatttacgttcaggatggcagtagcactccaatatagattacgctagaaaactttggacttcaactgccgctgcgtgtctgggctcttccttaactgg

SEQ ID NO: 1735 - DNA, 369 bp, Rattus norvegicus
  Genbank Accession No. AI072603
tttttttttttttttttcaaaaaacacgctagtcattaaagggcagcagatactactgagggccacagccaggaaggcagcgggtccagaggaactgccccaagcaggaaccaaagggagccccacctgcaccttcacaaacaaggcaggagctccaggagcggccaaggggcgctgtggaggagaggcagccggctttcttccctatctttagcctatttctcttccttgaacatgttttaggacaataaatttcaaaatacataccaattaaaatatcacacaccagtccttttactttatcaaaatgcctacaagaccagatgacctgaaagcctgaggtgagacagcaaggacaaaatcctttac

SEQ ID NO: 1736 - DNA, 352 bp, Rattus norvegicus
  Genbank Accession No. AI072633
tttttttttttttttttcacctttgttgtttaataaggaacaacagaaactcctctatttttcacagcatcacaaaatgatggcaatgcctacctcctggctcctgagttgtcaccttggccagcctcctagcagcagtccagtagagcaggggttggaggcacccttgccctcccactgagaattcctgcagcaatccttcaatggcaacaactgtccctgctcaagtctcccatctttatcctcagctgccttttcccttcaaagagcaggatgctcgcagccatggctgaattcagactgtccacaccaggtacaacagggatcagcagtctcttgccaccagtactct

SEQ ID NO: 1737 - DNA, 333 bp, Rattus norvegicus
  Genbank Accession No. AI072634
tttttttttttttttttggagtctaaacttttattggtccctcagtccccaaggggttcccttcttctgagccttagtgcctcagaactctggtatcattggtctcggacaccactttgccatccacgaccttacgggtagttgtcctctggacagtttgcatggagttgctggagtccagggcgtcgttgagactgaaatcgtccccatcctccaacaagcggcggtaggtggcaatctccgcctcaagcttgaccttgatgttcaacagggcttcgtattcctgggtctggcgctgtccttctgcccgagtttgtgccagctctgattcca

SEQ ID NO: 1738 - DNA, 359 bp, Rattus norvegicus
  Genbank Accession No. AI072643
tttttttttttttttttcattgatttactttaaatttattgagtgtatcgggaaagagggaaaatgggtcaaggagggagagagggatatcttttcctccaaatcggctggtatgtagtctcagtgcgtcagaaaaaagactgcttctggcctcctttctgattaccccaaggcagtctggtcaccgtggaggcttatttaaaactggaaaaagaggtcctttgtgacatcctgctgccattcaagatgtcttcttgaataagccctaaagtcactcactttctctgtgtgttccctgttccactctcactcactacagtctagtctttacatggcaggtagcaagaataaccttaaat

SEQ ID NO: 1739 - DNA, 468 bp, Rattus norvegicus
  Genbank Accession No. AI072658
  misc_feature (1)..(468): n = a or c or g or t
tttttttttttttttttgaagcttttaaacccttttattttttattttttttaaataaatgacaaaacttttgattgattcctaaccgcccagctccctcatcagacatttgggggctggagtttggcactgcaggagtgtaggaaggaatggagccctagcagtatagcctgggattagtcctctccctcagagcataaggtggcctgtgtcaggaaagactggactaatgtttatgtgccacacaccaaggcaaacctcctggccaataatgtgtccaagctggatgcccaccttacggatgagggagggtggccggcttccaggagctttgggcctggacccatagacccattgccaacaagagtcatgtgcaggattagaacccagagctttatangggtagctacgtcncggaccccagagactatacacagggctttttagtgttgggtttctgttctctct

SEQ ID NO: 1740 - DNA, 386 bp, Rattus norvegicus
  Genbank Accession No. AI072667
tttttttttttttttttccgttgaaaaagaataattttattctttagtctaaaacaatatacataggcttctgaatcatacataatttcaaaacgctacaaataggagaagaagaaggcacttctgctcatgttttgaaggggcgagatctcggactgagagtttccatgcttccatactcagggagtgtctgagctcgtagccatgatggagcgcagagaagaagttctttctccactgtgcctctttccagagggacctgcattcaacttcttgctaaccacaggcggggcagccaggagcagcaacaggataggcagcaggagcgccaagaaccttggggcagtctctgagtgcatgatgggcgacggtccctggtgttttca

SEQ ID NO: 1741 - DNA, 283 bp, Rattus norvegicus
  Genbank Accession No. AI072706
tttttttttttttttttccaaaaacaaatcccagggctttctccttttattgtagcatcttcctgacctggggcatccttagcccaggcttgaagaggtaggcttgactgtgatcagccccttgaagaatttcactgggttcggtcctgcttgctcttttgtgcagatcggcactgccaggttcctctacagaccatctcgctgcgcaacgcatagttgatggcgttgattgtgggcatggttttcgcaatgagggcaggcacatctgcgacagcggcatata

SEQ ID NO: 1742 - DNA, 434 bp, Rattus norvegicus
  Genbank Accession No. AI072712
tttttttttttttttttgggaagcaactgcttttatttgacagtggatgaggaggagatgggtgtcagaagagatggggagcattttctgtcctacgactaaatgacatgaatttactgtacaatgacagtgtacatggctagggtaagtagcgtcaccaaagattagttctctcgcttacactaagtaggcacgcacatcccaccccagcaccgacttcacagtcagctgtaaagagtggcatttcactggatgcctcgagagacagttctgttggagtatttgagtttaaagactttgaaaggaaagagaatttggctgaaaagtatccttttctttagttaaatcgaaacaagtctccagtcagcacccagtcaaacacagtgccttgaactttgggtaatttgtcggacagtatactccacgccactgtg

SEQ ID NO: 1743 - DNA, 307 bp, Rattus norvegicus
  Genbank Accession No. AI072733
tttttttttttttttttgccacctgctgttttttatattccttgtgacagacacacacacagctgcacataccgtcggatggctgaggggatggtcgggacaacataggcaatagggattggatagaaaggaaactccacaaaaggcaataaataaataaatacaaacgggaaggagggcaaaggccatggagaagcagtgagaacagccctgggccagtgtagaatgcccagaactgcgtcggctgggacaggagaccagccgcagtggcctcaggtaaacgtctctttgcctttctccttgctct

SEQ ID NO: 1744 - DNA, 281 bp, Rattus norvegicus
  Genbank Accession No. AI072746
ttttttttttttttgttaccaggaaaaaaatttatttaaacccaaaataaaatgacaaaagttaaaaaaaaataaaaattatcaaaaggaaataccaccattggccctaaaacattcaaacggggtcatttttcgggagtcaaaaacatttattaaaaggttatacaggaagcaaaaatacagaagcaacccggctaattaaggaacctgtaaaaggagggtacactaaaatacggtaaaaaccaaaacaggaacacaattttaccaacctgtctaaccaa

SEQ ID NO: 1745 - DNA, 332 bp, Rattus norvegicus
  Genbank Accession No. AI072751
tttttttttttttttttgcataaaacacctttatttagtggccagagcccaatgagtaatgtcagtcttggcttgattctgttatgatgtgctgttacatacactcttaagaaagcagagaagtgcgtcaccgaaagctctttaacttggaagtgtgtaaagtaaaactgtttgtcctttgataaaaatctttaaaatataaaaatgaagaggaggaaagaaaagaaaagaaccccagagcagtttcaaaactagcagacgtcaccctggactatttacagtaagacgcctttttaataagagaataagtctactcgaggctcttctcacac

SEQ ID NO: 1746 - DNA, 326 bp, Rattus norvegicus
  Genbank Accession No. AI072755
tttttttttttttttttggattgatcatacacattctttattgtccccatcccattaaacccggacattgcccgttcctccaacaaccccccccactacagagttgatctcctagccagtaccaatccttgagtcacctaccccgtcacctaccctgtgagagaaagcctattgttctcagttgtacatttctctagaagcagtgacatgggaccctgttgtcctcttccagtgttttctgtgaccagcagagctggcactggagctgagggagggtgtgctcctgcccgagtgtcctcagaggagcccttctaaagtctagagat

SEQ ID NO: 1747 - DNA, 499 bp, Rattus norvegicus
  Genbank Accession No. AI072812
tttttttttttttttttgggagcagtaaacatttattaaatacttcctagacacatcatatacaaaagaggtagccggggcagacgtgagcctgaagaactaacacaccatactaatcactaattctatagtagagaagtacaaagtctgcacaagtaagactttataacagaattttcaatcctgcccgaaggaaaataaactatacatatagttcaatttaaaaaacaaaaacaaaactttaaaagttgtgcttaacatagtggactgctacacagcatcaagtcttagagcactgatgtgctccagggacgacggcctgacagagtgaggacctggagtgctctctgagagctcctcccagaaacgccccagcatctgcagcttgccctcctgtggcgcccactgctctgcagttgactcatatgtcttttgtctgatcgtcttcttcaagctttctgatttcattttttaaacaatttatagtttccctcgtgcc

SEQ ID NO: 1748 - DNA, 388 bp, Rattus norvegicus
  Genbank Accession No. AI072914
  misc_feature (1)..(388): n = a or c or g or t
ttttttttttttttgttagaccagacaaacccttttattacactgttacaacaggggcttccacacagaattatcagagatgactatcggctcttaactgtgtctgctgttggagctttctacctttgtgtctggctgttctgctgcataaactcttcaacaactatgtcctccgatcttgcaggaccagcaaaggggaaaggagagttatcaaacccctctctgggcttcctccacattcttgattctatagaggtaatcacttccctgcttctcagccttcccctccttgccccatggggagggcttgtttcccttctgaatctgtctatacaatggtgtcaaggtgcattanaagggaaacagtgtagcatggggtacagggaaa

SEQ ID NO: 1749 - DNA, 378 bp, Rattus norvegicus
  Genbank Accession No. AI072945
  misc_feature (1)..(378): n = a or c or g or t
tttttttttttttttttctgcaaaactaactctttcactttcctgtcataaaatcgcctctgcaaacacaacttctttacaaaaaaaggtcacaaatgacacagactctcaggaaaacacatttctatggtctctgcaaacacctgtaactggcacccaggtggtggctcacctggggaagggggagggggaaatcncccctggggacagaggcgaaataccagcccttatttgggggaaaagccaattggcacttggacggtatgggagctaacacaggacagggtgggaccggactgtatccctctcaaaccctgtgagagcccctgttttataccctggggcaagggggctggggctgtgctgcanaccctggca

SEQ ID NO: 1750 - DNA, 229 bp, Rattus norvegicus
  Genbank Accession No. AI072965
tttttttttttttttttgctttgtacacaacaatttattgtccagcaaacccccattttcatgtactttacttcaagtatttttatgagcagtagagcgagatagtaaggcgttatcacagggcacgagaggacagcactctttgggaagaagaaaagccttatttcacactaaataacattaggagtggcactgagagccagccctgggctagaatgtcccgggggga

SEQ ID NO: 1751 - DNA, 256 bp, Rattus norvegicus
  Genbank Accession No. AI072998
tttttttttttttttttaaaccaggctttggtaaatccaccccaaaaaaaagcccctaaaaaaggcatttggccaaaatataaaaaagaaaaaaaattaaaacaaaaatggggaaaaactttggaaaaaaaaaaaaggccaaccgggaaaaagccagggtaaaaagcttgggaaccaatgggccaggcaaatttggggcaatttccttaaacaatttgccaaaaggcgaaacggacccaggacaaaatttttaaaa

SEQ ID NO: 1752 - DNA, 314 bp, Rattus norvegicus
  Genbank Accession No. AI073023
tttttttttttttttttaaggttgagaagaagggctttattgtagacatgaaggccagttcagccagaggcgtctgggcaaagtccagatgagggagagagagccgtgggcaaagcgtgaccagctgactgaaccaggccacaggaagagagtcggggagagcaagatgggaaaagagggaagaggagagagggcaagggacccaagagaggagccaagaaccaggaggtccttgtggtcaagaccacaatagagcatgtggtcacaatggcagaagtggggatctgggggactggggcccctgtgctgaagag

SEQ ID NO: 1753 - DNA, 501 bp, Rattus norvegicus
  Genbank Accession No. AI073035
  misc_feature (1)..(501): n = a or c or g or t
tttttttttttttttttcccattttattttatttattgtttattattattttttacaaacaatagatttgctgcaacatgctctggctcttattattgaattaaaaaatttaacacatttcaaaaatatcaaaaatacactataatgagtcttaggactacgatacaacaatgattgcacaaaaaccataagatatgagcccactgtttggatgacgtccactggcaacagtgagaaaacccaatagcgtctgggagaggtgcacgagagttagacataaggagctagtgctgattggctgatcaccaaataacagacagagcagatgtgatgcagctggctccctcggcctaggagtgcttgcccaaccacggggctaagtcaccacctggagggaaagattagcccgccctgnggggtctaaaaggctccacccaaagggaagtaaaaagtaacacaagacagttagttccacagtgacgctgcgaacatcaccggatg

SEQ ID NO: 1754 - DNA, 388 bp, Rattus norvegicus
  Genbank Accession No. AI073039
tttttttttttttttttaaatatggccaccaggccacacacaaccttcagaattccatgatgcagacttttaggcagaccccttccccacttccaagttggaaggaagctgtaggggcagagtcctgagcgggatgagtacagtccactgaacagctgcccgtccatcagaggagagcagggccctccctgctccgggccagctctcctgaagcagggttgccatggacagatgcgaggcactgcagaaagatgctgccaggacagctaataagcagaccatctgcatttgtgttctttcacgatatgactgttctcagtgctcttgacctccacatgccccagcaggtcgggggatgggctgcccacgccaagtcagcagccagttt

SEQ ID NO: 1755 - DNA, 343 bp, Rattus norvegicus
  Genbank Accession No. AI073059
tttttttttttttttttcaacttttagattttattgaccaagctgatcatgttttattgttcagagcctcccagcagggctatgaccaggacccacgccaaggaggctggaagaactgataatgatgagtagcaaagggcaggcaggcctgtgcctgctcacatccaagtggaaacaatgtctctgaggtggggctgtccaggtccagcctgttcaggcttcacagccacacccacatgagggctcttgagtgaggccggcgtagaaaaggcatgggaacagaacctgtagaaaatcccaactaccataaccagcattcattcctacttgaagttaatctctt

SEQ ID NO: 1756 - DNA, 403 bp, Rattus norvegicus
  Genbank Accession No. AI073086
tttttttttttttttttgcagtgatcagtatctttattcatacacgcttgcttccgaactacaatgaatgcatctaacagagcgaatcatgcaaacgaagagtagaggttacacaaatccaaaaaagctaggcgctaatttacatatctacctcacctgctaggtaaccaaacaagcagcggaacagcccctggcttatcagtaaaggcctgttcaggcaacagcttcaaccttcactccttcctccaaaccaatttggggttttgcatgattttttttcaataagagatttaaacacggcgtgtccttcataaaacaaaacagaattcatgtaggaaacgcaactccaaacgcatctgatcatctataaaaggtattctgaaaaaccgtcatagtcaggata

SEQ ID NO: 1757 - DNA, 595 bp, Rattus norvegicus
  Genbank Accession No. AI073092
tttttttttttttttttaacattttaaagaatagtgctttattgaataagttttattcacagaaaaataagctttaatctataacaaatgacagattatagagcagaaagcaattctctctataattttcataatgaaagttttcaggatgaaaagttttcataatgaaagaaaaggtatccattaaaagaaaaaaaaggagtcataaaattatattcacaaatatagtacaatatgacaaagcaattggtcagtcttttgggtaaaggataacaaaaatgcaaaaacagaaattacattatgccgttattacatcaaattaaaaatgcaggtttgttggtaagtatagacagtgaccaaacagtaatcttaaatgtccattaataatacataagcacatagtaaatgccaaacatctgcactcacatctgcaaacttcagtctccaaaagagaactttaacactcaagcattattgtcatactgtttaatttgaaagtatgaacaatggtcctactacagaaattataaagcaccacttaatgtgcagtgaaaatagagtgtaatagaatgaacagttgaaaaacacctgagac

SEQ ID NO: 1758 - DNA, 374 bp, Rattus norvegicus
  Genbank Accession No. AI073105
  misc_feature (1)..(374): n = a or c or g or t
tttttttttttttttttaaggaagagacgttcatgttctctgtacaatacatccatttacagaattggccaatactgtgtacaacatataaatacaggataaaacgttagaggtgcatagagcatacttacagaagcgaaaaggttcactttatacatccaagaatagagttaaaatataaaaataagaaacagactgcttggaaatgtaaaatgactttcacatacacaagtgcatgggtgcccactcccacggaatcaaatgtgacgggtgggtggcaagcaagagtcccctgcanacatctgtacagttgactctgaagtctacagatggcatttccacagcagacagccctatttccagaccccattgtc

SEQ ID NO: 1759 - DNA, 399 bp, Rattus norvegicus
  Genbank Accession No. AI073207
tttttttttttttttttactacaagtaaaatcaagtttcagtcctaaagaacagtcctttgttctctactagcccagaatattattttggcatggtcataataacaaacaaaattaactactatgctaaatgtttgcctttgtgcaaaattaattacatacaattcaatgctagccatacaacatcctacctatgcagcacagttttttccttaaaaaaagaacaaacaaacaaaaacagaaacaaacataccaatgagagcagaagccaaagagaagtggggaagcatgaggagaaactgaggagagagagtccaagaaatcagtaagacataataaatactcatcttgtttttgaaaagtgacttcctcctcatatgaaaacaatgttcgagaacaa

SEQ ID NO: 1760 - DNA, 519 bp, Rattus norvegicus
  Genbank Accession No. AI073239
  misc_feature (1)..(519): n = a or c or g or t
tttttttttttttttttatggttcttaaagtattctttattaagatcattaaaagttgcagaaacaactttatattataaaggcacagggagacagttctgataaaatattcaaattaaacagtaacatacagtacaaaagacaatttaaatgcacatacaaaccccaaatgtttgattcaaaaatatttcactgcgtctattaatgggcaatgattaaaaatatagactgctgctgtataataaatatctgagtgtgagcatctggatagcaaagagaacaaaatacttattgcttttcacatacatatttttccctgtaattttaaattcctaattcttttactagcttctcaaacatctccaaaggtaaaagaaattccacatagtctctcatggtagtcatacctgaagtagccatcactgcctggagagccttacttcttgctctgtaatcacaaccacagtcactcaccanaaaaatgatgtttgtgggaccacagacagctctcctgtgagt

SEQ ID NO: 1761 - DNA, 505 bp, Rattus norvegicus
  Genbank Accession No. AI100785
ccttttccaaatgagcaatttattatttgaacagatacataaaaatgattccaatttaaaaaaatactaaaaacatacatcaaccacaaaagcacttactctgactggaggacaatgatcaaggctattttcaatagcaataaacacaaggaaccaacacatacaagtcatgatgcgtatacatcttatccttgacaaagtacgttgttctaacatgaatgctttgttcccagctcctcctgtacattcaccatgaaatctatttgcgtatgtgactcaaaggcactcagttcagaggttataaagtcctgagcttaagtaggaaacagattcccaactaaaatttgaacataaattccaacgatcagagaatatgaaaatgtttaaagatgtttctgtacataaataattcataacgtaagagtacacggaatgccagacaagaccacgcacgtaaggcgaaggaatatcctcagaatcaaactgatttcccttattcaagtta

SEQ ID NO: 1762 - DNA, 476 bp, Rattus norvegicus
  Genbank Accession No. AI100835
acctttatttggactggacacacaagtcagacagtaataaccacagcaatatggcttgtgagcaaaaccagcactgcctcgcacccgctgctctttgtttctgtaaggagagccagtggaacaaacagcgacactcactggacagtcagttaccctcacacatgggaaggacaaatggatgtactgtggagcccagtggtgcaagatgccagagtagggacagacgtgtggaagagcggttcatggagttagcgccagaataactcagagaccaggtgatctgttcaagatagaaatggaggtgccttccttccactgtgacccatttctggcttggactcatgtgggccggagaccatgttaaaggtgctaaagagacaagacactgctcccatttgttggctatcaaggtccagttgaggacttaggtgcgtgcactctaagtcagaagctatccggcttctcagctgtcggtt

SEQ ID NO: 1763 - DNA, 362 bp, Rattus norvegicus
  Genbank Accession No. AI100867
tttcatttcttataaatttattacataatattataataattattattaataataataatataagaaacatagatctctgtggggtgtatcacaacgtcagggtcaggaggcctcaggactggagcagggggttgaaagccccgagatggaactccatacaaaagggggatgaagcggaactgaccctgtaaagttaaaaacccaaactgaacagaaccaaaaacccacaggtaaatgtgagactgtgtatgtggcagtctgttacagtgaccgctgctgtgtgtgtgacctgctctgttggtaagagggttagtgggcgtgactctgagtctaaggaatggggccggtgggccagggtgggg

SEQ ID NO: 1764 - DNA, 451 bp, Rattus norvegicus
  Genbank Accession No. AI100878
gtgggagacctctttaatatgacactcaatctgggtggaggggagagagaccaggagctgggaaggcagacaagtgggtgaactgtaggactgcacctgactccaggaagagtgatgggcagtgagtggggactggtccaggctggtagacccaccaggggatctggaggccagtacctgagatggtgtctaagccaagtagtatctagccaggccagaacatggcctagagaggtaagggtggggcctggttgggggctcccggcacctaggggctggcatcaccaggggcctccccaagctgttgctggaattccaggcgtgtctgccgattggactccagcagctcctggaggcgggcatggaggtggtcgttcttctcctccaggtggtccagacaagagttgatctgatccaacatggagttgatggcagcatactttgcttcccc

SEQ ID NO: 1765 - DNA, 409 bp, Rattus norvegicus
  Genbank Accession No. AI100882
catggcaaaatcaaagtaaactttatttaaaaagctgaagtagctggtgagagtaggggtaggagaggagagaggccctggggtgacacccctcccctcaccccacctagtgccttcttaacggatgtgagcagctggctgggatgaatcaggaaggtggagtctggaccccacagcgcatatttgcaggaacggcaatgtctatctgatgtggcttgggcaagttcaggttgtccatgaccttgataaactcctcacagctgagagtgagccgtgggttcaaagtccgttcctcctccacagtagaaactgtgagcccgtggtaatcatgaccagggtagattagacagttgcctggaagtgtgaagatcttctcgtgcactgagtggtacaaagtcttcgctcaacc

SEQ ID NO: 1766 - DNA, 539 bp, Rattus norvegicus
  Genbank Accession No. AI101003
gggagctagggactgaacccagggccttgcgcttcctaggcaagcactctaccactgagctaaatccccaactcgtgttctctttctttagctaccatatctagcagtttgagaaagactagtgacggcaagctgaaaatgattacgagtcaacttgtcacataattaagttacactgacacattttatagtcttagtttgtgtattgtgaagtgtacatgttaaagcaaatagatatgttttagaaagacttatttcatgtgtgtgagtgtgtgagagtatgtgtgtgtgtgtgtgtgtgtgtgcgtgcatcatgcacatgcctggtgcccgaggaacccagagagaatgctggatcccctggaactggaactaacagccagttgtgagccaccctgtgggtgctgggaactgaaccctggtcttctacaagaacagccagtgctattaacaactgagccatctctctaaccctgtaaaacctttaataaaagaagctgtgattggttgaagtaacagctgaaatgtggaaggaatcg

SEQ ID NO: 1767 - DNA, 498 bp, Rattus norvegicus
  Genbank Accession No. AI101006
ttgctgaccagacccagcgctgggtcctcacagggcatcccctcacacacctcacaacagccctgtgaggtagggttcttcttgtacagtccaacctcagacccctgagacctgcccctagctctcgcagttagtataagcagaacaagggactccaactcttgctttcattgttctagaaaatacaaaagctttggtcccaatttacactaatcttaaattttggggggttttcaaacgcccattccccattgtcttttttttttttttaagtcatcatcctttggttttttgagacagggtctcactctgtaggccaggtttgcccaggactatacactctaggctggcctcaaacttacagcaatcctcctgcctaactgtcctgactgctgggattacaggtgtatgccacacccgattccacaattttctcttaaatttgggactgaccactgctgcaaggcctggggtcagcccttactcgagtgtgcatcc

SEQ ID NO: 1768 - DNA, 401 bp, Rattus norvegicus
  Genbank Accession No. AI101094
atgtaaattaccttgtaagagcattcacagtcaagggaaagaatgcgagggggcgatcagcacggggagtgatcaaacccaaactgtccagctcttcagtaacagccctttcacccagggcctttcccagcgtgcccagcaccgcactgtgcattaagacacagacccactgcgcccataccacaagtaaacaccttcatcctccccagggacagttaatggagcaatcaatgtccaaggggcactaaccatgtctaaaattgtgctcagcaccaggatgagaggaccaacagctctttgtaaagcctgcagtggaaattgcttagcttgattttgcaactaaattcatctttgaaagttttagaaaactgctggggccttagctccatgggctgagtatg

SEQ ID NO: 1769 - DNA, 289 bp, Rattus norvegicus
  Genbank Accession No. AI101099
  misc_feature (1)..(289): n = a or c or g or t
acaccattgtgaggacgcccccacttcaggcgcagcagctgcacttgtccgaagcctctttgcagatgcagccctgggagcacttcgcacagcccacggggcagcaggaacagcagcctgggggaaaaaagttgagcgtgagcgagaaaccgagttagaggcaccctggacgctctgggaaggtgcggcgggctagggaccgcaggggcgcgaagggaaagggtagagaaaataaatccaactcacttttcttgcaggaggtgcatntgcattgtttgcatttgcagga

SEQ ID NO: 1770 - DNA, 538 bp, Rattus norvegicus
  Genbank Accession No. AI101113
tttatttgtcaacgaaggctacacgggatcacttctggttttgtttttatgctttttccccctttttttctagaaggtatctacatctgcatttatttacagccttgttggtatttacacagtcaagaatacagtgttagaaacacaaaagtattgagaaaaaaacttctcaaaattagttccagacttcaggaaaactatttccacatggtaaggccagagtctccagtgttagccatccagaggcagctcacaatcgtcctttgccggagctgcaggttcagaagtcctcagaatgatgggcacatttagaacagtggggttctggtgatgagtggattagagctgctggggaccaccagacatctgtgggtcagcttctcctgggacagctgagtcatccctgaaccatcagcccttagaatcaatcacatttttcttagggactaggaagtagcccggtctcacgcctttggcattccccagagggtaagaaatacaacacggggccccaccaaggccttcgaagcacaacgca

SEQ ID NO: 1771 - DNA, 501 bp, Rattus norvegicus
  Genbank Accession No. AI101150
aaatcatatggtaattatttaatacagtatataaccacacaaaataatataaccaccacactgtgaagatcaaataatgggttggaggcattgtgcaatgctaggatcaagtggtgtaacaaaagaagaaaaacccaggtcactatccaagcatttattcattactagtttttctagtgagtggggtatacacagatcatttcagttagttctgttagccctaactcagttatcatgcagtcaatcaagcttcagattcaaagacaatcttttatccagaacaatttggatcctaaacctaattgaattgctcttaaatttctaattattccaactctctaagattgaaactcacaaaacttaaattcaccgtcccgctgagcaatgactggggagagatcacattatcccctcagagctctgctttcaccaaggggtgagtgcagtggaccaggctgggctgaggtgtgggacaggcctcttcggctgtccacttcaact

SEQ ID NO: 1772 - DNA, 492 bp, Rattus norvegicus
  Genbank Accession No. AI101181
agatagcacaggttactgtcactttattgtgctggctttgggttccccaagagctgcatgcattagtgacagggttgaccacctgactgaaaccagccattgagcaggaactgccaaaaagagttggaggaaggagtaacacactttcaactctagggaggtccaggccaagagcagggagaactacctgttagccaccttcaggaccagagttctacctcattttatgcgtgtctagtagcctatgtctagtaacctataccggctgcctgctataaccctgcctttagaaaagaggcccagtttgaaagctacaaagtcctgtcgtgcagctgaggcccccaatcctttggcctctttcttgcagttggaaataactaaagagaaaaagataggaaaggaaaagctatcaccatctgttctggccatgttcctacaagacagcagcctgaaattaaggtaccagggtttacccatgtacccaaacatttt

SEQ ID NO: 1773 - DNA, 473 bp, Rattus norvegicus
  Genbank Accession No. AI101229
aactctgttgatcacacaatgtcaaacactagaaaaacgaagccatacatgttgatagagcaaaatatatttctcaacaactcatgaaatttgtctcacaaagtatggcatagaacagtcacagtattaagtattcaagtaaagttgtgtgttaaaataggtgcacaggggtaataaacactgggatctggccttcagagaggacaacccatgggaccccatttgaaggttgttacatcacagaataggcttgcttacattgtgcgtctgatctttattctcctacacccctcccccccagtcctgaagaacaaagatagagaaagaagaatcacttgctacgaggccctgcttcaaggtccctcagatggaaaaacagacgaactctggtactttagtgagccccactacctgggagacatgactatcaggcttatgtcatttgagttgataattactgccaagaagtcctg

SEQ ID NO: 1774 - DNA, 465 bp, Rattus norvegicus
  Genbank Accession No. AI101258
ggaagattttatttttgggatgtcagaaattacagcaatatattcataaatacctaattactacattcaacaaataatattacaatacagttaattcaaacaagtacacttagaacgggtttaatttcacagcatctaaactgcccccagagcgaccgaggcacccatcctccctcctggctgggtctgggtgcgcggccccagcagtgaggcatagggcacacacaagtacgaaaccagtgagatgcctcctcagggtcaaggcagactctagggttgaagttaagcactggatcagacagtggggacaggctacggcaagtcgtgaagtaaaagcttttgtacttgagtacagactgctgctgttaagtggctaatgcacacctcagaggtgctgagcctgctgtgcaggccatctgcatgctggggcctgtgcagctgatgggtgggggcggaggcatcgag

SEQ ID NO: 1775 - DNA, 464 bp, Rattus norvegicus
  Genbank Accession No. AI101262
aagggatgtgcctttaatttttattttatttaactttaatttatttttgttttatgtgtatgggtgttttgcctctgtgtatgtccgtatagcataagcattcagtgcccacggaggctggaagaaagcatctgatccactgggacgagctataggtggcaaagggaggcactatgtgggcgctgaggaagcagatattgaatgagtgttatgggctggtgagatggctcagtggttaaaggtgcttgcagccaaggggaccctggaggtaaaagaatagaaccaattcctgtaaggtgtcctctgaccttcacacacatgctgtgacatgttgacacacaatacccataagcataaaagaagagctgttcagggctagggagacagcttagttattagaaaacttctggctacataagactgaggacctgagtttgatccccattacccatgtcaaagtccag

SEQ ID NO: 1776 - DNA, 426 bp, Rattus norvegicus
  Genbank Accession No. AI101270
ctcagtcacacacacagtggttttattttttcctttggtgttgtttacagtgtctcccacaagagaagagctcccattggcagagagggtgatgagattcattgaaccagtggcaagaataagtttctgaacagaaggccacggagccatgagcaacagcttgcccgtttcctggcctccaggactcaaactgggagaagagaggaggccactaaatgagatggagaacttcagaactctggccttgctctgctctggggagacagtctgagggaacatgccgggttaaagcctgggttttaagggaacactctgagagatggggtaagataaaacatatcagtgatgaggggtgtgtgtgtgtgtgtgtgtgtgtgtctctgtaggttacctctgcctgtctctcaactctgacttctgagtact

SEQ ID NO: 1777 - DNA, 605 bp, Rattus norvegicus
  Genbank Accession No. AI101319
gcacattcagggtctttattaataaaggaaataagtgtttataattatggaaatacttctggtggtcccttgtaggggctggttgcatctttagagggttcctggggcttacagaaacacaactgtaagtatttgtaagaataagtaagatacctcgtttatagtccttcaggcaatttcccctaaagaagccaaagaaaccacttccccatcatgtctgtatgttccaaaacaaccacaggcataattcctcctgtactttttagttcaaatggttgaaattagaactttaaattttacaaactccaaattattgaataccaaaccaacatatgtaatgagaaaaataattacaaatacagaatgtggaaatctttttctaccaaaaagccacgggcacacatgaaattaacatatggaatggtggttagggcacacacgaaatttacatacagaatgttggttagtattgaccttaagaccttggcaaaatggttttttggtcggatatacattacctagaagtataaaaagttacaggtcaaaatttcaagtttctaagtttaacattaccacttcttttccaaacatttgctcatgggctt

SEQ ID NO: 1778 - DNA, 515 bp, Rattus norvegicus
  Genbank Accession No. AI101465
tttaattagtaggctgatcataaataaatccacataaaagattcaacagaattacaaagtttcatgtttcttttgtggactcaactcataatatgcattagtcaacctcgtccctctctgccagagctgccgtctgacgatgcagcacacgtcagcaattcagtctcaggtacattttacatttctttacaaatgtaacacgtatgtacatatatatatatatgtctatggttcatgtactgaaactctatggtctttacagggaaaatgctgaattcatttaatggacatgagtcatctgtatttaagtaaatcatacagacgagtactgtggtaccgctcggtgccccttggcatctcttgtcagagttccagctgggaaatgttaactgtgcgatggctttatctggctttagattgtgacatgtcattccatggtcctcaggcctgggcgggcataaaagcactgcactgctgctctcccggaagttcgcagaaaccgactccatccgcat

SEQ ID NO: 1779 - DNA, 465 bp, Rattus norvegicus
  Genbank Accession No. AI101582
ccccattgagccacaagccattcagagtgtgcagcctggtggccattttatttctctgtaagagatcagttcaaggtgtcgtctgcaagcctaaactccatggtgatgtctccagtgagggggtgaaactccacagcatagctgactgattgagggccatccagaggcgcgctaggatccagtgtggcactgaggaagtacacagcttgcttgcagtgggggttccagcagcagtcccccttgtcctctgcagggttcatgaggccggtgctgaccgtgctatctggagtcagctggtattccatccacaggacagctccatggctcttcccgggcctcctcagttccatcacgcccctggattgcataggctgctgggggatgggctgctggaaatcaaaagtcaggatctgtcgaggctctgagaggcttctgcatgggtattcccacagtggctgtggctct

SEQ ID NO: 1780 - DNA, 450 bp, Rattus norvegicus
  Genbank Accession No. AI101622
taaagaacatctttatttgatcttcaatatacaatattacttcaatttataaaaaaatcacattatggaggacatgactggaaaccagtttaggagcagccagtgggtaacgacacaggttatactcacccacttattagtttagagaaaattatcagtgaatttgaggccattgagaataaagaacggcatttcaacttctaaaccaacaattataattagggatactgtatttagttaacccagctaaaatgaacttgtaagtgtctgtcaataaggagctctgctttccatggttttctagtgtgcaatatgcaggattctgtggcatacaagttaccgtgactctgcactatgctctgagtgtttctggagtaccgagctcacgggcacacagagcggaaatgacctctgataggcagtgcctggaaaggcggttcatcaatgcca

SEQ ID NO: 1781 - DNA, 459 bp, Rattus norvegicus
  Genbank Accession No. AI101674
atgttccaataaaactttatttggctcatcctgatcaagtttaataatatttaacagattcttttaagaacatgactaattatcacaattctccgtgagctagcggtcagtcagcagcatgtccctttactcaaaaagtaaagcttccccccgacgacaaatggcacataaggggtggtgtgcattgcatttttttcttaaagaaaaaaaaaaggaataaaacctaaaccctttatatttacatactttccacttaaaaacccggtcagcatgattgttttaaaatatatgtttctgatgcactgtacgtttcaatgtacaaaccacagtcagcgagatttaaggtgctgcgtcgtgagaatgaacacagcccaaggagatctctcaacagagcagctggacctctcgtgggtatctttgggatgtcggcagggggaggggaggatagataccagtggc

SEQ ID NO: 1782 - DNA, 512 bp, Rattus norvegicus
  Genbank Accession No. AI101690
aaaattaaacgctttttttagtgtttaaaatagcatttacacagaagcagcatttacacagaagcagctctatgtgaactacccagtcgctcagacttcttgacacagtgtctcgtgtagatgtgtggggctgctgtgccgagatggcagtggcacatgctgatgggcagccaccaggagaacagtgacaggacaggaccccacatcttcagctcttgtgttcactctcacccgccattgagactaagacagtagataagtgccaggcctctctcctgtcttccctactagccatcctccacataccttcaacacaaactgtgctgtcatgtgccgagttgcaggtgaggaaaggagcgtgcaaactgccccactgggtgaccagctgccgcccttggagcaggcaagctagcaataaataagtaagttagaccccacctgggcagccagagaggtttgagggctctgtctaaccccttaagaaccccaccttggcctgacaggtgaggccc

SEQ ID NO: 1783 - DNA, 485 bp, Rattus norvegicus
  Genbank Accession No. AI101695
aataagtcagcctctaggtattgcttttacaggtttatggaaattcaaggatctacaccattcacactttacacaccactcacacttccaaaaatagatttctagccagacacagcatggccttccccagtgcagtatctcagttctgtcaacctggagaagttaaaccctgtcctgggccctggcatagccctccagagtgacaccctgaaactatgatcaacagtcttgggtctgaagtcttcccaggcttaaggtcaaccagcatcaaacaatgctgacgggaaaagcctaagcatgagtccgtttgccacctcagctctccgtgtccttcccggaggttgagtgggggaggcaggtgcggctgtgggtgacgtctggttgggttcctgtaaacatccatcacaaaggtggcaagtcacaagccaggtccagggcaacggaaagctgggtggcaggcgaagcgttcggaggatctggcaact

SEQ ID NO: 1784 - DNA, 533 bp, Rattus norvegicus
  Genbank Accession No. AI101864
aagtattttgaaccaagtatatttcgccaacgatccttctcaccagcaaaataatttccacagtttccattttctcagtagtcataatggggcatattctaagttaagcatccctcttgcttaatttctgtacaggtttcagcacagaaccagaacttgagataaatacgtgaattctttcttgaaaggatacagtctcccagagacacgtggtctttaaaaatcgtgtacctacgggatagatagctttcagagagaagctgataaggggtggggtgttttttgtcctgaaaacaagctcttcgggattgtcttgaggtgctcgctccaacgaacgccctctagcctgatactgaccagcgcgtacttaccactttttaagaacgatcttattccagcgggtgccagtttgagccgctatcagtttcttcaggtcgccgatggtgtcatcggtgttgcacttaacgcggactttctttcctagacggtcgttgcaaaccacctcaatcatttgggctggagctccaatgtcc

SEQ ID NO: 1785 - DNA, 484 bp, Rattus norvegicus
  Genbank Accession No. AI101921
  misc_feature (1)..(484): n = a or c or g or t
atttgatcattttaatatgccagaccaatttacagaagaggacggagcacacggaaacacctgtatttgcagcacggagggcagatgtccgcagccctgggcatgcatgtatctcctgtggaatcaggcaaatcacgaatgcataaataccacagcacagccagacttgggggtggggtggggtcacaggccacaggggaccatgcttcaaaggcagtcagaggcattaaatacaggggctaaacgttagagtccatctcaccgtacacataactcatacattaaaagtaaggagaccacggtatgtacgtgcaagcagctttggtcagagaaaatgaacaagggaggtggagccatgcacaggaagggcttgcctgtctactctccatcttcttcatccccacaaagtcacctgggatcatagaatgaatcanctggtctcggtaggatactgaaaagtcgtgtctggtgtccttaagggcct

SEQ ID NO: 1786 - DNA, 469 bp, Rattus norvegicus
  Genbank Accession No. AI101977
atgatatgctcatttattcaaaatgtcttttattgaaacagaatgaagagcgagaaagagcaaggtctgggaaaatgtctttgggcataggatggatcccagacctaacggttatagcgagatgctatccccgtcctgactcttgctgatgaagtgaacagaaagcagaagcttgggaggagaagagtccgaggaccgagaaggttgtgatggcagcatcgttcagataatcccacaggcccagcaagaccagggatgcaatccccgtgagagtcattgagagaagcaggatgccccgacggccgaaacggtccacggtcacccccaggaagacgcaggccagggctgctgtgccgctggccagaagagagcacaagtagaagtctgatgggctccctactcctcccacaggctggtagcagtggcgaatggcatgggcgataaagttggtgaagcccaggataagcag

SEQ ID NO: 1787 - DNA, 384 bp, Rattus norvegicus
  Genbank Accession No. AI102017
ctgtagcatagctcattttattgtttaaacagtttttgcataggaaatatatccgcttccagtaattgactgcagtatgagcagctgctagcagtataggctggatataacagtaacaatcacattaagtcaagcttgatttacaccagtttaaaacttgtggcaattgagttcatttgcgacccacaaaaagtacacaaagaacgttatcctccaaccgggcacaataaaaccttcactaacattctggccccgtctgggggcctatcccagaggcccgaactccagaaattaagtaactgtcatataatacatcccacggctaaaggtttgttacatggagattatgcatgtgcctccttttccccccgaaaatttatttaa

SEQ ID NO: 1788 - DNA, 544 bp, Rattus norvegicus
  Genbank Accession No. AI102023
cagtacataattattcaaataaattttaatgatttcaattcaatacaactgaaaatgtagtgtcattaaataacattttctgctataattcaaagtacagtttggaggccatttccgggcagaagcatcacatcctaagttttcagcttaagtgaggtgactgacggggtcatggcaggggcggggcaacaatgatcagctcatagaatttggcttggtgggcaggggccccgcctcctcgtgctcttcagtctgagacctgacaaccacgagggaaggagctggatatctgctcagcttttgttcattcataaactccaagtcaccatagatactcagcttctcagggggcacgtattgctccacggttgtagccacagctgcacagcaaatccagagcaacaccattaccgagagcaccagagtcgtagttaaaatccacccagagttaagagacagacatcttaaaaagccatcgctttcttcatcttccaagtatttcctgtgtgcttgggagtttcttaatctgtaaataggacatttg

SEQ ID NO: 1789 - DNA, 490 bp, Rattus norvegicus
  Genbank Accession No. AI102027
gacagggggagtaaaaattttaatatcataaatcagtgggcctgcctttcactgccaggccccttctggggcttcctatctttatattgcctggaaggctgcctgcagccagggcttcctccatccctaggaaggatccagcaccagcctgaaaagggaggcaacagcagctacaggagtgggaggaggaggaggaaaaaaaagcttgtgcaggcccatgtaggtgggtgtgtccttatgtgtgaaaacacatgtaaagggtcaggtttatagaccctagctcagggacagtccaggataggaaaggaggtagggcaggcaacacatcctttctccatggcactgtgggctaccctatcccagggacagattgaacaggttatgtgggaaacatccctaagtctgagctttcaggacttgagccctttgagtctggtggagtgacaaatccagtctgtggggacactaggtctggctccttttgaaagcc

SEQ ID NO: 1790 - DNA, 549 bp, Rattus norvegicus
  Genbank Accession No. AI102044
attgtggggttagtacctatgattcgataattgacaatggttatccgggttgtcatacacttgggctaggaaaattggttcttgttactcatattaacagtttttcatctatgggtctataaattaccccaatttgtaatataggaatttattgaggtttggggaattagtgtgtgtaagtatgtatgttgagcttgaaccctttctttattgatggctgcttttaaccctacaatggttaaggggttgtagttgtttattcactatttaagggtttttccttttcctaaaaagctggccctcttttggttatattttaagtttacattttgatttgttgttctgatggtaagcttaaagttgaactgaaattcttttttgggcaaccagctttcaccaagctcgataggcttttcacctttacctaaaaatcttcccactattttgctacataaacgggttgattcatgaaattgtttttaggtagctcgtttggtttcggggttcttagcttaaattctttttgttaaggattttctagttaattca

SEQ ID NO: 1791 - DNA, 625 bp, Rattus norvegicus
  Genbank Accession No. AI102045
aggtttttaaaccggcctttattaaaacaattgtaatacaaatattccaaaaatataaacagactcttaatggcatcctacagttcaagtttttgaatacaacaaatgtatcaaatcatgaagcaaggtggtcaaggatcccatagcccagtcacagtgggaagcagacccctccccttcaaatggcatcttggaaataggcagatctggagtaatcacaggtaaggagaatcaccagcttgcagagcagagcagagcagttctgggagctgaccctgcactaaaggatggggcagctggccagacctgtgacctcttctcccctgaatatatttaactaatgatgttttctagaaagagggactggggatgtagcttagctgggagtgtgtgcttaacacacacgatgccctgggttgttcccagcacctcctaaagcagcaaggtgatcacacctgtaaccccagcactcaggaggtcagttcaagatcattcctggctaaatgtgagttgaggcccctgcttggaattcatgaaaccctgtctaggggtagaggtaagggagaaggctaagctattttaaaaaaggaactgaagagtagccccaaatggaaatggctcacac

SEQ ID NO: 1792 - DNA, 611 bp, Rattus norvegicus
  Genbank Accession No. AI102055
ggaaaaacaccccaaaacactttaatttttaagacaagtgcaagcaccccaaacaaaggattattgttacaacacttgttagcttttcacaatctaattattgcaaaggcaaatggataaatgttaatggacaaagtcaagaaaaaacgaggcaccttaatgaataaaaattttttaaaaaagacattcaatccactgacttctaaaagaggttaaatacacctcctatgagacactctaaaatagtattgcctactaatgtctgcgtcctggattctacagttaattttaaggaaatgcataaactaaaactgtatgcgctctgcaaaggggaaatgaccttctcattcatgggcggtaatgaaaaggcaaggggagccgcagtagcaagtaaagctgccggtggaatgaacatgatcacggctacctgtaagctgtgaggcgtgttctgtccactgcgctgcaaactgtagaaacacaccttgtgttttaaacaaacactgatcatgcttttccgaaaatatattatttttttcattccacacactgaacatatttctcttgtccaatttaaacaacgcatttaacttacagtgctgggaagaggcaac

SEQ ID NO: 1793 - DNA, 657 bp, Rattus norvegicus
  Genbank Accession No. AI102065
actgcataagtcaaagatttatatttttgggttctttctagacaaagttcttaaaagaatcacagacgaaagctcatgcataaatcacatatttcctcactaacaaaaatacaaaattgataattttaaaaagatcagttttcagtgacccagatggctgaggaaatgctgcttggcattttttttttcctgatctgacgcagaacatcctaacttgagaacaatgctgccagtcttcacttatttcagaaaaccggcagcgagggatttttgaaggaaagctggaactgaagaagtactgccccttcttgaccccaagtcaggggacacatggcactcttccacgatgttctcagttcagccagtgactcacaccttcacaagccagacctcattacgacgtccatagggcttcatgggagggtcatacccggcgcagtagtagacatcaccctggtaggtggctggtgtgccctccagggtggtacgtagctgggtggcgtgagcaacatagtcggcttccttggcataaccaccgaattgcgtagaatagacagtgatgccctcccgctcctcgattttcacgctctggtcactgggcgttggcgggctgccttgaaattggttcggaatccggaaccagactttcagtttctt

SEQ ID NO: 1794 - DNA, 651 bp, Rattus norvegicus
  Genbank Accession No. AI102073
atcaaatgaatactttattagagttgtaacacttataaaataaatttatcagattttaagaccaaccaacactttttcatttttatagctaagatacataacgagaatcttaaacgccatcatctctgttcaagtgctttgtcattcagctcacaaatgtagaatgtagttcatctccagttctaagtattcacagtcagtcagctttgggcttggtccttgctaatctagtagcaatccatttatagaagtcccaccaatacatctgaatgaattaattagttaataccacactgaacatggcctgttacaccttgggaaaaataaaacctccactaaattctagtgtactacactttagtgattccaagtacaatgtacaatgtatctttatggcacatttgtgacttcatagtattcataatacaggtttcaggtgtgtggtctggagctggaaaaatatgaaggaagtcaggcattttagaagagataagacatgagtgtaaggccataagactggtttcatcacgcaacatatagaaatatatctcttcttcagctgtgttacaaactgagcttctagttggttcttcttctggaggagtattagataaacagcacttgatcactgggcattggttatgttattca

SEQ ID NO: 1795 - DNA, 485 bp, Rattus norvegicus
  Genbank Accession No. AI102190
cagttcatataatttattgcagttagcacacagtttaaaaattcaccaacacaccaatagtacaaaactaaccagtattgtaagttattccccctcaggaaataaaacatactatgattgtcaaagctagatgtcagtctaagatttacaacaaaggaagaatgtgaaactaaggaaaagaaaaagcaatcactcacaatgaccacaaaaaaaaaaaaaaaatccaaagagtccgttctttcacagacattgattgtcttctctaaattaataaagattattttaacataaactgtattaaaaaaaaacccagaaactcttcaagtaactaaagataatgctccaaggccattttcacagctttttttgtttgcttgtttgcttgctttaaatgccattacagccaaattaacatacatttgaccaaatatttccaaaacagtccagcaacacacaatgagttttccattcagtatcttaagcac

SEQ ID NO: 1796 - DNA, 518 bp, Rattus norvegicus
  Genbank Accession No. AI102236
ccagaataaaccacaatgattaaaaaaatatagattgacaaaaataaaacgacattcacagaaaactatgcaatccttaacctcaagtctgggcacacgaaggagaggggagtctggctgtctcctggagttacagaggcaccttggctagtggggaagagctagcacctcccttgtgcacttatgaccccataggggcagacacaccaaatacgcttcacccacaagtggacaagacagaacgtggctacccagagagaggcagcccaggactgttcacccaggagaacgtcactaagatgttacctgccggtctagcctctgtccccagtgtccgaatcttcagcgttcctggcaaccacccttggctccaattcgattcagttgccggtaaagctgtgcaaagttggaggtgaggggggctgcacggagaagcatggcagcttcgcacgagtaggaccagcaagttacacagggaacccaagactcactgcacagtcactaagctcgcaaaggca

SEQ ID NO: 1797 - DNA, 502 bp, Rattus norvegicus
  Genbank Accession No. AI102248
ggtgcataagatttgtttttgtttttttttaatatataaaagattttttttcttaaaaaaaaaacaaacaaaaaacaaaaaagtggtgctctttagaaacacttgcaggaagatcaagtagtccagctacagctcgcaccttcaccttcctcctttcgtggggaccaggagctcccagcctgaccccctctccaccattctgtgggcaatgggcactgcccatgctgccactggccgatgggacagcaaacagctgaccctgcttggaactgttggtggccagggccccctctggatgagggacatagacaactgcttggtggctgaagcagaaatccctctgccaggtggatgaggtagtgttctgggatatggccgcctctcccaacatgtgccaagccgcctgaaacagagtgagcgggcaggcacggctgggctgtcctggttggcagggaaagtcttatcagggactggcagcgatcgatagtcaaggccttcatcc

SEQ ID NO: 1798 - DNA, 552 bp, Rattus norvegicus
  Genbank Accession No. AI102258
ctccattataaacgttttcttttaatttaagaatactgattaacacaggaaacatttaattcatgggactgcatgtggtcaccagttacactgtgacattgttagtgtcctcaaccacttattggcactgttgacggttactgtaaacaagatcacttggtttgcatgagtctgcgatgctcggaagctgtgggtttctacagtgagctgatatatatgcatacagagatagggacagatctattagtacatggatgtgcacagttttgcatggttactgagcatcagtaaaaattataaaaaaaaccacccatttataataaaaagggagcatatgctaagacttgctagtactgggcctcgttttctgcacaactggcaagattggctaaagctggttactaaactctactgcactaatgcatgatgggtgttcatccagaccttccgaacagatgccctgatttgtgggttctgccctaggcagaagcctgcccactaggcttcctgtgtttcatcaaccttctctaagttctacaatcttgaattttg

SEQ ID NO: 1799 - DNA, 481 bp, Rattus norvegicus
  Genbank Accession No. AI102382
gacttcaatgcttttattgtacacttggtgcatttaaagacactctgagggcaagcactggatagagacatcgtttgatttgaaggtatttgtacaaaaggctgttaagaccacatagtcagtctcccccacccccaggaacaaaggctttctgttacactgctccagctatggcgattcggttctcacaacatggttagagacagaacttattgattcctgcaagaattctctgcatgacagttcaagatggttggcagcagcccaataaaacacatttgacacataccacaggacaggagttggggctcggtgccgtgtggaatgaaacactacggctgcaggaggcacaggagagctgggatgctcgacacacacctgccacacctctccctccatggtgtgttttctcccaaagctgagctctcaattgaagatggttgcaatacaagaatgcagccaataatttgaaggcatgcag

SEQ ID NO: 1800 - DNA, 535 bp, Rattus norvegicus
  Genbank Accession No. AI102482
gaaacaaagaatcatgttttatttccacagagaaacttgagagtaggaattcctgctgcgtccttctggggacttccgctcacatatagaagaagagctgaagagctggctggttatccaacgaagctgattagtctcgaagacaccacagtcaaacagggaggatgaggacagataaaccaggtccccaggtgagatgacaggcatggaatgcccaggtaggtcagccgcatcagagaggactgtgggtaaggacagtcaagctccctgaagacctgcctactttcaggaggagtcggctgggaccagatggaatgttctaccaaaacttcagccacttcagcaggccaggttgtgcccgggaagccgaggatgaaggtgtgactcccgccttgggggtggtcttggtatagtattgccagttgtaagtaggattcacctgggcgttgttgtagtagttcttggctgactcagctgacagatcttgtcttgctgcttccggctgagaaaactggtcagcaccacctgccctctt

SEQ ID NO: 1801 - DNA, 643 bp, Rattus norvegicus
  Genbank Accession No. AI102495
aaaagtatccgatctctttattctcaaaacattataatactacataaaatccaagaggtatggggttggtctttggtctttgtggctttagggaaagcagaggagcccagaacgtgtctgtcatcctcgggatgtagaaagatactgattgaaggcatacatagatcccaagtgtgctgggaaatgggctccagctcttccagaggaatgaaagttaatttgagaaggcaactaagtaagaggaccaggcatcggagcagtagaaggatatctatcgggaaggtgaagggtaggcacctcctctttcctttctgctagactctaagaacagggactagcgacccagcaagtgaccaaagtagacagctacttggacccccctgggggagcaccagatcactccgcggccagtcagttggcacgctcacggggtggaatgctctccataagaatggagacaaactgctccaatttctgtgcagctgctttcccggcctccagaacttcctggtgactggccttctccaagttgttgtaatccatgacaaccttgttagtaatgagtgagaaaccaaagacacggagcccacagtgtctcgcaacgataacttctgggactgtgctcatgccaacagcatctgct

SEQ ID NO: 1802 - DNA, 536 bp, Rattus norvegicus
  Genbank Accession No. AI102505
gagcaaggtttaaatagactttattgttacaaagggggaccccatcaagcagaaccaatatatgtggtcccagttgtcaccatggagacatcgagaggtcatgattgcagaagaggtgactggaattgaataacatgatcccagggtaagccagccaggaatgcaggaaacatgatcaaggtgggctggcaagagtggtctagtcaaaggatgagggaagacgctcccttcactcccgcttcttgtagctttccaggtgtgacaggacccagcccgcaggtagaagacaacacacgaagcaggaagtgagcccaatggtgatatccaggaccccgagctgctcccgcggcggcttcgagtggacctgagcccgcggcaccataagccgccgggccgggccggtcaggctcctcagcagcagcggcgtcagggaagacatgacggcgcggagtgaccaaggacaaggaccagccgaagcccaaggtcaggaagtcaacctagtgccgaattcttggcctcgagggccaaattcccta

SEQ ID NO: 1803 - DNA, 599 bp, Rattus norvegicus
  Genbank Accession No. AI102520
aaggtaagcaattattttatttccctggcctgacagcaattgacttcaaagtcccagaacctgatgccgacaaagcgaacatacagatagctcccaacagggaggacgctcttcatttgtagagatgaattgaaatgtcatgtgtgaatgcgattcctgatgtcttcaccttgcgtctcctccatggttgggagccctccctctggttccccaagtcccacacgcacccctcccctacccccaagtccaggtgctcccatctgctgggcttctgcctcatttcccatagacactttcatcactgtaggccacatacagaaaatagtcttcctcgtggttgtcctcatacagctgtcccatggtagcactggtgggagggatagtgttgttgacaaagaagaataaggcgtcctcaggtctcaggtggatcctcttccggattaagaagtagaactccactttaacgccatccaaactgctggcaatcataaccacattccgaacagccctattttccaagaggactccatctaaatgtccgtgcgaatgtctactgccacaactggggcggtgctatgacacctgggcggaggaaaagg

SEQ ID NO: 1804 - DNA, 625 bp, Rattus norvegicus
  Genbank Accession No. AI102560
atgtttaacatagtgttatatttggaaaagcagatttaaaaaacacttgaaaatacaagataaggtaatggttacttacgtaagttttaaccttatattgcttggccatttttttttacatataaattattgcttcctactttgataaatacacagcacagtcatatacacagaggcagagaacatgaactatgagaaaaaaaaatcaaacactgtcaatggcagtctggtaagtcaacgaatgtttcatatttaccagctcttataatggtggaaaactacgaggtgtagtccctgagaagttaggtagatgcccggcctgtgggctttctatcttctaattgttatcccaagctgacagcatcatggcagtcctaagcaatgagacgtccaaaggcaagagtccttgcttctggtcattgatttcatcctggtgtttaataacagcgtaatacgaatacaaataaataggctatgcaaataaatattcctctgctaaaaatgcttacttagtatatacagctttgctttatacagtagtacatttcttccgactttttggcaattttcaaaatgggttttccctagagcaaaacgggcccactcagtaatgagtgggctgaaa

SEQ ID NO: 1805 - DNA, 487 bp, Rattus norvegicus
  Genbank Accession No. AI102570
ttttaaacatttatttattatgtatatgtcatacagctttcggcctgcatgtatgcacctgcaggccagaagagggcaccagacctgattatatatggttgtgagccaccatgtggttgctgggaattgaactcaggacctctggaagagcagacagtgcttttaacctctgagccatctctccagcccccgacaatttctttaatctcagaaagaaggcacctcagtgggccactaggactcttcttcaaagtaaggactgtcttcaataatgtagacctcgtcttcaattctggcctgctccaccaccttattttgggaagctccgatcttagagactgggaaggcaacaaacctcagagaaccagaattctttctcattaccatgtacctggtgatagccacggtgctcgcaagcagcagcagcagcagggctgcaaaggacatgccaacatagaagcccttagtcgggtttctctgcagcttc

SEQ ID NO: 1806 - DNA, 537 bp, Rattus norvegicus
  Genbank Accession No. AI102574
cccttaaaatgcaagtttattgaataaagctgagaggagcagtaaacagacaaaaaatgcatccacacctaaataaaaaatgtacgtatttacaaagttcagtaactgttaggttttcacatgcagaggttatgcacaggaaaatgttggtagtagcttttagatgtcctgaaatgctggaaagcaatggaaagacacataaacaaattaaggtttctataggtcaattaacaaaaagctacacagtccccgcttagttaaacattctggttccaatccctccttctaggcacaagcaagttgccacattctttgaaatggttcacaatgaccattagtcatgtccggctacaggagcaaagtttaaatatccttttatttaaaccacctatcccattcaggaagagtgcaacatgcctccatgaaaataagaagagaactttaaagcccagattctactcattaaaaacgtgaatggagaaaacaagtagtgtctgtgcaacacagtgcagttatttgtacagaatgttctttaag

SEQ ID NO: 1807 - DNA, 478 bp, Rattus norvegicus
  Genbank Accession No. AI102578
gaaatgttttatatcaagctatatatatatatctggattctgtcctgagtacatgcatacaaaatcaacactataaaaataattcacaatattaatgtcatcgacaagttaacatctacaagcatacaaaggctgtgtgcattgcttgccctggccagctcggtaaagcaagtacctgggaaaggggacagaggagagacttcagatcccagcctcgaaccatgaggaagcaagcctgggtcagggctgagcagggctttcatggctggagggaatgggataagtgaggctttgcccctggccctagggagctggatggggctactcaggccgttaaaaggcagactacagtgtaggaaggcaaaggtcgctctacccaagacaaataatcactggcaagaaatctctcacatgctcacacgtcaactccctttagtggggtctggaccccactggaccaacatctgtccaatcatgg

SEQ ID NO: 1808 - DNA, 422 bp, Rattus norvegicus
  Genbank Accession No. AI102579
gttcagctcttttaatcagccagccagcttgctagcaaccagggatggtttccgctgagggaggtcctgtggagtgggaatgtggtcaccagtgacctctgtcttatccggggctgcagcatgaagctgcttgttcttcatctttgcttttgccatgttgtaatccccagaatcaaaatacttttgccctttctgcaatcttttccttaaaaagtcagaaccaccaggcttttgtcccaaatgaggataccttgcttttaactttgcttcttcagctttctctggactagttactttatcttccatttctttttgctcctccgccgacgctgcctcggggacttccgcggacatggtgctccttctatccccgtgcctacggccctcgtgccgaattcttggcctcgagggccaaattccct

SEQ ID NO: 1809 - DNA, 506 bp, Rattus norvegicus
  Genbank Accession No. AI102595
cagaaaattattttaatagttacaaaacattttgtatacagaatcagtataaaatagcagttgattattggataattatgagaattagactcgcggtcttggctggatggggctgaaccaaccaaaggccttgacctgctggctcagagaccactctaagaagttggcctgctgacatctgtcatgctcaggcgacgagatgaccgggtcttttttaagaaaaaactctctctgtactcattctttggaggcttgaagtgaattcggcagcgttcattaaacaccttccagctcctgtaatttaccacttcttcaacattgagttctgactgcatccatttcaactttgtctgttctttcctaagttgttataataacgttaagtcatccaggttcttttctctctcttctcggagacgttttactactgctgaggtctgggctatacagttctttataactctgtccctactgacatgagctgccatcaaagactcatatagttg

SEQ ID NO: 1810 - DNA, 546 bp, Rattus norvegicus
  Genbank Accession No. AI102612
aatttggcaactttaattcttaggaagatcaaagttccctccaaacctaatttgatgtttcattcctagaagcaaagaccagcatggcacagtatcactccagaggaattaaggaagagccttggggccgcttccctcacattcatttgaagaatggacacctccctacctcagaatgctttagggagggactgctacccttacatggttccttattaaatttgaaaagtgcctcaaagtttggacaccagaaagacaccccaaaaacatgtgtctaaacggcaacttcaggttaatatgactaaagcagttacattgtgagaagtgctgaagtatgtgatgtcttccccggcacaggagtggccacagctcctcaccaaatagtgtagccaccatctgagccacccatgaagaagtttcccttgcgctgagttacaaggacgttggctccctgcatgactgcaagctgagcagcgttgggagggcatccaggaggtggaggaggaatgctgccagtggtggcaccagctccaaatctggcacctg

SEQ ID NO: 1811 - DNA, 531 bp, Rattus norvegicus
  Genbank Accession No. AI102618
gggggggaaaaggtttattttttcctcagaagaaacagactggggaacatttacaacccacattaacttgcagttggtcctaaccctttcgggaacaggtgttaaaatgttaggtgctctacggaatgaaggtgttcaccccagacagaatgtacatggacgatgcttgaagactgcatgttttttccctgagagacgtgtaagacaaacagaatttgctgagagccatctttccaaacagcccctccctcttcacactttggaggatgtgcctcaactattcatctagtcagcactcagaccacatgctgctttccttctaaatcaatccctttcccaaccatttgaactctccaagtcttcatagccctggaccgaaaatacctactaagatcctatctgtacttcagctttcacaccttgtgagctgggaagtcaggctcctagtaaacaaaacttccataactggattatgaggccaaccttttagttaccttaacctatagggtttattcaactacataaagtgct

SEQ ID NO: 1812 - DNA, 522 bp, Rattus norvegicus
  Genbank Accession No. AI102620
aaacaccaaaataggtacaaatactataaaattggttcaaaggggtaaaaattttaattaaaatatctcgatatatttaaaataacaaaggatacatttaagccaaattttcttaacccagagtttttttttgtagcatttgcttacatagtaaggtgctaataggagttagcccttaagccctggaagtcttaggaatcatagtcacacagcacatagaatttcattgtgagagtgaactttggtagaagaaaaatctataggacacctgaggtagtagaaactggaataaacagcagtagacgttatttacaacttgagtaccaaataacattaaaaacacaaaaataattacacaatacaattttcagtccagctttgatccaaagaaaacaagaatatcacatcacatttgcatcgaaaacaaaacagcacaattaccagcaagccgaggggactgcaaacaaactcaaacacggtgggtcctgacatctggggacagtctgagtttgaaatgtggca

SEQ ID NO: 1813 - DNA, 575 bp, Rattus norvegicus
  Genbank Accession No. AI102727
ctaaaaactgtaggctttttattcagttaagaggtagacagatgaacatggaaggctgtcccattgaatttgcccaaagttcccattccacttcattcacccatcccacactgccagaaatctcaaaagaataaccacaaccaccaggctttgtcttcctacttcttagcaacacgtccacgaactgtttgcaaagaagttactacaaacttaaattttcactgtgccaaagattctcggccctctaagaagttgtcacatgtcaacagaacctgccactagtgacagggagcagagtgccgtgactatttctatgagagactacaagggaagcttcagttacatgtttgttaaatccctgtgcacgctggggaagaagctggtgaggccaacaaagcagtatatgccatcaaatggctctgcttggctgtttaaaaagaatccacattaagttatctcacagacgacattaaaacataatggaattgatgcctgatacaaaagttgagaaatatgtacaggaagtcatagcccaagagaaaagggaccttagaatgaatcaatggaaacctggc

SEQ ID NO: 1814 - DNA, 503 bp, Rattus norvegicus
  Genbank Accession No. AI102741
cttcttctcttagacacagtgtacacacgacagcctacacatggcacatgatttagcaaaataaaacattcacgatatgattgaaataacaaagtgtctcagctacataaatgactttaaattatacagtaagtgaacaggagaaagaaacaaagctatagcttattgaaagcgcaaaaacggctctccaatgatgtgactttacgaaagaccttccttgcccaggacttctcgccaagacctcaacagccacctggggccgtggttctgccaatggttttatcttcaggttaacttcaggtgcctcatacttaggcctcacctcaagtctgtccgggtaggagggaggctgatcacacagggactgagaatggccagagacttcttgggaaagaggctggggtgtacatacgggagagcattgagcagggtagatcaggagcgccatattaggagactctgaggttgaaagagacaacttccaacagtaagtcagaggttta

SEQ ID NO: 1815 - DNA, 587 bp, Rattus norvegicus
  Genbank Accession No. AI102750
ccaagtaaccttaatttttatttaaataacctccagtgagagcacagttaagactaaccatttttctcaccccccaatacacctcacaaggaggtatgcggactgcctctcaatggaagcggccctggcctctgccccggccagctgctggagctggagcatccacagtggagcgggggttcttgatagtctcatccacagacacaatcaggcacgcagcctcagaagctgctgtcagagcgttgatgcgcaccatggctggctcccacacaaatgcctggaagttgtcagcaatgtcctcgttgttgatgtccaccccataccacatgcccccctgtgcatgtcgagcccgcagtttgttgaggatgtttgtggcatcaaagccagcgttgtcacacagctgtcgtggaataatctccagggccttggcatatgccccgatcaacatttaagagggcaatcttggggttcttatacttcttgggctgcatttcaaacccagcataagagaacgtcttcttgaacgcaacaccagccactagtcgagactcctccagggctccaccctgcaccttcttcctcgtgcc

SEQ ID NO: 1816 - DNA, 496 bp, Rattus norvegicus
  Genbank Accession No. AI102849
gaaaggcatggatggattttatttattaccctatatctacaatctgaggtaaaatataaggaacacataaaatgcctatttctgctaccgtgtgatataatttcccatggtgaacatcgtggtgacgctactgagagcggtgccctcacaccctctaactgctgagagctgctgccttatacagtggcatcgtctgcgagctcccacgtggagccccacagagggcgaggacaccaaggtaccccactccccaccctggcaccgaggccagacaggtggttagagacaaccaaccaggcagacacaaggccagcctgactccacccagagcaccccaggtcactgcaggtcctggtggttagggagggttgagtcatccagctgctcaagcatgcacacctgaccactggcctctgaccttctggatacgcccagaaatttacttgctgcaaagtaacctcgagagagactccgaggtcagcctctccagttgcac

SEQ ID NO: 1817 - DNA, 562 bp, Rattus norvegicus
  Genbank Accession No. AI102871
tcttttgttttggtttattgtacatgctttattaaaacggtactcgtatttacagcattgcaggaagagtccctcccaaggtgctctcacagacatccagactcactcacacagacattcataccgctcggccccactcactcacaccagtgacatgtgagggtcagacccctaaaatttaggcagctgttggggaagaactgttggttttcaatctttcttagaaaagaaaaaagcacagggatgcacttggccatcacgatgctagcgatgtttgtgcactaactcatggcagttaacactgagaactcctcctccactccacacacagtgacatcagcctcagtctcagtgctgcttgtactgacttctcaattcacaggggctttcccaaaaagtaattcaagtttatggaagtgaaataaggcacaattaatattgttttgacctaacggaaggaaaggaaagaaataaaactggtttcaaaatatcttagctgggaactgttgactttaatctactggaaatcccttcttcaaatcttataaagacatttttccct

SEQ ID NO: 1818 - DNA, 487 bp, Rattus norvegicus
  Genbank Accession No. AI102879
gctgaagaaaagagctttttattcgtcactataagaaccaattacagaatctgaggttaaaaaacagacaaaagatctttatttctgagaattggcatataaaaggcagagggagaaaggggagggaagaagagtgagcatgggctggggttgatgccagcttagggccctcaaactccaataaggaaagtccggacaccggacagtaagagtaacccccccatccccaatagaaaataaagaaaagagacatggcagtgtactcccccttccccctgccagggaccaacacctgatatgtttactcttcccttcctccatccttttacaaaggaaggtaaatttttaaaaaaattaaaaaaccctccccccaactgtccaaacccactgtgggtcccaggccccaaatagggtaggtacacacaagttagttcctataggctgttttccatcacaggcttggagaagcccaaaaaggggagatact

SEQ ID NO: 1819 - DNA, 417 bp, Rattus norvegicus
  Genbank Accession No. AI102881
gtatataaaactcactttaaattaaaaaacaaacaaataaaaacaaagcttagaaatccatcagtgcagacagacagagcccagctccaaggactttgtggtcaccccatggatgagggagtaggtttgactccagaaaggcacaggcagctgaggtgtaggtgctggtcttctgggtgtggcttttagctgtttcatcagagatcagtcttccggaaacttgatctgttgatggagttcctgaggctggtggaacttggtgccaacagctggggcagacgctgcgtgagcagaggctgcagtgcctcccggaggcggctgtagtggcgttccagttcccggtggtactccttttggtctggtccaatcagggccttggtcttttcttagtgcatcctcacactttttgcagaaatc

SEQ ID NO: 1820 - DNA, 420 bp, Rattus norvegicus
  Genbank Accession No. AI102896
cagctccgcgcgccgatggagcagcatggcctaggcggcgggcacggggcaagatctcaggcttggcccccgcgccaagctccataaacgatttcgcggctgcaattgctcagactcccaggtcctgtgcaggcgacatgccccggggactccgggctcgtacagaccaggtggcttaaagttaaaaaaaaaagcccccaaagggtttccgcaacaacttttggaagacgaaaatagtggggtgcaacgaggctgaatgtaccggcgcagggactaggcgatcccgtaggggacaccgccaggtcgtgcgctgctccgtgcttggttggagacactactgctgtcagcgtctgctcccggctacttcagtgtttgttcaatgtaagatttaaaaaaaaaaaaaaaaaaaaccctcgtgcc

SEQ ID NO: 1821 - DNA, 585 bp, Rattus norvegicus
  Genbank Accession No. AI102905
tgaaaaaatgcttttattctttccaaagaacagagttccaaataatgatcacagttttaaagtgattaagatgctggatgaatagccaaagaatattatcaaataacaaaatctcaacaacaatttatcaaatgaaactttactgagacataagagaatatgtgttaagagttaacatggctaaaaatgagacatcacagaaatagtaagtccataaacctagaacaggcactcaataacagaagtgattaggtgagcacacactacaaaccggtatttgaagcagcttctagcaccaacacattggcaggaccagcagcgaggcaggtcattcaaccaaggcatctgggaatagggaggagatctcagccaccttctgcttctactcccttgtgacaaagggggagggggaggctcagagagctgatgttcctggtcctaagtcgcctggcccaggactgacattgaccaccggaaagtgctctattcgatttaacttgacatatttttcctactgacaggcatacgatgaaagaaaacaacaagctttatagcatagttcaggatgacatttatttcgttgga

SEQ ID NO: 1822 - DNA, 616 bp, Rattus norvegicus
  Genbank Accession No. AI102955
tattgccccaatgaatcttgaaaatttattatttgggagaatatcagatattgatctttttgctttatagctcatgataataatcagaaaatatacattttgaaataaagtcaaaagaaaataattacatatggtacatattacagatttcttatttatacatcagcaaagcagtgctaaaagcatatttatggcccacaatcagcaaacgtggacattttgtctagagctgcagcaactcaaatccttctaggtcagtgaagacagagaaatacactgaagggctatcaccgtatctggctgtaaacctgtatttccactccttcccctcccctatatatatatatgcatgtgtttattgcctttagagttctgctggtttaacaatacactacatagccattgccatcatttggtttctaaaaatatataaaatgaatgggaaggcgctcccgcgactgacgcagccatgtcctggcatggaaggcgcactgggaaaatgtggagcagcaatactgagtgaatactgatggccgtgactcgacacagccggcagccttctcccgggacttaaaaaacctttgcggccgctccaacatcagaatggcctcgtgcc

SEQ ID NO: 1823 - DNA, 531 bp, Rattus norvegicus
  Genbank Accession No. AI102972
ccaggccatactttattttacacaagtggtggccccagagccacagggacgtgttctggagagtaggcacagtgcccaaggctgcaggagcctgacaaggggaattcatgccttctccttggtccccatgaccaaattaaaaaatatcacacagcacacactgccacacccatccccctcttccctttcagcatcagccaattcagctttctagccagacagtggctataactggatttacagagaaccatgcagccaagaaaccagagccatgaaggggagaggctttgcattgacttcctacacgcactgtcccacaggagcaaagtgactccaccaagccactgcgtggctggatgatgacaggacaggctttaagacaaggctgggaccccgtacaccatgcctggaagaccaccacttttcaggcaagatattaccagagccaaacacgaacctgaggctactgtgatgcaaagtcccttccctccccaggtcctaggcagtgcccgtggagggctggataatttt

SEQ ID NO: 1824 - DNA, 566 bp, Rattus norvegicus
  Genbank Accession No. AI102977
aaacttaacaactaagtcaatttatttaatagaaaacaaaatacaaaataactcttttcagaaaacagaaatatttaatcctttagcagacatcagaacttgctttgtccttagagcatggtcgatatttttgagtgtgcactcatgattcatcccgttcactatcaacactgcagtgaggtggaagcaggtcattgagggagaaaaatgaccaacgagcacaaaaagttatctttaaatccagcatttcttgtctatcttgtgacttattcaaaattactctttatcataatttgttgatggtgtagggctggaaccctaggtgactggcgcagcgctgaggctcaccctctgcccaccacagtgcttctccccagggtataaaggctgacaaaagtgcagccaatggaagaaccacctttgccgccatcactgcaggagcccatgctcagtcgctacctgcctgcctgcccacagaagcacagcatatggttatggtgcccctttctcctgatacactgggccaccagagtctaaattccctgaacctcaaaattccaagtttt

SEQ ID NO: 1825 - DNA, 390 bp, Rattus norvegicus
  Genbank Accession No. AI103007
aaaaattacacatgctttattgagtgtgcagggcatgaatgagtggatgggataggcctgtccagccccagggtctcactggaggctcagatggggaaccacctgactaaagaaccaggagatagcgaagataacacccagagtcttgggaatgtcagggttgtctgcaaaggcctgggcgtcatccacattcaggtggaccacttcgatgagttctccctcctcagccaggccttcgccaggcccacctcgctgggcatctgtcacctccgcgtagaacatggtctgcctggagccagtcagccctactccagacatgtacgtggcaactttgcgtagatcggcggggaccaggtgatagccacacttttcccaagccttcttgcaggc

SEQ ID NO: 1826 - DNA, 461 bp, Rattus norvegicus
  Genbank Accession No. AI103059
aacactgcatatattccttatcgttctgttgatacaacatggagaactttgtaaggagaaaaaccaaaaggtgctaagagaaaaagaggtgcagaaaccaggtaagaagccaggaagaggctaagataaaccagagacaagaaaggtgggtaggtaagcatggcgatgcacacctttaatgccggaaacatttgggaagcagctagtaaatcctaggccagtctgagctacataatgaaacattctcaaaatatcaaagtaagtaaacagaaaagtgtgggtggagagaagccccctcatctgctgcaacatttaacccttgcagtcccagaagcctagacagaaagctgctgggacaccccattctggcttctcagtacaagtgagaggtcaccgataagacagatccatcaggaaaaggaatacacatgtaggagctgagacagcagccagccttgctg

SEQ ID NO: 1827 - DNA, 521 bp, Rattus norvegicus
  Genbank Accession No. AI103084
agattccattgatttttatttctctaatcgttaagtcatatctcacgaatcagactcacagtttgatttacttgaacaggggaaacaatttcactatattggcataaaagggaacaatgacttagaaaagatttcctaaaaggccatcagaaaaatccctaaactagtcattaaatttaaagtaattggtagggtttttttttttaaatacaattagttggtattatgctcttataggataatgagtgaattttgcattttataactagctactggaatatttagcatgaaaatatttgttaagaccataatggcaacaactagtaaccatattctcagacttcccaattccaaaggcatatacaattatagtatagaaaaatatgtaagttttataaagttaagctttcagatcaaaaagtacccccttaattattaggtttagacataatggaaaatagcccctaaaaatttcaatatagtttacataaagacaaacatgccatcaattactgggatct

SEQ ID NO: 1828 - DNA, 432 bp, Rattus norvegicus
  Genbank Accession No. AI103097
gacaacaggacttcaagatggcgtctatcgtgccattgaaggagaagaagctcatggaggttaaacttacagagctgccaagctggatattgatgcgggatttcacccccagtggtattgcaggagcctttcggagaggctatgaccggtattacaacaagtacatcaacgttcggaaaggcagcatctcagggattaacatggtgctggcagcctacgtggttttcagctactgcatttcttacaaggaactcaaacacgaacggtgacgcaggtaccactgaagaggggtcactgtggagaacactgcatggccgagtgtaaccgcctggcccgctccgatctgcttaaccttcacaccccaaccaagaactagggtccaataaaaggtgacgggactggttcacgtgaaaaataagaaaaaaaaccttt

SEQ ID NO: 1829 - DNA, 562 bp, Rattus norvegicus
  Genbank Accession No. AI103098
cttcttagcaaaatctttttatttggtttacatttaaagtgtaatgtaaaaaattataagccggaatatctgatgatgggagcaacgagaaaccaagtcaaggagtggcatccatttaaaatcaatccaaaggcccgattagaaagctcccaccattctgtaattaaatgtgtccatcttatcccagttgccaaaggtgtctgaagggctcgggctgaagggcgtgtgctgacttcagctgcttcagcggagctctcgccatccagctcattagaaagcgttcatggctctcctcctgttaatgtctctcttgatttggcacacagagcaaacaggacagaagagggtgaccatgtagtcatcacaaatagacccaggaatgccgtatcgggttcggtagagagtcctcatcgccaccgttgttccacacaaacaacattcattcatgtcagctgccacttgacatccaagacaagtgaagcaaaaggtcccacagaggcagactccacagtcactgaagcaatcacacaggctgggctggcagttggaattttggggagca

SEQ ID NO: 1830 - DNA, 498 bp, Rattus norvegicus
  Genbank Accession No. AI103224
acgcgatcatcttcattttatttgtaccgtatttgtaaattgttaatttccatctctgttcaggtccgttccttctatctccctttaaagtctccagagacgagaatgagagggatttgatcttcactaaagtagccacagtcttctcagcaagccccgtttccactacctatcccctagctccccgccccctccccaaagcccttttcagggccatagcaccagcgaggatgctcatctgaccacactttgaccacacggaaagcaggaacttaacactgggcagagctgattttgtgaggtgaacaagatgttggcggtggcaaggaatggcgacagagacaaggtggagtgcacccttcccacacacttgccctggtaggctgtctctaggtcctcagaggcgataaggggttccttccccaaccactactgtctcgccattgatgtaactggcatcttcagagcacaagaaggaaactataccgacacaatcct

SEQ ID NO: 1831 - DNA, 501 bp, Rattus norvegicus
  Genbank Accession No. AI103246
ccacagtttattacaaatccattgaacagtctggaatgtatggggttagagaaaaagatcagcaaaaatggttggatagcaaaaattaagggtaagtatgatcttaacttattattcactctgacgctgtcacttcctttgtcttttgggtttctgaggggctttctttttcctgaaattcttctttttcttgatgatacttttcacatctctgttgtggagccaatcatcacgctcagcttcccacttgagctgtttgaaacttgcattgtctttgttagccatggcgttcatgccagtcgtatcaaacttggagcccatattttcatccaacagatgaccaaactcttcagcagagacaaacaggctggagtcattgaaacttttcttctttttcttttgtccttgaaatgacccagcaaagtcaaaatcatcttcactcttcctcttgcttttcttagtactggctttggggctggcttcaccaaattctggaacatg

SEQ ID NO: 1832 - DNA, 489 bp, Rattus norvegicus
  Genbank Accession No. AI103320
gagataggatttctgtgtagccctggctatcctgtactctatagacaaggctggcccaactccgagatccgcctgtctctgtctgctgagcactgggattaaaggtgtgcactgctgctaccacccgcaacagttcaggatcataaggcactttggaaaggagatggggacagtgaaatctctgagttccagcacagtcttcagttccctctgggctggagtccccatcttgatgtgacagtgttagtgtgctggccccaggaaaggtgtcagacagtggtctgagaggtgccttgcttgcttgctgtgactcttcgcctgctgaggccctggactgtcctgagctcagaccttggctacaggcctctggggtggctgtttctggagcaaggccagggtgtctctcttttgaatggagcgcaactgcttcttctttgctttcttgagcttggcagggttccggatcacttggacaatctcagctttgcg

SEQ ID NO: 1833 - DNA, 539 bp, Rattus norvegicus
  Genbank Accession No. AI103332
cttgaaacccttcatctaccctcagtctgaaggcagggtcaggcgtaggacgggtctcagggtcgcagtcttctgcgggccaccccagagggagaggagggggcgagagacaggaaggaagcaaaccatcaaattgaaaaaaaaaatagagccctttgactttttttcactccctctcccttccggatggctgtgtagcaaacgtaggcgacaccttggaagggacgaagttggtctgcactggcaatttcgtgggttcacagttgtgagcgccgggcttggagatggagccctggtccaggtggaaaacgaaacggtggatctgggatctcaccatctcaaccctcgtcttgacttttctcttccaagccagagaggtcagaggagctgctccagttgatatactgaaagctttagattttcacaattctccagtgggaatatctaaaacaacaggattttgcacaagcagaaagaattctaaagatccagatttcgcttatagagttaccgaggaagcccagatcagtgccccaacg

SEQ ID NO: 1834 - DNA, 646 bp, Rattus norvegicus
  Genbank Accession No. AI103365
aacctgggctaggtttatttattgtacatatatactttattgagatttttttcataaattggttgggagcacttatggtaaggaggctccatttctcttgtcctttcgtactgggagaaattgtaaatagatagaaaccgacctggattgctccggtctgaactcagatcacgtaggactttaatcgttgaacaaacgaaccattaatagcttctgcaccattgggatgtcctgatccaacatcgaggtcgtaaaccctaattgtcgatatgaactcttaaataggattgcgctgttatccctagggtaacttggtccgttgatcaataattgggtcaataagatattagtattactttgacttgtgagtctaggttaaaatcattcggaggattttttattctccgaggtcaccccaaccgaaattttttagttcatatttattttgttttagcccattaggttgtttttatataagttgaactagtaaattgaagctccatagggtcttctcgtcttattgggagattccagcctcttcactggaaggtcaatttcactgattgaaagtaagagacagttgaaccctcgtttagccattcattctaatccctaattaaggaacaagtgaatatgctacctttgc

SEQ ID NO: 1835 - DNA, 686 bp, Rattus norvegicus
  Genbank Accession No. AI103376
atacactatttgtttattttaggtcaaaaagtatttaggaaaagttctccatgttcaaaattaaataggaattgtcttctatatacaggaattatattggaaatatgaagtaaaagtttaattctgcagaattaaaacacaattatagtcattcaaaaagtaaaaaaaaatactgaattttttgtgttaaattcttataattttttagtaacaagtgaacttttctaacatttaaaaaagtattcttttatcaatataaaactattcaaataattatgagaatctcttacaccagaaaaattcacatgatacactcgtgaccccaagagttagatcagcagagcgagcggtgtccctgaaacaaagcgcttctccttttgtctcctccatccctacagataagccttatttcacatcatttacatagaactagaccacactctgagagataagtaactctttctttttgcctctggagctcagggacaatcctcagtcttctttcttggcgtgtctcttagcactacttggaggctctgtgccccgcttggacgctgaggaggcagaaccattggaagacggtttgacttcagctttcttttcactcaacgaaaactgctgctgctgccggccaaacagcatccgagtcaaggtgtcctcgaagggcgtgagagtcacagcagcat

SEQ ID NO: 1836 - DNA, 443 bp, Rattus norvegicus
  Genbank Accession No. AI103396
attaatttcattttaacattttgtcttcaacaattccagagattggtatgagaatgaggataattgaaaagtagctgatggaggctagttggccaataatgataaatgggtgttctactggttggcctccgattcatgttaagactaggaggttggctactaggattcagtaaaggatttgggtgattgggcggaatgttaagctgcgttgttttgaagtatgcaggaatggtaggaaggctaagattaggattgataagattagggctacgactcctcctagtttgttgggaatggagcgtagaatagcggccgcaaaggtccttgtcctttttatcactttttaaaaacccgtgagatgggatcaacattgaaagtggggatttttttttctaaagcaatcattacatgagaaataaatttatataacccctcctcgtgcc

SEQ ID NO: 1837 - DNA, 482 bp, Rattus norvegicus
  Genbank Accession No. AI103403
aaggttataaaactgctttaatggaaagtccccctccccccaatacaccatctgggctggggtagatgtggccagggctggccccaggacaatactgagcctgtagtcgttaccaaaatatacatctgtcaccataaaaaaatgctgcaccgcctcagccccacaggtataaaatcataaatatttacactcttccatgactttcacagaactgaggtgcagggtagctgagggaggaaagatgttctgaaagttcttggagccaggtttcttgaagcggtgcaacggtgagctgccatagtccttggtcaggccctggtcctcctgtccctcacgaggctaggatggaggtgggcgtccaggaaggacattaaggcctagaggtcagcccctcaactgggcatagtcagaggcgggcagagaacaaaactttggtccaaaatttgaaggtaggacacccacaagcctcagggttcaagttg

SEQ ID NO: 1838 - DNA, 512 bp, Rattus norvegicus
  Genbank Accession No. AI103410
cttgtacaaaacactttattatagagaagagttggcttatgggctcaaacatctagatctgggtgtctattctctttcctgttttgtctccagcactgggagctagggtccctcctcatctataagttatctctgtgaacagagggggtcttccccaacaccctgcagttccagaataagtctacaggctgaagtggtctgaccatacaagaaaagctctttacaaaaggttctgtggggcagaaaattccagaggccatcctgccagcagaactgggctgccagctcagtggtgggcagggctcactggcaggtcaaccatgtgtcacccaaagtctagccatagcagaatgaaagccgagctgtaccgatcactgggaacagtggggtgacaaagttgtcagtcacaaggtgcctttctgggtcatggcaaatgtgggtttggacttctggtccttaggccacaagagagccactgggcggtaagccaagcctggtgtgggggaaaggcc

SEQ ID NO: 1839 - DNA, 412 bp, Rattus norvegicus
  Genbank Accession No. AI103415
cagacacggggctatttattaataaggagacagacaaacacttagccggggagatttgaagcttctttggcctgcactggccctgctcttgctcagcaggctgtctttgcagatgtccaagatgacctaggctttgcatccagacgggaatctgagtgctcctgctggctcttgtttaatcagtgtcccagtgtctgagtgggaaggacccgcaaaagcatacaggtataagctttttcccaaagggcccttcttggataaaaccatgtcctgtgacccacagcagaggggaaaactgctttctccacagcaatacctcaccctcaggggcgtaaagatgcctctgccttgacttgacacctaaaattccaacaatctgttttcccacactgaggttggaggatcaaggttt

SEQ ID NO: 1840 - DNA, 541 bp, Rattus norvegicus
  Genbank Accession No. AI103441
atatatatatctatatttttgtattggggggagggagtagaaaagaaagcagcccctatactgggccctattcagtggcagcttcttgttccatagggttaaggaagactttgaggaaataaaagttgtttggaaaaatccaggtgtagttgctttgtatgctgtgatgggtaggagagatgaagtgaagtgtgaaggcccctcacaccctccatcttgcctcagactatgtcctggaagcctggggcggagaaaacgccactttcattcctgcttcttggggttatttactgccacgtagtgatagaggaccacaagcaagaaaagcgacacgcccagcatgttggcgaagatggcgagctgcacgtccgtgatcatcctgtggacaaggggaaggactgagcctcggttcggacactccttgctctctcaccaggctagatccttgccaccacgatccaacctcctccgggttcgcctgtgaaacgaagcctgggagcgtctcacctgactagcttcacccgactccgaccctcgtgcc

SEQ ID NO: 1841 - DNA, 635 bp, Rattus norvegicus
  Genbank Accession No. AI103465
tttttttttttgcctggggtctggttttattattacttgaataactgacttagctagaatgttcaggatacacagagagaagtaggaaagacagaacctaaacgcccttttcttcagatgaactaaggttaatcctggggtatttctgctagtctttcctccctgtacaactaaagctaactttagttagctaaaaatacaaatatctacccctagctttctcttgcgttgttcaatattcttcagcccctgttttccctggactagaggcgggctacagccagaggttcttcaaggaaaagtgaacactcagggtgtttccagttctcaggtgtcagggacatctgtctccagtggcaaagagttcataggtcaattgttccctttgctttgaacttcttggcagaccgctcacttgcccgaagctggaatttgcttccataaatgtaggaaatgaagtcatcaatttctatggtgaacacacaattttgcttagggataactttcaggtggtcttctttggtgatgatcttgaagacatgcttggtcttctgcagaaggattcccgtaactcccacataggaggggcacttggatttcgtgactgaaataacagcgccatgaagatctgcctt

SEQ ID NO: 1842 - DNA, 484 bp, Rattus norvegicus
  Genbank Accession No. AI103496
aggtttcaataactttattgggaggtttttattttctgtgaaatacactagaggttggggaagggttcatattcactttgcaagggaagggtttcccaccactaaaggaaaaggcatggggcagggcacactggggtttggatccactttcctacctccttctgctttgctcacattactttttctcagtgaacacaatacaaaagaaattcaaaacagaccaacctccagagggggtcacatctaaaccttctcccagcccaggctttgcctgggctgggagaggccagggtagctcactctacagccctaggctgcacagaaaggctgagggctcagacaggtactccaaagttaataaattagaataaattataaggagaaggaatgcaattttgtgctgggagggtcccttctctccaacacataaaagttgggggaggagatggggtatctccaaaggcctctacatttgggactaaaa

SEQ ID NO: 1843 - DNA, 504 bp, Rattus norvegicus
  Genbank Accession No. AI103556
aaaaaaaacttcctttaatcaaggcttgtaacatggaagagatttgtcagttaaaatggaaagtttccaatacattgaaacataaatccacaagtcatcataaatacaatacccaatagtaaaaaccacaatagcaaattcacaccatccctgtaatagccatgatctgatttcacatgcttctgacggatggcaaaatggcctgctggataccgagcacactggggctttgaggtcacactcatctgacagggctgtggcattggtggctcaactccagaagcaaagcaggtaccagcacattcaaacagtgtatcctttacatatcaaagtgagaagtaagaaagcaacacggtcacgctatcagaaagatggtggggagtaaggacagctgtgtaaagctcgaggcccaaagtcagttggttgctggcttcatttctttggcttcttgggcagtggccgccggaacagtaagatgtgaggttctggttcatggatcatata

SEQ ID NO: 1844 - DNA, 499 bp, Rattus norvegicus
  Genbank Accession No. AI103572
gagacagacatggttacttttttatttgaagcaaaaaaaaaaaaaacccataagttttaataaatactgtggaaaacactgaccaaacaaacatacaaagtgacttcaacattaaaaaaaaaaagcaaaaaaagttctgctttataaccgttataacttattttctttttacaatatttaaatacagaaagcacttgccagcgattttgtaatactgcccaaagcatgacgctgtaccagtcagagcatatttgttggtaatgtctgagtttcatgggaaatgactgaaatggcattttcttgcagagacaaaacaaaatacttgtgaagacacagaactgggtgtcggaactaccttaatctccccttctgccccagtttaatggggacacagcttcaacacttcaaaaatgaagcgtcatcattgggggaaagaaaagcttgttttcaacaagcacggactataaaagatcaaaactgatttcttctctgaaaagaa

SEQ ID NO: 1845 - DNA, 478 bp, Rattus norvegicus
  Genbank Accession No. AI103602
ttaagaagatttattgacagactagtcttgcagtccagaaccgggctgacggaggctcaggaagttgtcatggtacaacccggtgtgggatccactctctacatgggacccctgttccacaaggtggctaaaacgaagaggtggggtgagcatagcttcaggaggcccatgttgggccagcttgaacttaagattccataacatgttggttcccattccttgactgtttgggacatgagagaaactcttagaaagttggtaggggtgcgaaggagcatggcgtacagcccaacagatgtcgagacccgcctggtccatcctccctcaggtcaggttgtcgtgatttgcagaaagggtagagaaccatagaacggagttagaggcaggcagctctgggccccggaacacagaagaagaagcatgccttcctggtgccctttcattctatggtggctgctgcctggttatttgcccttga

SEQ ID NO: 1846 - DNA, 568 bp, Rattus norvegicus
  Genbank Accession No. AI103616
gtcattttagggctgaattttaatagactgtaagttggaattcttacatttaaaacagaaccttaaaattactgactggttcattggttcaaaatggttttatggaaaaattaatctgtaacaaaaacttggcatcagacgcgaagactccgccattttctgagcaaagcgtacaaaggctccagggaccaagaccgagggaggggctcagacatttacaacagcaggcattttctcttcctcttcttaacaggagggggacagagaacggctcggatagcttcatcaaacactgtcttgagtcctcgctgtgtgagtgctgagcactccaggtatttgacagcaccgatctctttcgccatggctagcccctgcgggtaggtaatgggagtcagcttcttctccttcagcttctcaatcgtgtccttatcatccctaagatcaagcttcgtccccactaggatgatgggagtattgggacagtggtgtcgtacttcaggataccactttgcacggacattttcaaatgatgcatgactcacaagggaaaagcaaattaagaacacgt

SEQ ID NO: 1847 - DNA, 476 bp, Rattus norvegicus
  Genbank Accession No. AI103637
ctgcttcatctatgaactttagtgtaaaacatttatgtacaagactgttctctaattcatgccaaggcagccacatctgcatgaacatgggtatgactgtcttcaaaaccagctcttcactgtcctggctggttgctctgtcatgcagagttgcagctgtgatgatgagggtgtgcttctgtattctgtggctggcaagctatggcaggcttagaaaggcgcatgatccggcaatgtctggtcaccacttccaggtgaggaagggagggtatcgctgccattctctctgccgcccacaaccttagactttatggtccccactcgatcttcaaatgacttgaaggttgcagagttcctcatgacaggcatacttatcgagtgtcggatggagtagctgctcatatctccgaacttcctgctgatggcagagcccatggtggacagagcagctgatgttttctgccctgcctgtgaaa

SEQ ID NO: 1848 - DNA, 575 bp, Rattus norvegicus
  Genbank Accession No. AI103641
aacggtttcgtaaaattttattaacttgacctttttccggcacagtgtgtggtgtgtgaatctatgaagattcagagcccacccaggacaattgtgcccacatctcccttctgctgacttctttgggtttaagacacccaactccatactgcaatggcctccttctctcctagactacaaggcacataaggctacacggtgatctttgtttggggagctacagcagcccgatttctcagtcagggcgtgagacagaggaagaaggttgggtctacagaaaagtgatggctgttcaccccaggaaggagaggcagggtgcccctgatatgaggacatatgtggatggttacacagggtgggagaagaggccactctatctcacaaagcagaactggagcagcccctcactagagcttgatcaggaagctatgcatctgtgacagaaataaaaagtccttggaaacatacactgcagctggtgggtggaaaaggggaaggcttcattgctcaggtcagcatcaagcacatcctggagaatgtcacggctggctgggccctggatactgagcatgccc

SEQ ID NO: 1849 - DNA, 500 bp, Rattus norvegicus
  Genbank Accession No. AI103643
gctgtgagaaatctttattgttaatttttcctccattagataagactttcagttggaataagaagccagagcgacacttgcatctttcttcctcaccggctgacctgagaaccactgcttagagcacacaccatcagcacttggccttgaggcagccacgggaaccaactgaagctggcaacacccgagtttacaatcacacaagtgagtggagactgaacaacccattagcccgggggcccagtcacatcgccaggccacactgagccagcagagcaggctgtcagtgtgtgagctcacgccgggcctgcacacgcatggttcctctccaggatgctgtctcctcgggctcttgctggcaggccggggttggtgatgcttctccactgtcctcgctccccggagctcattgggtaaagcatgtcacatccgttaacagggcccaggtgctgaaggacgtgacgttcagattctcctggaacaaggctggtaggctcaaa

SEQ ID NO: 1850 - DNA, 604 bp, Rattus norvegicus
  Genbank Accession No. AI103651
agaacaattccatgataaaaatggagacgtgaatacaaggttatgaggtttctggaatgagaaacactgagcacatcaactgaaataaaaagactcttacacacaaaagaggaactcggggagggcagggtaagcgtgggaaggcggggctgaagccgcccaagggacttgtttactcagaattcttcaaacacaaaattaggattcttgacgctggaaaagctgaagagaatgagtgtcggggatacaggggaaaaaaccgccaaaacaaaccaccctttccctagggacctagtatagtgtcttcttttgaccccagagaatacaaagctcttccggcctcttctagccgctgtcggtattcgagcttctcatagttagaagggtttacccctttgaaaccgtgcataactccccaccagcatccagcaatggtggccgtggaatcactgtctccaccatggaaaaaggctctgtgtgcgagctccttccaggaatcccctgcagccaagaaggcatcataagcaatcatgggggcatcgtgtccactgctgccaccccaacctgagtagcttacttcgatatagaactgatccttttcctt

SEQ ID NO: 1851 - DNA, 575 bp, Rattus norvegicus
  Genbank Accession No. AI103708
accaaaagataagtagaaatttatttcaaaatttaatacaaagaatacaaacctcatggttcctcaaagacatcaaattactcttctataattttctcctaacttttgagctggcaggtagagaccatagaagaaaatgttacacagaccgaatcccaagcgttgcgtatttaagcatcactaactgtactgtattttcccaaaccatctggggagtttcgatgggattgttccagcgtgcactgaacagtagtgaattatcatttccatcctaaacccagtaagccgtctccggctgtatttcacccagctgaaagcacataagccataggacatgaaaggaactgtcactagggccagagggcctgataccttggtcagccaccaaacactcttgttgctacagcaaccagtttgcaaacagaaacgatacaggataaaccaaggctctgtgataacatcagggctaagtatccctttcaaagggtgtaatagtagcaaggtaacttagaaattctatccattggtatggatgaattttacctgagatgaggacagtgatggacattaaatgc

SEQ ID NO: 1852 - DNA, 398 bp, Rattus norvegicus
  Genbank Accession No. AI103758
gagaaagatttaattattgtgcattatatggattgggggaggggctaccaccttgatgtgagttctggggataaaactgaggtcacggggcttatgtgctaagaccttacccactgagctgtcttgctagccaagaagaacatagctttttaaatgccaatgaatcacattttccacaagtattaagactttaatgtctccgaataacaactttttaaaatgcacttcttatttatttttggtttttcaagacagggttaatttgtgtagccctggttgtactggaactcactctgtataccaggctggcctcgaactcagatatgtacctgcctctgcctcccaagtgctgggattagaggcatgcaccacaccactgcctgtaatttaagaatttg

SEQ ID NO: 1853 - DNA, 475 bp, Rattus norvegicus
  Genbank Accession No. AI103782
aatgctctgaaaacactttattacacaaattacattcagattctgaaaaatagtgttctaacagtgtaaccatctaaaaataagacatcccggaaacacaccaactgaggagaaatttaaaaaaagaatttaaatagagactttttaaaatttctctcattgcaatataatgttagtgattttaaaaaaatagaaggagatttagcagcttttcgtcgtgtggcaggttggttctcttcactgccacaggctgagaatgctgaacaggaaaggcaccaaagaaagacactggcgatgggtgtggactgggagaatactgtgttcaagcagagaatagggctatttacatccaccaactaaaacgtctccaaatgtgaatgagctaaacttccctcgggggttggagcgctaccttggaagaggagggcggcttctctacgctaagttcatataaagacaatggcactggagtgaa

SEQ ID NO: 1854 - DNA, 502 bp, Rattus norvegicus
  Genbank Accession No. AI103793
atggcatttgtttttattagaaaatccatttggtaagtgccccaaatccaggcagagcctgtgtagcccccataaccttctaccctcttgagaggagctgccaggggatgggggtgtcagacagtccctcctggacccccaagagttcacattgctaatattataccaacagcaccttggtgggaccctcaagccctgaagctgtggctaaaggcagtcctgtctgtatggcttcagtgacaacagggaggccctctcaaacctgcaggcctgccccttgcattctggttgagttcagggtaagattcaggacaaaagagccaagggccaagagaacacatttgacaccctctggagtctagaagacacccggtttcttgggagaagggcagaggaaactgcattcagttcttcttgggtttgggagtatcgtatttcctcttgctggaataccacaggagcagagggatgcctatggagggcaaggtcatgaccccaaagg

SEQ ID NO: 1855 - DNA, 520 bp, Rattus norvegicus
  Genbank Accession No. AI103854
ccagcctcaaagttttattatcaactgtgcacattcgagttcacatcccatggtgtacagcttataacacggacagtgagagacggcaggggctgcgtgagccatttggtgaaatggtcttgctcagaacccacagtcctgggcaagcaggggcctaagagatcccaggttccacacctcagcattgagcaaatgcacacagagtccttgtgcatacggaactactgaacgcaaacaaatacagggtctccagtttctaaaaaaaaaaaaaagtctgcttttgttacctgtccagggaagaagagacccactggccaaacttgtgaggtgagaggcataaccctgctcatcagtaaggtgcacgtgtctgtgtacacagtagtggtggggctgaccaaggtacgtgtgttcacataggatacacctaggcccaactcagacctagtatttgactctgccattctccattggtacaaagacaaaccctgagctgaatacgaggacacagatcagaagggac

SEQ ID NO: 1856 - DNA, 612 bp, Rattus norvegicus
  Genbank Accession No. AI103954
atctatcatagaaaacatgtatcgtttattacatggacttagaaatcaacacaaatcaatgtcaggcactttttaagtacacactatgagaaatgtctaccaaggatatgcacattgagcaggcaacaccacagagactcactcatccatttttaggaacagtacagagttagagaattagaaagaagaaatattgcataattagcccacctgtatcctgtattacatctctccccgatttcaatccactttagggttaaatataagctctcactttgagtgttggatttcactctttcccttagcctactgtcatggtcttaaaggagcgcacctgctttaaggaacatgacacagatgttttataagaagcatcctgaatctatcacatctgaatctacagaaacacatgatggttgactgctggcttttccttccttcttcttttcctttgtgacagtctttccctttgtagtcatggtggctgatactatttatcccaggttgaccttgtatgcccagcgagtctcctgtctcagcttcctgagtgctgggattagttttaacaccactacatatggcttattttgctgtcttttaaagcccgtttta

SEQ ID NO: 1857 - DNA, 315 bp, Rattus norvegicus
  Genbank Accession No. AI104035
tttccagtgggtttttattagtagttgcatcatgattcagggtcccagggtagggaccatcatatactgagggcccccttttctaacggggagaagggcaaagagcagaggaaaggtgggcggagccaggtcagatcttcccaggaaatgtgccttcggctatgcgggcatcccaggctgagacccatgagacggggcaaagggacttgtacactcgccgggaccactcccaccctcgtgccgaattcttggcctcgagggccaaattccctatagggagtcgtattaaattcggaatcatgtcaaagctgtttc

SEQ ID NO: 1858 - DNA, 394 bp, Rattus norvegicus
  Genbank Accession No. AI104104
aagggcagtgtataaaaataatttaaacatacatactagcaacaaagcaacacgactctctagttataactacaaacttgcccaagattttttttctccccaaaggttttaaatacattggagacaatgagacagacaggcatgtacacatgtacacatgtacacacacacacacacacgcgcgcacgcacgcacgcacgcatgcacacgctcacacacacatgctcacacacatatatacagctcaagtatgttttctgtgcactttagctaactgctacagctaacgtgaagaactggattcctgagtgacctcgaagtggaaccaaaccccccatcagtgtcagatgccaacttcggagaacaagacgtgatttcccctcccaatcttatt

SEQ ID NO: 1859 - DNA, 463 bp, Rattus norvegicus
  Genbank Accession No. AI104113
gtactgtaatcttttttttctttttctttttttctattaacttgagtatttcttatttacatttcgaatgttattccctttcccggtttccgggccaacatccccctagctctccccttctttatgggtgttcccctccccatcctctccccattactgccctccccccagcaatcaagttcactgggggttcagtcttagcaggaccaagggcttccccttccactggtgatcttactaggctattccttgctacctatgaggttagagtccagggtgagtccatgtatagtctttgggtagtggcttagtccctggaagctctggttgcttggcattattgttcatatggggtctcaagccccttcaagctcttccagtcctttctctgattccttcaacgggggtcctgtctcagttcagtggtttgctgctggcctatgtatttgctcttctggctgtg

SEQ ID NO: 1860 - DNA, 512 bp, Rattus norvegicus
  Genbank Accession No. AI104139
aaccctttatttatttatgcttttccattttgtttaaaacaacaacaacaaccttaatataactgacagcccttccccctcacccttgcttgggttgggggttattagtgggggaaacagcccccagggatggggctgaccataagagcccctcagggaggtaatggagcccaagtccttggcctcggggcaagggcacctgtagtgtagtaactggggacttaacagggctcttgaacctctacttgtaccaacatacacacccttggctgacaagggtcaggaagcatgtagggaggggactcccactttcctctgtgttcttacccagcccagtctcacaacttaaggctgggagcaggaaaatggagggtgggcaggtatctcagacaaatgagtactggttattaatggctcgggggtgacccccttcttctccgttgccccctagtggtaactgctggagctgaaccattagggacacctccaagtccccactagagccagcaaca

SEQ ID NO: 1861 - DNA, 473 bp, Rattus norvegicus
  Genbank Accession No. AI104173
aagatttatttatttatttcatgtatgtgagtacactgtcactgtcttcagacacaccaaaagagggcgttggatcccattacaaatggttgtaatgtggttgctgggaattgaactcaggacctctggaagagcagccagtgctcctaaccgctgagccatctctccagccctaggcactgtgtttttaagtctcttaggttgtggtaagatgggtgtccctagcacactttactttgaggtacagcacttgtccaaactggagacaggtaatccagaaagctggtaggggaccttcaattgccctgctgtgtccttcctcttggtggatgctgggtcactgtgctcatcacccggaaccctccctgccttcctgctcctcgatagggagtccatacaggaagcgctggtgggagctgtgggtcagaaacttggctccatgggcaatgcaacaggtccaggcctggggaaag

SEQ ID NO: 1862 - DNA, 498 bp, Rattus norvegicus
  Genbank Accession No. AI104213
attaataacagatatgtttattattacatatccatcagtgcggctttcaataccacttgaaacatgcatgtcaccctagagaagatcggttttccagtgcttacttgatacacattactgcaaagccgttataaattactgaggaggtatttggttaaaaacaacaataaatcacaccacccatacacatcaactcctgttacagctgaacagagagtcgaacagtacttatatggtaattcctatgttaaatggaaaacatcatggacatatttcataattctttactattggtgcaactgtatgtttttgcagatagtttcactattgtagcagatagtttggtacaaaggttgtactcaatttatgtaagtctgacaaactatattttaaattaaaccaattaccaatgaaaaaacataatttttgtaaaatctgttttctgaaaagtctgtacttatggcagtaaaaaaatctctcaaattaatcactaatagg

SEQ ID NO: 1863 - DNA, 624 bp, Rattus norvegicus
  Genbank Accession No. AI104245
ggaagatgacacctttattccccgaccgccacccaggccgcgccagtcagtctacaagactctgcccacagatgcccctgcagctccaggtctctcgcagcccccagcacctcagcctccgcctcgtcccgcaggtagcgacctccgatcccttcgagcttgggcgatgctgctgcatacactgaggtccaagccccctcatcgggggtcttgaacagcagccatcccaggaagcgctgcactgcgcgggtcccccacccagcatgggcgaagagtgcggtgtcaaccacgcctgggtcgacaatgttggcagtgacagggtcgcccagggcactgagcaagcgctgcagccgcaaggagaacagagccagggccagtttgctgccagcgtatgcagccagggcacagggggcagggctctgccccagcagcctggccacatccgcctggcccacccagtgagtggaggagcagacagtgatgacgcgcgacttgcgtccctggtgcccagaggcccgcagggctggcaacagcagggaagtcagcaggaagtggcctaaaaagttcacgcccacgtggcgctcgaatccgtccttggggttgccactcgggtccagcataaca

SEQ ID NO: 1864 - DNA, 624 bp, Rattus norvegicus
  Genbank Accession No. AI104250
agagatataaacatttatttcacaactctgccataatttttgaaggagacgtactgaggacatttaaatcaccggggtgaccgatgctgagacttccgagcaacaaggatcagatgcaccaccagacaggccagctttgcctcacttagagccacctcctttcttggggccattagtccttatttcgtgccagattttcactagaggctccctgttcttccaaatgagttcatgtccatacgtgatataccatattccaaagagggctcccccaagatgtgctgcatgatcaaaaaacttccatcccaggatcatcccagctgtatccatggcaatgatggcttttaaggcattgcctgcagtgaaggtgaaaacagggaggaagatgatggcgagtctcccctccgggatcttggtgcagacagctgcaagcacagtcatgattgcgcctgacgcaccaagtgaaggtccgtatcttcctgtggcaactttgcacacataactgacaaaattcgaaataacacctgcagacaggtacactgccacaaactgctcctgacccagaatgttcacgatgctaattgagaagctccacaaaacatacatgttagctgccatgtggaa

SEQ ID NO: 1865 - DNA, 613 bp, Rattus norvegicus
  Genbank Accession No. AI104261
atttgagggttttcctcttttttacccactttttaaaatatatttttatttattcttgaggactttcatacatgcatacaatgtttttttgtaacaccaatgggcaagcaggactttaaaaaggtcagtggagaaagtctgtgagcactttcacttcaacgctcctccctccctcagttaggctgcctgcatcagcccgctgatactctcttccacctctgacagcttcttcaagatctgcttgaccttagcttcatcaaactccagacacagaaactcagattcccgtccacttctcccaaattccagctctattatggcaacagggctgtgtatttgagttgagtgccgtgactgggacttgccgtccactctccagcgcaggccccgaagcccgttgtcccagcggctctggctcatgaggctctctcggatttttgtcttatggctcttccaaaacttggagatgactgcagcttgttcactggtgatgccgccttgcttcttggtttgagcggtcaggaatgcctctaactggttgaaatccatgtctgcagatgcaatagacttgagaattcccctcatcttcgccaggaaggggcagaattcctcc

SEQ ID NO: 1866 - DNA, 447 bp, Rattus norvegicus
  Genbank Accession No. AI104297
attctggaataagcatgaaatggtaaaggcccaacccttaccccacccccaccccctccaagcccaacaccgaagtgaggagagggcaacagaggtgagggaggaagtgtgcaaagaaagggtacagatggtggtggtggggggtcccaaaaggacctaagcagcacgagacccccaggcacaggcctccaacccagcagatccccctccacaagcttgactccaatggctgtctgaaggtaaggtgggcatcttttggaccccatactggcctcctgagttctgaggcactgccttagcacaccatcaagaacagccctcctttgggcatgtcgcaaagccagtggccaaacagcagtctgcataacccacaaccaagggctacactggtgggaggggccctgatgccaggtaaggcccaactgctccatcatgagacttgaggcc

SEQ ID NO: 1867 - DNA, 569 bp, Rattus norvegicus
  Genbank Accession No. AI104357
tttctctttacacaatgacgtgttgctggggcctaatgttctcactgaacagtagaaaaccaaaatttgtcatttcttaaagaattgagtacaaaaaccttacataaattaaaaggatgaatacatttacaggtgtcgatgcaaacgttcccaactcaaggcaagtaacaacccatggaggtcaggagggaaaaaaccagaacagaaactgggtcctaaggctcggactttcccaccctgttagactggcaagaaaagaagtggtaactagttcaggaacccttgccagcctcgggaaatcctggaagtctgctgttggttaataccctgcacagatcactacatggtgctcacagagatccactaggctggggactgactgacttttccacagatctccccagccaccaagtgaccgagccacatgaactaaggactaaatcaagatatgcacagggtattaaacatataccaagggaacagttaacttgaatacaaggtcaaaaatcagcaacaagttctacgatccagtgctgatatcagatacaagcttcaaggacaaatttctt

SEQ ID NO: 1868 - DNA, 598 bp, Rattus norvegicus
  Genbank Accession No. AI104373
gagggagaattctttattgcgtgaggcgcgttggagggcagcccagcagggcacgacctcagccagctggcggtcagggctgggccggacgccatgggcctcttttcccgtcttcctctggtccctggggagccaccctcactcggcagattcggcatcaaacctgagttcctgcagaacctcactgatggcctccatggttttaattacctttatcttcagctggtgcaacttttcagggtcctgttctgacactcctggtgtccccatcacctgcagcagcgccaccgtggctaggcgcgtctgttctagctcttgaaggttgcgcacgtggcgggcgagcaccggttgcgctcgaggccctgccagctccgcttccactgccagtacctcgcacgaggcagcggcgaaggcctgggtcacctcatgcacgacactccggtaactcgggaagtcatggtgcagatcactgagcaggtactgacggtgagcttggtctagacggcggaaggcctgtgcacgttcattctgcagctgctggatcctctgcaccagcgtagcgatcggggcatctctccaggcccacgtgggctccgca

SEQ ID NO: 1869 - DNA, 528 bp, Rattus norvegicus
  Genbank Accession No. AI104376
ctggggcctcagacttttattccgatgacaaaaatggtcccaggaagaatgactttacagtggacagtgtgagattgagcatgtgccagtgacgagggtgtgggttctctcctcatgggacggtgtggagttgtcacacagtggcctccccctcaccggcctcttcgtcctcttccagcaggctatagctcgcgtggctctggcagggcctctgcagcgggtgggccagcaacttggccacgcagttgtgcagctccagggcggggccagcaagtgctactgcatacttgtagctggtgcccttggtgtccagactgcccatgaaggcgaacatgtccttccagctcatatcgtcttccttttcctcagggccactgtggatgtaaatgatgtcgaagaagaagtagggacattggaacatcttcttcatgggctcagtcaaggagaactggggctggcagggtgggcggctgtagaccaggatggtgcgcacgacgtaggggggtgggatggtttgcacattctctg

SEQ ID NO: 1870 - DNA, 530 bp, Rattus norvegicus
  Genbank Accession No. AI104399
gtcacagaacgtgtttcattattggttctttttacattccacttgcccccccccctcgaggctagagccccctcactgtcttaaaattatgacaaaccatgtttaggcccaggtgtttatttcccttatatgtaggatggttcacaaacacaatacaagggcttcggcactacagggaggggatatcccaggcctctaagagtaaaaggatcttggccttaatgtacactgaaattcagacccgaagactctgaatctctgcatcacacatccagtagggcttgggagtgaagctagagccaaggccatctaagtgacaggccaaagtgacaagaagcctacttcctgtggtccagctatgagtttccatcccaaaccaatggaaggccgttttcacccattagggcccaaagggacagctagttctactccttcccctccttaagaagccatcttggtgacatatttgattttacccattgtaagtggtaaagggattggcctggtccaactattatggcgaggtaaga

SEQ ID NO: 1871 - DNA, 558 bp, Rattus norvegicus
  Genbank Accession No. AI104405
ggattgcgagcagtttattctcaagtcagtacagtgttcaaccaaccggacacacatagagcagtgtgacagtgaacattaggaggtacactcctgttctggaaggatacagtatacacacaggaaaaaatacagcaaatagtacggtattcaaagtaactactgacacttcagatatgacatatttacagtaaaatatgctttaaaataattaaataatttccataagcttacaaaagaattgagataaatattaggagatcctgataatcacaagaacatattcctatgctttcgaataaatgtagttctataaaaagtcccaaaatagagctaatattttaccaccatgaaatgttatcaaattaccaataccaaaatatgataaaatgaacgtgcactgtggaggctgtaccaaagaaaaccgtgccaggctcatccatactgccaagactctgtacaagggtccctaggtgtgttcatgaaggacttctgagagcctggacatgaatacggcagcagaggtgatagcttcttaacgaccttgctgtcctatgg

SEQ ID NO: 1872 - DNA, 532 bp, Rattus norvegicus
  Genbank Accession No. AI104520
cagttcaagttatttatttaagccatctcctcttacgagcaaagggatggaggagcaaagtaatggtcaccatctgataaaggaaagatgagctgagcatccaatgggctttcgtggtccacacacaagagtcagggtccaaatcagtgctgtggtcccttgtcgcctgggcgaagagccaggttctctttactcatcttcatagccagtcggaagcgggttcatgtgaggattgtggaagagggtatggttaccatctccccaggggaagggcttagtcctgatgcggagatgggggtaggcgacgaactcgggtctctcgtgctcttcgtgtcgcgacttcaggaaaacgttgagcatgctcactcccaccccgggcagcgccacgaagtaggtgagggccttccaaatacgagctgaaccctcctcgccgtgggcgccactcgacatgggccgccccacccgtgggagggcccggcccagcagcccagagactcgagacgcactcagcaccgccgacgcccctcgggcc

SEQ ID NO: 1873 - DNA, 394 bp, Rattus norvegicus
  Genbank Accession No. AI104521
aatttggaggctaataagtattgagatgtaaagtttttgatgcattatattttctttttttatgtgattttggctagcgagcattattagtgggaggagccaagttgttagaatgattagtggggtggataatggatcggaggagaatataactgagaaatttaggtaattttcgtcattttgtcataggagtgataagcttaataggctcactagaaagctgtaggaggtgacattggttcaggtttttttgttggctgagagtcatgttagtgggaggagtatgatagatgggaaaataatttttaacattgtagaaggttgaagttttgtacgtagtctgttccgtaagtatttgaaatttttactagtaaggctaaacctactgctgctt

SEQ ID NO: 1874 - DNA, 586 bp, Rattus norvegicus
  Genbank Accession No. AI104523
gtttgtggaaatgttttaattagaggatttgtagatacagtggttaatctgttgcccacaattccttaccaatgaggcttcatgctgggataccctcctccccaccatcttaacacaggatggtcacagaccacattctcatgttacaagattcacatctctggtaatccaaggactgtggtacaaaaggaacacttcatagctggggtcactacagtttgctagaaacatcagttactttagaatactttaactataaaatatattgaatttccatatattaaccatatacatgtgtacctattactaaatgtagtcagttgttacaaaataagacattctgagagcaggctacacacacacaccagcctgaactccccgggtgaggccctgtgccattagctgcaactgtccatccaaactcagctcctgactatactcgtggccaaacatacccacaaggcactggcaacccagtccataccggtgccaccagctgtgtgagcacaagttccctcaattccagagcaaagactcttgactacagacctggccaccccttgtttggtccctgaacttgagccac

SEQ ID NO: 1875 - DNA, 613 bp, Rattus norvegicus
  Genbank Accession No. AI104524
aatttttatttcaaaagcttggatagcttcaatatccaggtcgtggcaaaatcaggacacgtgtaaaataccttacaatacattagattcccaaaaggtaccaaaaagtacagtaaaattaacacttccattactggaaatgtatgacacaaataatataaaattaaaaggtgaaaaaggtgacactggtttcctaagatacagtttactctttacaaccagggtccacaggtccaggctgcagagcggcagcaggaagcagaccctccaatctagaacagggtaacctggtaataaaatcagccccctaatgccgctctgacctctgagacgccacacgctgcctacaacaactagagctctggaatagtaaacaggagagtgatttccgggggaaattttaaataagatgcacatgggacaggccataaaagtttgccaagttaaatttggtacataattgtgttcactccgcgtccaaacaaagcgtgtgcggtcgtcactcggccgctcctgctgcctctcagtatggcttgtagttattctgatgaccaccacgtcgctggctcttcccgtaatttgtactaccctgactgtagtcgtagccggggcc

SEQ ID NO: 1876 - DNA, 596 bp, Rattus norvegicus
  Genbank Accession No. AI104528
aggacaggaataagttttattaattacttttctaggaaatagattcagtaaatacagcacttttggaacatacatgtgctgttacacaagttttttaaatttttaagagctcttcaatgatgtttatcaggaaaatctctcattggtggaattacttctccagtctccagaattgtatcacctggaaatattctgggcttcgtgccaacaatggcatatggtttagtagccacatgatatttgacgtaatagtggacgaaccagagaggtatgatcacatgggaaacagtgaagagactggtgcggtacgccttgaagatcatgtacttccacagggcccggtcccgcaaaaagttattccagaatcgctccaggggccacatcctgcgcgggggcaacacgggctcccgggggctcagctcttggtccttcagccatcgccttctcagctcccgcagctgctgcagccgcagcttctcatcgggcgtgtaccccgacatgtcgccggcgagcttaccagagagtgacagcgcgcacccgaacctggggccggtcacttacgcgcgatcccgctccgcaaagcgaccccttgtgcc

SEQ ID NO: 1877 - DNA, 520 bp, Rattus norvegicus
  Genbank Accession No. AI104552
caattttccttaattttattaaatcaccgctgggaaacccagcagttgggaaattacataattatgttagagttgggtagatgtggtaaaagcagccacatctgggccagctctggactcgagttacaagatactggttcctgttagttatagtgacaaaagcagtcattaaattcttgagatttagacatctcctgtaaaaaaaatcagatttgctaaaaatggagagagtccaagtgacgtactgccagggtacaacagtgttagcactcaacaggaagtccatgccaaaaaaatctttttaaaggcagagtctcactttgtactgctggctggcctggaacttgctatgtagaccaggctgcctcctgagtgctggattaaacggtggaccactaccctggcagttcaggtgattctttaagtgacacagttgcactgaatcatcactacagtcatggccttggcgtgatcacatcattcgcttgatctgaatacctgtcagtccttaccagcagtg

SEQ ID NO: 1878 - DNA, 517 bp, Rattus norvegicus
  Genbank Accession No. AI104570
acatttaaggttgcatttatttctttttaaaaaatgttgaaaaataaacccatgtctgtgtaagtccccaacccttctttctccaagcttttgggggtggacagagtgggcctcctcacagcttcccaacattcttcccacaaggcttctgccatgcccaccccagtccccttccactgcacctgacttattgctaaaaggaaggaaaggtgggtgaggccagctaacacaccagctctccctcagcccccaggctcagtcactaccacacacaaagggtaggcccagaggccaagccctccaaaggcaggcaggcaggcaggcaaggaggcagccattccagtcacagccaggaagccagagtccctgcaggccctgagatctagcccctggctgggggtttacaagctcaactgccaggaacacatgcagaacccacaggcagagtgacagacagggaagcgggttgggaggcacagacggagttgggggagagaaaagggtgagcagactgccc

SEQ ID NO: 1879 - DNA, 477 bp, Rattus norvegicus
  Genbank Accession No. AI104659
ttttacattaaaaaaacttttattgttaatagaaacttttcatttcttaatttttaaataatagaaatatataggagttagatgtcagaaataggtataatttaaaagaaaataatcagcactttttaaatgtgtaaagttagccaactttgtaatacagtaactccacatggcagtgctcatcggcagagaaggaaaggctcagagcaaggactttagctaattacaagtgttaccaattaattacaaggagcgccctgccgggataacattcttcaggccaagactgaggacacaaggtctgtaaaaggcaaagacaatcatactggcaaggtatacaacaaattctggccaactgagatcacaaggctcaacgccatcaggtgtttcctcagaacctgacggcttctcagaagcacggagtgggacattctcctgagggtgtgtcaacagctctccccatgtctggctttcctg

SEQ ID NO: 1880 - DNA, 439 bp, Rattus norvegicus
  Genbank Accession No. AI104675
ggatttttaaattgtattttatttagagtattacagctacatgtggctaatggttacttcacaggacagcatccttgctcagggccttgctcaagaggcagggagcatgatgatcctcaagtcctctggatagagagtgccaaggtacaaaagcacaaaagccctcatgtgggaggaaagtgagcttcatcttgttacatcttgatacgaagagcccccacgcgtatcctcaagggaagtctggtcctgcctgcagtggggctgcacagacttgagcttctcacagacttgagcttctccagttaggcaggtaagtggagaagacaaggccaacctcaggtactgagggtgcagggacccctcggagagtattctctgtatggaggccatcacaggctgttacccttacgggatcttgtttctgggcttgctttcgctt

SEQ ID NO: 1881 - DNA, 373 bp, Rattus norvegicus
  Genbank Accession No. AI104798
atgaacatgaagaaatttatttcacgggaactcacagagagaagggattaaccaagatgttccccatcccttgtaaccaagacaggataccctgaaggcatcagagacaggatcctggagacacagatataaggcagccatagcacagctggcagagaggatcctggcttactgttggggactcccaccagcctggatccccaaccctgagacctgggtgacaaacctcagtgctgctagcataaaagagatccaagctccctttgagctccacagagccttctgcagctgcctcctgtgaaactcaggtgaggccaggaagttccaaacccctgcctattcaactgaaatccctgtgaacacagtgtctgcc

SEQ ID NO: 1882 - DNA, 422 bp, Rattus norvegicus
  Genbank Accession No. AI104897
aaaaacaccaccaaagtaaacctattagcttccatgagctggtcacacctggacagttggtagagctcccgtgtggtcttgagcaaagagcttgagccatcctgcagactgcagcctgagcgctgtgtgcctgcagactgcagcctaaggaccgtgcctgcagactgcagcctgagcgctgtgtgcctgcaaactgcagcctgagcgctgtgtgcctgcagactgcagcctaaggaccgtgcctgcatactgcagcctgagcgctgtgtgcctgcagactgcagcctgagcgctgtgtgcctgcagactgcagcctgagcgctgtgagcctgcaaactgcagcctgagcgctgtgaacctgctggtacccaaggttaagtgatcagctccaaaccatgcaagaaaaaccagcgacacccaca

SEQ ID NO: 1883 - DNA, 547 bp, Rattus norvegicus
  Genbank Accession No. AI104908
ataggctaatatttcttttattatcagtaagagtgagttacatactacacaaaatattggatacaataatcatgaaacaaacattattggtccagaatttaaaacttatgagagaagtgctggcacaggacttaataaacccctcagcccattccgttctactccccaaaagaataacctcccaacttatagaattaaaaacaaaactgtagttccttcgcatctccatgatttcacatcctgcaatgtttggcaagtgttactcgcctcctgtgacctatttctcagcatttcccttcatttcgtctatgcttttgtctgtgcctcttcttaggtaggaacttacgtgctcttaaacatagtcactattacctaagtagtgtgagctacggtgtttcagagagggaggaggggagagcaagtgagggaggaggaaaaggcatatcaaatgagggaacatattaaagtgagtatgagcaaaatggttacatagcctctctactcgatacgtatgattagtattaaatagtgaattgaggataaaact

SEQ ID NO: 1884 - DNA, 503 bp, Rattus norvegicus
  Genbank Accession No. AI104979
atctttcttccataggtttaatttattaaaataatttcctacaaaaatcaggacgaacactgagtgtgctgtgcatccttctcctggttctttacacaggacagtgctgttcagcgggttttgcttttcagtttctgtctggtacgttttccgggtctcttgtttgcccctttcttcccaggccttctggggcccttgccatgagccaccttgccccggaagctggagacatcgtcgtagctctcccgtgtgttccatttggagcctttcttctttccgccaaaaccaaacttctgatttttgtatcttcgtttggcattgggccctttacttatctgctggcctttagctcctcctgcctttgcacctcgttccacaggcttctgatcgccctcaaggaaatccagcttatcagagaagcctttctggtacttcttgatggcattcatcatatgcgctttctcctgctgcctcttgtgaaggacctcagtttgcaccttctt

SEQ ID NO: 1885 - DNA, 542 bp, Rattus norvegicus
  Genbank Accession No. AI105088
attcttcataaagcaagtttatttctgccgaggaggtgtcttatgttcacatccagggaggcagcagaaagaaactccccctctcagaactgggcccctgagtcctcagcagcacgctgtgtttcaaccatctttactggggaccaaagaggttgagatcatgaagagtcaaactagttaccagctgctcaaagttacccaggctccaaggtggacatgacagattttcagggccaagaggcctgctgtgacacgggggctgattgaaggtgagcaaaagatcagtctgatactggggcaaccgaagcaaggcctgatgcagtgtgacatcctttgctacctgttggttttctttagctacctgctgcttgccagaaaggaaccaggcatcttgacagcagcctctcagggataagttctccaaacagagaggctgcacagatagcacgtgcacactcctagccccctgcaccccgccaacgtcctcaaaatggtaccgcgcagccgcttcgccctgcacgtgggcctgcagctccagaagt

SEQ ID NO: 1886 - DNA, 596 bp, Rattus norvegicus
  Genbank Accession No. AI105131
attaggcaggaagagttgatatttaataaagaaagaaagattgaaccgagaccccagcagtcctctggtcagctctttccatcttcaggagtgagtgctccgaggcccggcagccccaccgagtgctggaagacagctcgggcatactgatgtagcacgcggttcatgtaacagtgttgccagggcagcagcccttccaggaagccaatgtggccaccccgagctgtgatgagcagggccacgtagggagacttctgggcagcctgcagagggagggcctgcactggggagaagggatcgtctgctgcattgaggcagaggacaggggtgcagatggcatccaccttggttctcgggcttgaggcatggtaataagccgcacagtctttatacccaaaagccacagatgtgtagcgctcatccagctggcggattgtgcgggcctttatcgcaaagtctacatccaacaccttttcaattgactttctgttcctggccacaagccggcagagtccagcagtgaggggctggttgaagagcagtgagttgagtggggtctccaaggagtcaacggtctcaaaggaatcccaacacgc

SEQ ID NO: 1887 - DNA, 622 bp, Rattus norvegicus
  Genbank Accession No. AI105137
gtctagtggcatcgggtttatttatgggaatgcagagcttaaggtttttcaagaggcacttgggaggcacagacgtaaaggcagccacagctaaaggtggactcttgtttcaacccccagggccacagaagacagcttcatcagatggagatgtcaaagtttactttctaaggcaatcttaaagtctggcattcagggttgggggcacagggcccatccacttctctcctagcaggtaagctagcaactccatgcggtcagacccaaatagcatgtaggttttaccatccacgtgggcaacagtggtgggcagcccaaaggccccatatttgcaggctgccccagtggtctccctgagcttgctcttcaccagttcggtggagatcttattcagaaggtgttgggcttgcgctgtggccattccggccttctctgctgcagacaaaatgttctgggactccgtgatatcttcatctcgggaccaaatgcgcatccacagctctctggacaccttctccagcatctctggttgctccatgctcaccgcggtgaggaagcgcatggcatttaccgttcctttcttaacatattcaccaaagaaatccttggggacgctcatggg

SEQ ID NO: 1888 - DNA, 520 bp, Rattus norvegicus
  Genbank Accession No. AI105144
ggtaagtcagctgctcatttattaaatacaagttttgagcaaactccccccaggcaagtctgacaaaaagtaaccttcctggaatgtttcaaatacagttgtcgatcgagttgatttcagtccaacctttttgctgttttgttcttccttttctgctctaggttcttccccatttagcagttagaacatgtgcactatttcctcacatgccaatgatgtggcatcagtctggcttgtcatggtacccagtgggctttgcccaatggctgcttagcaaccagaaccaaataaagtaatgaagcttttgtagagtggagtgctgagcagcaactggcaccttcgcctgttctgttaggctacttctcaagcggccctccattttcacacacccacagaaagctatattaaacaaacaactgcttgaactctaaatgattttccaagtttagtattagcctcttggtgagttatgagctgactgaagtcttcactttccttttgtcctccagcaaagtcatca

SEQ ID NO: 1889 - DNA, 570 bp, Rattus norvegicus
  Genbank Accession No. AI105145
gagacagtctagcctagaactcactatgttgcccaggccagcctggaccttgtggcaatccccctgcctcaggttcctgagtgttggcatgagtcaccatgtccagtaggaaatgagtgttctgaaacctcaccatacccatacttagaaacacagtatgaaatacactctggaaaagattttgccatttctggcaactcagtcaggtggaaatatctttgctgtgaacactgaaaatacgctaaagatggtccttggttattctggactgcagtccagtatctaagtgaaaactagaacaaccatgtaaaatttacgagtgcagagacttgcactggaaagcccaaacctataaactccaactgtcaccaggacttttgcagtgtcacttctactgtcatgtacacaagccaagtagagaccactgctcatatcttaatcataaacatttcttcttaaaacaatcttacagtctgatttgtaactatggttgaaatatttctctagagaggagccaaagaaagaaaatcattttacaaagaaaacagtgctttgtcttaaatatcctgg

SEQ ID NO: 1890 - DNA, 496 bp, Rattus norvegicus
  Genbank Accession No. AI105188
tgtctccgaataacaactttttaaaatgcacttcttatttatttttggtttttcaagacagggttaatttgtgtagccctggttgtactggaactcactctgtaaaccaggctggcctcgaactcagatatgtacctgcctctgcctcccaagtgctgggattagaggcatgcaccacaccactgcctctaatttaaaaatttgtgttttagttgtcaatgaacaaagaacatatatctgattcaccaggaaaccaggaaggaaggcctttaaatcaaactagaaaactgccattgttggtgggacgaatgtgtatgaccagagctgtggcctgcccatgtctgaacagtgttgctgaggtttacgggtttctccggaacttcctggaaaaacaggttccctggctaccatcggaaaggcacttgtgcacattttcaattgggaaggtgactgcaagacagaggacaattctgacccattatcacactaatgaccc

SEQ ID NO: 1891 - DNA, 603 bp, Rattus norvegicus
  Genbank Accession No. AI105196
cactgataggaaaataattttatttaggttttttaaaaaagttaactttcacatataaatttaaacttaaagattacagtgtatattttccaaaaggagcgcccctgaagggtggccagacaagctcgccgagtgggcacagggacactcgctccaaaaggagctcaggtggaagcgctttctttaatcttccacagtggcccttccctgttcctcaccgggcctatgactggtaagaaaacccacaaccatcactttggggcaacagcatctcactatatgggaataagaaacatgtctaggaatgaaagcacaaagctcaatgatccacatatcccacaacaatcattacatctgcagcaacgtataacaggagtattggatagttcaaaaattcttgtaaaaagggccaaagaacacaaaatctgtttaaaggtaatttctgtaattaaatgagaaaaattattttttccatattacaaatgcctttacactataagacctagaggggttaaaacccttcaaatctgggctctcctttctcagtaaaatgtttggcacaacccttgagctgctgttgaaatcaacagctgataggtttta

SEQ ID NO: 1892 - DNA, 504 bp, Rattus norvegicus
  Genbank Accession No. AI105243
atggtgagaatatttattgagaatggctcattacaaacaaaatatatttatgtataaaaccccctgctatgtaaaagatccctttcatcctcctgtggctagagtgatcagaaccatctagagtttccacgtgacctaagggcctacactgggtcgcacaggaaaacgagaagtctgagcgtcacacgctgtggtaagtatctgatggcaaggcttccttctgtggaggccacttcccatgagcactcacgccggtgtgtcacgcctcatcccatccactcgctgtgaagccttcacctcttcctgtcgcttggtctcagttataccagaccctcctcggaggacacccatatccatagcttctgtgtggtactcctgagcttaaatccagagctctgtggggccctgaccacccagcattaaggcaatgggaatgagaccagactgaaaccaatactactctccgaaacccagagtagctgcctagctgacagcactgccctt

SEQ ID NO: 1893 - DNA, 602 bp, Rattus norvegicus
  Genbank Accession No. AI105294
aacgttggagtttgttttattgcatgacgtttgcataagaaaaagtcttgaaaacagtaaagcatcatgcaatcactgataagcggattttaactgtacacaagataggcagacaatctaaattgaaaaactatttccaaaaagtacataaaagtttcacatgatgagcttttaaatatggtttgtatttgtagtctcacatcgttaaaaagtgcttcaaatgtaccgatgggaagctggtctttataaacggtgatgggttgatgtggggttagaaactgtaaaaactatctgtgtggaattagaaagctaacattgtgatattcaaacttgaatcagtttgcaattcccactcaggtagatatattaataatctaaaaacacctattctgaaaccaacaaaagtctattgaattcaagttatgcatgttggggatgggtctgagggctggaagtgtgggccggccgctgctagtcgatgtactgcgccatccagcggaagccttccccgtagccctgcctttttagcacactgcacatgaacacttccagaggccgggcattcagctccttcagtgacacactgcccttttctgttgtct

SEQ ID NO: 1894 - DNA, 532 bp, Rattus norvegicus
  Genbank Accession No. AI105376
gaatgctctaagagattatattaacatacatttgtcattcgttcattcaaattcaacttaatttcagtaaacgaaggaagatgatggactgaaatacacttacaaatacaagtctacagaacagaatacaatagtccagtaccaatctcaggaatatacactgtgtttactaaataagcataaagctgcttggaggaggaaactggcacggaagagttaatgaatgcactatttaagcagatgctaatggtatgttggaacaaactatgcatccaaactcaagtgaagcggacaaaaaaaaaaatcttacggactctaagaaaaaaggaaaacatttttggttgaaaggggcttagacacatttagcatatacaggcttacataccactgtgtcaaaactatataaccattcatacagataaattctctgtgactctgacatactctgaaagttagaaattaactactgctaccattatttttaaatattctagaacaaaatgccattctcttttatgtaagattaaaaaaa

SEQ ID NO: 1895 - DNA, 649 bp, Rattus norvegicus
  Genbank Accession No. AI105417
accttatagcttgcatatttattgaacaaatacgactaaaatagctaaaatacattgggtacttatggaaggaccacatgttacaaaagcctgcgttttcagcagcgtacaactgcaactctacgtaaatgccacaaatgcacaataccgtttccttgctctatttacatagctgatatatctagtcaaacaaaaagattccaaagaaataacctcgaaacgcctggaaaaaaattattgcttttctttttctaagtcaggcgggtgaggctgcagaaaggaagagttctggtaggtcaattacagttttgtgattgctcccgctaccgtgactgcacatccacccagggccagtcacgagaggacagcctctcacactcttggtagcatccgctcagcctacaacactgaagaagaaagccacactcaagacacaaggaaaacaagtcagtccagtctagagaagaacattccgggaaacagagtaccaacaccttcttagaacatggaaattaaaaacaactccgtcagagctacctcgccaaggagcatgttgaaagtccaaaattgcaccattcatcagtgtctcaagccctgtggcagcgtctcagtcacttaccacaaggaaacaatgagtttcaaactactt

SEQ ID NO: 1896 - DNA, 575 bp, Rattus norvegicus
  Genbank Accession No. AI105421
ctttatcatttattatttttatttggacaacatatatacatatgtacaaaatacctacggtcagaatcctcttttataatttcatttgatttacaaaaaacgggacagcaaaataacttaggtcactaatactgtacaaaaataaaactgattaaacagttgtaaagatcagtatcttacagtgttacagaccattcatccgctgtgaaagaacagcttatctactcaaagtgatgagtactgggctaaatctatctgcaaactgacaaactaattggtttctgtaattgtaactaccaaatataattctcaaaagaagcgtgatgtggagcttaaagccagggtgtcattccacaatggtgaagggctttcttcttccctaaccaaggagaggagatggcttaactctaaaactagtatattttccatgaatgacatctacttacagtattagataaaacggcttctttctttttgaacacctgcgatagtctttcaaaaaattcagttgggttaaaaaagtaaacaaaaattactatcctgcatttggatttttataagttaaatccatgggc

SEQ ID NO: 1897 - DNA, 595 bp, Rattus norvegicus
  Genbank Accession No. AI105435
aaggcacaggctctttattttcctcttttatctgcttagtgttgaacacagaaggtactgctcctgggatagaggcaggaaggctcactgtgaagtccactacaccttctcacacaaggtctgctccgtctcagtggcttctgtgtcactcccctttgtctcttccagttccaaaaaacttaaaacagggtagatggagtttgatttcatccacagttaaaaagcactgagggccaagagccacactgagaattaatttcttcttctttctatagagcatatctgaatgaagaaagacatttcctaagtctcaaatcagtgtctcactttcaaccataaaagctgggtccatccattacttcttgagcaaagtatttctctgttgaagtgggttcatttttcaaccgtgaatgcctgaatcccagtaattgctctccccaggatcagagcatggatgtcatgtgtaccttcgtaagtgttcactgcctctaaattcatagcatgccggatcacatggtactcatcagaaatcccatttcctcccaggatgtctcgtgcctggcgggcgatgtccagggctttcccacagttgttt

SEQ ID NO: 1898 - DNA, 448 bp, Rattus norvegicus
  Genbank Accession No. AI111401
  misc_feature (1)..(448): n = a or c or g or t
tttttttttttttttttctgtgaaaagacaaaaggaccaaactttatttctctacgcagccttggctggcctggaactcactatgtagaacaggttggccttgagctcacagagatcctcctgttgctgcctttagagtggctacctattggcaacaagcgccctcagcagagcactgatgagtcctcagagctcgtcggacgtgatgttcaccttgggtaggttacattctttactagtttgacagctctgaagaatgtcctggtagtggttcttcagatcctcatacaaggcaacagttttctgcgagtgagctaagggtaacaccttttcattcagcagcatttgtatctggaatttttcttgaggggtctgtgcgtcttcacaatggtaaagcacanatattaggtttgaagcatatggtacgatgtgaccacttcggaactcc

SEQ ID NO: 1899 - DNA, 449 bp, Rattus norvegicus
  Genbank Accession No. AI111407
tttttttttttttttttgaaagcaaattaatttataaaaaaaaaaaaggaaaaagaaaagaacaaagaagaaaaggaaattttacagaagactgaacagaagaaaggtgcggagatgcggaggaaggaaacacttggacagaggaggagcagagcgcctggtgggtggagccaagcactgagtcctgggggcagggccatgctgcgctgctcccaaatctttgtcctcatttggggaactcctagctatcactgggttctgtcaggcttgctgagggcagaagttagcagactgtcccactgtcaaaagtaggtgcttaagtgcttttcaaaactcaagggttgcagactccccatcctcttagagctccacctttgtttgatgcctgttgggcactcaagatacaaccaggaaagcaggaagaagagcccacctgaggccccttcttc

SEQ ID NO: 1900 - DNA, 427 bp, Rattus norvegicus
  Genbank Accession No. AI111441
tttttttttttttttttagaaaaggaagtttattggtctttaaatggctcaaattgcaagtaaatgaaccgggtagcggcatcagcccaagacatgtgatgcttctctgtcagctggcttcatagcacctagtacccaggagagggaaggtctcaaagctaattgcaatgttagtggttaggaacctggtcaacaagactgtaatgagtgctcacagccatgctgggcctgctggctggggttacacagggaactctaattttgcacatggcctagtctgtgaaaatattaaatcaaacccttcaaggacaaatacttatgataagctgaatatagtaactagacagcagagttcctgaatgcctgtctccggtaacgtcatgaacacatttgtttcctggaatgcctgagtgtctccttgaccata

SEQ ID NO: 1901 - DNA, 256 bp, Rattus norvegicus
  Genbank Accession No. AI111537
tttttttttttttttttgactttcattctttgtttatttgaaaaagatgtcagaaagcatatgacaacagactgactcagaagcgccaggcaaagggcaagggacaaaagggagcaggagaggtgagagagggggcttctgtccccggagctgcaaggtctggccaggggttaaacagccacaaggagcacagatctccagggtggagaatcaggaggagccaggtcctgggagagcactgtctctggaggaatgt

SEQ ID NO: 1902 - DNA, 513 bp, Rattus norvegicus
  Genbank Accession No. AI111695
tttttttttttttttttgccatataaattagtcagacattttattatagagtatatatatttatatcaaaagcacaaaaagacttttattctgggaaaactaggaagattgtgacattacaggagcatgattcaacaattccagtccatgtccacagtattaggtgccccatcagctgaaaaggacatccggggcagaggtcacagctctgagcgcccaaggctgcttagcatgatttccttaccaaactgagacctgcattcccaaacccaggtacccactttccagatatttgctacaaactgaagtgggcactgagccaaagattacacttgaaaataaccaaagctagtgctcctgtatgctggaagattaatcctcaaataataaggatatcataattggcactgtcatctaattctaaataaaagaatcatcagacatcctggaggatctgcaatgaattacacaggaagaagttaaaatcagaagcatcctctagtaaccaagcta

SEQ ID NO: 1903 - DNA, 425 bp, Rattus norvegicus
  Genbank Accession No. AI111725
tttttttttttttttttattcaactctttgacagtattttattccaaatgctgacctggcctatggttagaaaaaagcaagctgttgtctgatcccacagtgcctgcagggaaagcccagtgccacatctgctctccctcctgatgcttctcatttcccctcagaagctaaacatggctgtaaaaaagatgctgctgcatggctgcccagcgcccacctgggccacacatcagccatgactgaaaggggttggggttgctgacccaggcagggcaggggaggcaggggaagccttccaggaggaggtgagtttgcagccccaccccctgagcacctctcagaagtcttttttaaatttttttcttttgtttttttctgagacagggttctctgtgtagcgcaggctgccctgcaacttgttctgt

SEQ ID NO: 1904 - DNA, 436 bp, Rattus norvegicus
  Genbank Accession No. AI111825
  misc_feature (1)..(436): n = a or c or g or t
tttttttttttttttttgttggtcacagtgcttattgcaccataggtaaataatgaaatgtgtatacattagcaagaaccacagggccagcaagacagcctgccagagtacctgaattaggtccgttacagtctttacaagacacacacacactcactcacacacacacaccacaggatggaaagcaataaattattggcctcattcctgcctgggtcctatgacaaggcagttaaagggcaaagcctgcccagactgcttcctangtctcgccttggttctcagctgggcagtggccagccagtaagggaagccaggacagtgcttgctctccctgngcagaataagtttaaataaaatcgttggcttcttatcagggaagtatttacagaaaagataagtggctcatctggacctaaggaaagtcatcatcatg

SEQ ID NO: 1905 - DNA, 471 bp, Rattus norvegicus
  Genbank Accession No. AI111853
tttttttttttttttatagaattttatctccttttagttaaaaaaaataatcgtaccaccgaatgaagcttttttcattttttgggggagtggggtcgggggagaggtgttgagaggggggaaccaaaaataaaatgcaaacagccaaaagtaaagggaatttatattcctctgtataaacatatccactaaggcaaacaagccagggccacggctgctgagctgggctgggcttggcccctccgattctcacaggttctaagaccgaaaaaataaaacctttgcaagtcctgcaggggtcccgggggctcttgaggcattgtagtaaaacaaagagtcatcgagtttcacgagcagtgacacgaggaacattgcataacggtggccccggtggccgttcacttagactggggtgacgtcacagttccacaacacagcaagggacacgcacgtacacacacgtaaagcgtg

SEQ ID NO: 1906 - DNA, 564 bp, Rattus norvegicus
  Genbank Accession No. AI111854
tttttttttttttttttgtgactgagtccttgggctcatatagccaagagatttaattttagaagagagaaagggtacaagctgggcctgtggaaagagctaccggggttgccaaggtgcctctttgagctttggtcctcccattccccacttgtttgacctcgtcggaccagctcggaacaggcgaggatgaaaaccccgggcaggctacgcgaagtccaggtacaaagaggcacgcacacgaaccctgtataatccctatacagaaatggagccatctctgaaatctgtcctcccgatcaggatgttgaccacgacagcatggccctcctggcacagcttctggccatcacgaagtaccttgaccacttgatcctcgttgtcccgtgagagtatcaatccctgggcccccaggcccatggctgccttgtgataatcggtgtaagccaggctacaggccaaatcactgcccaacctgggcacctgctcccgagaaatctgggtccaacctgcatcgttccctaccaaggctatcaccggtaccttatgtctgacgaacgtgtc

SEQ ID NO: 1907 - DNA, 496 bp, Rattus norvegicus
  Genbank Accession No. AI111960
tttttttttttttttttactttttaaaaaatttatttaaggaacacaaaatgcatctaagtaattttttttttttttgttttgttttgagatagggtctcccaagtcatgggatcaaaggtgtgtgtcgccattactcgcagagtctaagtgattttttaaaaaccaaaatttcaatgtcatctgcttacccaccactctctccaggctcagggtgtgaagacatcttctgatttccgtactaagtgtctgaatgactgagtcaagagcatgcacaatccagtgggctgggcactttgccacttctggctcggaaccctgaccaccctcccgtcccacaccagtctcctaggcccacagtatacacttggagacagctggtgagggtcgcccaagttagaacaagttttcctgtaaaaacctaactagttaggctcaaattccagcacagcctccctggcctgcaattctggtcaatacaactgccgacactgcac

SEQ ID NO: 1908 - DNA, 504 bp, Rattus norvegicus
  Genbank Accession No. AI112012
tttttttttttttttttaatagactgtctttttaatgagtatcttatgtacacacacacaccatacaacaagcttggttccattataattccatcaggtgctcaggtatgttcaatgagctgagatagagttgatgaagcatggcctttaggtcaggactagctgggttcaggcacatcttgtgtagaaatctaaggagcctggggcatcctctcccagttaacctaggaccttaagtagcagtgacctccccctcccccttcagacacaatgtgcccaccctattaacagtataaaaaccacaatacagatgtgaagaaatactgtcttcccatcccttcactaaaatgccaattaactacgctccctaaaccatgatatacattttacaataatccgtagaaaacaacagctaccagtcatgtacttctgcacagctcacatacatgcacagaagagtgggttcccagtcagaagtgagagtgaagacttagagcatccatg

SEQ ID NO: 1909 - DNA, 491 bp, Rattus norvegicus
  Genbank Accession No. AI112059
tttttttttttttttttcagacattttctatactagcgtcctaatcaatgagcaaggaaatagacttttatctccaagtaactaattaaattttttcatgaattttcttccctgaaatggaaatgtctttgggtctttgggtcagcttctgaggtcttagtttgtttggtttggtttggtttcttttcttttcttttctttttttttttggagctggggaccgaacccagggccttgcgcttgctaggcaagtgctctaccactgagctaaatccccaaccccatggtcttagtttgttaataggggatgagacaaatgccaagtgtaggaatgcttttacaggcttgactgtctagcatggtaagcaggcacagagaatttcctgggaccaggataagtagccctagctcttggagtaatttccctcagactggagaggcaattcatctcaaggcatgtaaatggcatcaggtgacagtcaagaatactt

SEQ ID NO: 1910 - DNA, 497 bp, Rattus norvegicus
  Genbank Accession No. AI112074
tttttttttttttttttcacatttcaaaaccatttattagagtcagaccactcagttgtacactagacagaaaccgtctctaaacaatatattggtggttgttgttaaaagtggccttttaaaaggggttcactctgctaaaaggaggctcatcctgataattgcaatcactaacaactagagaaaaaaaaaactaaaccttaagtacaagcttgaaaagtaacttaaaacgtattaattgggaagcggttaagactcaatataactaagtttaacagtaactttacttaaatgacatatcgctcccacatgaatccacagaaaaggaagaccagagggaaaacagaaggtagcaaaggaccacttcggtcaaggggtgaagaaaagcaagccttcactatcaggggagggagaaaaagagaataggaaaggagggactgaaattttcaaagaaactccaagtatttgttacccactgggccaattctccacctaca

SEQ ID NO: 1911 - DNA, 505 bp, Rattus norvegicus
  Genbank Accession No. AI112086
tttttttttttttttttgcataacactgacatttttattagaattcatttgtaacaaatggaacctgtgtcagcaaagaactgattttcatacagacttctttcgccaccaatgtaacgaagtaagaaaataaaaagcacgcctttcattctgtaaaacacttacgcgtactactaattagaggtaattgtattttttaacaagccattttacaagttattttttttttgaattttcagtctatgcatccaaaacgagagcaaagaacacaactgttatctttgtaaaaacactccaagcttgtatggcaaagccgtgtaacagatggataggatggatctgtagccttctgacctctgctggagtatcagggcacccatatacccaatggaaatcaaaaccaaaagagaaaaaaaatgggaaggggattttaaaatgacaagaaagactgaaacaaagctaacccaaaactcagcaggaaagaaaaaaactgtgtgtgctacta

SEQ ID NO: 1912 - DNA, 523 bp, Rattus norvegicus
  Genbank Accession No. AI112092
  misc_feature (1)..(523): n = a or c or g or t
tttttttttttttttttatttgtccataatattttaatacttctccacttttaaatactggttttaattttgtgattgtaacatggaagatccatcttttatatttttaaaaaacatcatcagaatcataaagctattatagttacactctacacactcccaaggtatttgaaaatgattatgttttgagtctgtagatgaccaaggacaacgatccaatacactgtctgtacagcctggactaagtactggcccagcgtctgagccgacaaacgaccgtaagcttcaaggtaaccagcagtctcaccagcgaaccagctcagctcagctcacattctgtagccaccgacactgctattgtataggtgttttaataaagtagtcatgaaaaccaacagatgagaaccgtggctcctttatctttctttgcctccacacacctccctcctgcctttgctgctcctcctatagcaacaccaaatcaagtttctccacctcaaatacggagtcctcaatctctana

SEQ ID NO: 1913 - DNA, 523 bp, Rattus norvegicus
  Genbank Accession No. AI112107
tttttttttttttttttaaccaccagtatttattgaagagaagtgaagttatatgttcgcacaacattgtatataaatgttcataagcatcttattcataatgtcccaaactaaaaacagctgatgcccacaccaataggatatattcatgtaacagaatactactctctgaagaaaactgactcaagtaacaacacagatgcttttcacagcatgctgagtgaaatcacacccaaataaaaaccatactgactgatttcgtctaatacacagcagacagcagtggcttagtgacgattgatggatggtccctactcaagggacctgaggcgacttggatgatggaaatgttctctattttagttgtggagatgagccaacaggtgccacttccgtccaattccttaagtgtggtttcccatgggtggcttcattagaactcatcactgtgcttgaagaggaaacagggccactaagcctgcctcgctcctctgcacctgcacctgcacccgcagggctcaca

SEQ ID NO: 1914 - DNA, 386 bp, Rattus norvegicus
  Genbank Accession No. AI112111
tttttttttttttttttctattttgaaaagtatttacttagtttgaataaattaattgcaaataaaaattaagctacaatatagagcctcaacagaaatgacaaaacacaacacaggacttggtttccttgcctagtcacggaggttgtgaccagaaaacttcaaaatcaattaaatttccttgaaaaaagggtaataaccagcagttactgatacatcacagctaacttataatacaaatcttgacatgcatttcctgagtgaacccaaatgataattttcaaaacaagaaaatttgacaatcaacacaaaataaaagttcatggcttctaagtgacttttttttgttgttttaattcttttttaaatcaaaacgttgatgtact

SEQ ID NO: 1915 - DNA, 527 bp, Rattus norvegicus
  Genbank Accession No. AI112141
tttttttttttttttttgatttaaaaaaaatcataggctcatgtccattttattaataatgtttctataatctcttgacattatacaagcagtttttacagttaagtttcacactgaagacaaatactatttggcttaaggaacagaaagctgagttacatccttcacgtcagacacatacttcaacagtttaagaaaaccttttatacttgcagggctttctttcttcagtaaagagaaattagtaagaattcaatgactctgtaggcagatggctcataatggaacttaaagccctgatccaagccaagcctacacagctgacaaagccaagggcagaaaacgcggagctctttagccctaacctgcacctgctgtgctccctgctttctcctattaaaggctaagcctctgttgaaatcactgaagattaggtgaagggaaaaacactcagaattactaacacgattgacccccgtgtctcatgctcctcaaactggagatacaccttccacagacagcaactg

SEQ ID NO: 1916 - DNA, 326 bp, Rattus norvegicus
  Genbank Accession No. AI112194
tttttttttttttttttccaaaacaccattttaataaggaaacaacagaaataaaagattgttctctggctggagcccagaccccatataatacatcatatgtacaaagtgaccttcggtccagactgagattcctcctggggattttttacttctgttctgtgccacattcctgggtccttggacatctgctcgtctccagaatgtacctgccataacatagtggcaggaagggggaacatcataagtggcttatacgagggataggtgggaaaagggacatttgtaacagccagataatttcaaggaagggctttccctcctca

SEQ ID NO: 1917 - DNA, 491 bp, Rattus norvegicus
  Genbank Accession No. AI112250
tttttttttttttttttctttgcttttatttttatttatttattcatttatttattttttggttttttttttttcctaaaagtgcccaggtgggcttaaggctgccagacacacgcacatctacagcaacaagggtttctttctattccatctacgtctatcaggagaagggagggaggcaggagagagggaaaatctacctcccccaaatcccaccacaaggagacctatgtgccaagcataatggaagtgtgtgctccccaacaactggctccgcactggttaatattctgctggttttcctcagacatctattttgaaaaagcttaaaaaacacaggagatttgaaataattcaatcctggcaaaaatcaaaactccaaaactaggagcaaaatcatctttcactaaattaatcccttttcctttcttttttcttttcttaaacattttattcgtgttatagagggatttctttatcgtttgccttct

SEQ ID NO: 1918 - DNA, 505 bp, Rattus norvegicus
  Genbank Accession No. AI112343
tttttttttttttttttgagttttaatcaagtttaattcttcaaaagaattattctcaaggaacaaattttaaataactggatcagcatggcaaaaaatcttacatcatacaaagtgcagctctgaggacagtaaaacagtaagaaaagggggcacgggtgagccttagtggcagagtgtgtggcatgcttgatattcatggggttctacttcaaccctatccttgaaaaacaaactatcagaaccatgggtaataaatgtaacggggcacagaacttgagcacgtattcattctgccttgcacatctggcttcatcatggaattcgctgagagtgagcagatcaaaatgagagtgcattcatctggatgagatcccttctgagtcactgtcaaataaaaagacgccatctttgtcaggtactccagctctggcctgagtagccatgatggactaaagacactgcccgggtacagacatgggaaagaagagcagatcaggaaaca

SEQ ID NO: 1919 - DNA, 270 bp, Rattus norvegicus
  Genbank Accession No. AI112416
tttttttttttttttttcgaacatttagtttaatttaaaacaggcacaagtgcaaacaagtcacaaaaatttctagggaaggatgcttttgttttttaaaactctgaccctttaaaaaaaaaaagaccttgcaattttcttttgccctaatgcaggtcatcagggagcagaggagtctaaaaaatattatctggatagggtccagacactggagttcttccttggcattccctgtctcacaacagccaggaagatgggaagggaggaagg

SEQ ID NO: 1920 - DNA, 429 bp, Rattus norvegicus
  Genbank Accession No. AI112802
tttttttttttttttttagacataatttttatttaagcatgggctttcagcatggttcagcctagagtgcagtctcagtatagtcggaggctgcacgaccattacactttgctggtgttggctcaacttcatcagaaggtatgactatgacccacagggaaacaacccatgaagagaagaacacagtgaggaaaacatccaccatcttacaagtcactttgttaccacggacacgaaatggcagttactgttagtaaaccagccacggaacactttaaaaaactgttatagacaaggtaatggggacttcattgtgggagggagattaggtgttcatccacaacttttttttttttttaagtagaaaatatctgaaggtcaaacaattttttcctatccacaaaatgatgctacatcaacgtacatgtt

SEQ ID NO: 1921 - DNA, 503 bp, Rattus norvegicus
  Genbank Accession No. AI112863
  misc_feature (1)..(503): n = a or c or g or t
tttttttttttttttttgattgtacattttgtttaatacttgcattgtttctatagcgcgattatagcaatctttaagtttacttttcattacaaatatttgtcaagttttgtttcagaaacatttttcctactttcttgcacatgcgcccagacacactacaaaaaattcattcataacacagttaagggcaaacattactcatgtaaacatcttccattgatttcccgtaatttaaaaaaaatcatagaattatagatatcgaataaggctcatagatttagttcaaattccacaaaagaccaaagatgttttgtttttttttttaaactgcgatgggttgacttttggttacaatcaagcccgaaagcattgcccctggcttctactccataaacgtacctcacaacccagtcaaatgctctttaggctangagaacacagaaaaaccaggagggggaaaaacgtttgaagaaaggagctaagaatcatggacgttactt

SEQ ID NO: 1922 - DNA, 372 bp, Rattus norvegicus
  Genbank Accession No. AI112926
  misc_feature (1)..(372): n = a or c or g or t
ttttggttcttttttttccggagctggggaccaagcccagggccttgcgcttcctaggcaagcgctctaccactgagctaaatccccaaccctgagggtcacagttttaattccactgtcttcatctgcttaagattcctctgtgagagcaaaaaagagtgaagagccaaagaatttgacggctagaagttaggaattctggtggctggttcatagatcacaaagtgctgggagaaagacactatttcctatcagcaaactgtgaggtgttgactcgacacagacatatgaactcacttcaaatgctttcgtctgtgtggaccattataccaatgtggtatgacanacacacacacacctaatangagctaa

SEQ ID NO: 1923 - DNA, 539 bp, Rattus norvegicus
  Genbank Accession No. AI112964
tttttttttttttttttccggaggaaaatagattataatggagagatgcattaactttttcagtggagtagactcattttacaatgttttcgagcacttgatagtctttggagaataggatcaaccattgacctaggtaggtactgagtatttttttaggtaaatcagccataatcctatcaaatgaaaaactcctccttcctacctatctttttatttcctttgtgcatttactaaaattgctccatgtctagacactaaaacaattcacctccacagcaaagcttacaaaatttccagttgtaagattttaaagaatgtccctttctatcgctcttcagtcatcatatcctgatcagctggctttcagagtctacgtagatttgtcttacagggttcattcatttaaaagtgcaaggctgctttagtatccttaattagtagactgactttttctgacttgatttccgatccagttggaaagaactaagcataggactgcatacttgagctctccccgaggagagaatttctgactg

SEQ ID NO: 1924 - DNA, 493 bp, Rattus norvegicus
  Genbank Accession No. AI112969
ttttttttttttttgttacaaaaccttgtattaatcatttcccttcactctcaatataaccatatgaaatatagccatgattcttaattctgtgggaggaaatgagtaataaatacactgtagcaagtttagaccacgagggcgttgtcactggtaacaacatttgaaaactgtacacttgcgaagaacagcatgttcaaacattagtgtgtctgcatcagtagagcttttacatgtaacaaacatgctctttccatgtatgacaaatttaaaaaatatgcattgcttggcaacatgaactaggcaaaaatatttctttgttcactgactttatacagggaaacaggacaaaagtcatgcatgtacaatacagatgcctgcacagggcatgcaacaaaaggacgccttttgaaagtccgcttgcgttaggcataaatatgtgagggttatatattaataagggaggaagtcttctgttcgccatgactaacat

SEQ ID NO: 1925 - DNA, 499 bp, Rattus norvegicus
  Genbank Accession No. AI112979
tttttttttttttttttgcaagttaagaagatttattgacagactagtcttgcagtccagaaccgggctgacggaggctcaggaagttgtcatggtacaacccggtgtgggatccactctctacatgggacccctgttccacaaggtggctgctgttgcaaatatccggtaacatcccttacatggcacttacaggtcactggactgtacctccaggactagacatgccattccagaccctgacctcctggcactggagcacatgtgctgttggggtttcagttttgtttcttgtcaggtataaggaatgtcatcccattctgtatgcgtcataccaaaggaagaaaagtgggcatcgctcctgggagtgattgctttggctccctcgatctgcttggccctgggcacctgtgctttactgaggttaatggggcatgcccaacaataactctcccagggtttctgtcacacgccatcctgccctttcaggatctgtcag

SEQ ID NO: 1926 - DNA, 461 bp, Rattus norvegicus
  Genbank Accession No. AI113008
tttttttttttttttctcatttcaacattctttattaataaaatgtatttcaatgtcaaaaggtatcactgttttcttcatttcatttcattcttctttgccagtcaggttaaggacagttgtaccagactctggagagggtctgccctgagcgcgtggtgattgctcttgctgttctagtaggcacatcgatgttatagtattgatctttggaaaaggcgtagtaatcatagccgtcaggttttctaatgttgggcagtgttatcgcggaagtaacgacatttgggaaccctctccacagtgtgctcaccttgtcttcattgtggaggaagcctttgtcttgataagaggctttgatgggcaccgagtaatggatcctgaaggtgtgtgtctggaaaggtccaacagcacgctcaaagcggcgcctcctgacctgtgctgcctgccccatacactgagta

SEQ ID NO: 1927 - DNA, 503 bp, Rattus norvegicus
  Genbank Accession No. AI113020
tttttttttttttttttcacaagcagtaaaaatctgtttaatgatccaagattctgaaagacacactgatagacccagaattgggtgaatacggcatcctagcatttgctgctggcttaagggttgagggctggcggaagggacctcccatggtggtcaattccaacctaacaggtgcctcagtgccctatctccatggaaaccagtctggcactggcatggggccctaaggagcctgcatgaacatctcttgagatagatttcccattggaaacaaccataggtacccttccaaacccaaagctgtcgccattcctccctattacagagacaggaaatggagtgacggattagaaacaaatcacagagcagtaagtacctcctagtgaaggggagggaagctggagccaccacgctcagaactctgccaagagctttaggtggcctgaactgctagagggagggctggagttacccataccttctgatactgctgacaggaa

SEQ ID NO: 1928 - DNA, 332 bp, Rattus norvegicus
  Genbank Accession No. AI113289
  misc_feature (1)..(332): n = a or c or g or t
tttttttttttttttttccaaaaacaaacgaaccacanaaaggggaggagtgaggtgagagcaacaagagtatttggcatttcctctacttctcctgaacaggttaaggccctgagattagactctgttcttgggaccaggggctccttcaaagcccagtgcacagatgcccctcctggggctggcccttccagttccaccacaggcttgtaagctgttgtttcttctacaccaggttagacgccgcagaccaaatcctaacctgngcagtggcagcgcccaccacgctcatgcctcacagcagtctgtcagtgaaaacatacccggtaaca

SEQ ID NO: 1929 - DNA, 309 bp, Rattus norvegicus
  Genbank Accession No. AI136123
tttttttttttttttttaaacacgaattcattttattgtagttcaaaaaaattttttttttacttcatctttaaatcttagataacccaatctaacgtgtagacagtaggttaagctcaaacactggaaacagaaaagctgacactgagttcaccgtggcctgtcatttagccctttgattgcagtttacagggtgtagtgtgtgtgtgttcgtatctgcagcggtctccataaacacagtaccctctttgaaaatacttgcacactacaccatatggactgtcagagaggtcatgagagtatcgacag

SEQ ID NO: 1930 - DNA, 347 bp, Rattus norvegicus
  Genbank Accession No. AI136372
tttttttttttttttttcagagtgaaaaagacaactgtattggatttacaatcaagatttacaaaaaagggtgggtggccctgggggaaatgctgctccagcacccccagatccaggcagggcctccaggacagcctgtttaacagctgagacggggacctcagtttactgggtccctctggcacccaggcaggtcctgttggctgtcttctggctgctgggagactcccaccttagacaggataagggtggctccatcccggacattgtagtgcatcaaggtgttgatccgtttccaccggccttcccgctgggaggtaaggtccaagtcagacagaatctgggcc

SEQ ID NO: 1931 - DNA, 328 bp, Rattus norvegicus
  Genbank Accession No. AI136523
tttttttttttttttttgaaatcactgaattccacgtttattagcctgcagcgggacaagggcctgctaggtccaaggcatgctcactccccaaaggctgaccgctccaggcccacgcaggcttcagctgctctcaggctctgcaggtaaggtggtgtggtggccctttatgatgaagggtgacattggtccccggtgagaggtggaggaggaggcagatcttttggagcatgtccagaaagccggagtcttgggaggtcttggcctgagatgcctcggtcagttttacttgcaaagtcacctttgttggcccttcgagtgagctgca

SEQ ID NO: 1932 - DNA, 352 bp, Rattus norvegicus
  Genbank Accession No. AI136630
tttttttttttttttttgagaattctgccttctctttatttgtttactaatcaaagttttatgaagcccaggctctccagagccaccatgtggactggaattcagggttcaagatcataaatgcagactgccttagacactcagaacgctcaaagtcaggagacgtaagaaatgaaaaggagactggtccttattgtacaagaggctgaaggtatgggttgtcccccgccggctggaacttgtagccggtgagcacgaagaaggccagggtggaactctccaccaagagctggtacagccactgccactggaagggcactgccactcgaagcagaatggcgatgatgcgcgt

SEQ ID NO: 1933 - DNA, 407 bp, Rattus norvegicus
  Genbank Accession No. AI136672
  misc_feature (1)..(407): n = a or c or g or t
tttttttttttttttttaagtttttaacatacatttaataataataataaatatttttcaagaagaagctgaaagtgtgtcagacaaggccactaggaatagcagataggccatcctgggaacaaatcactcttcttccttcaaaaccaaccggaattctgggcatggctgtgtcccctcagcaaagatggaggccaagtgtanaggcagccagggagccagggtggctaagaaggctttggaaagattgcgactacgcttcaccctttgacccttcataattcactcttgactggaacatgccggaatgaacaaatcagacctccgaggtcacgggctgctctctagcgggaggagcaagcagtgagccaaacgtgagcaatccacagctgctggatgctggggag

SEQ ID NO: 1934 - DNA, 560 bp, Rattus norvegicus
  Genbank Accession No. AI136709
tttttttttttttttttccatggacatgggcttttatttgcagactgctggggaagaggggaagctcgaacaggttggtgagttgatgggaggaaagaacttcttgctttaaaatttagtgcatgttgcctgaaaggttagcgtgtatgagaacagatgtggaagtgagaggagagacaaagagaagatggacactttcctcagggaaggcagacggggatatggggaccagggtgagcaaggaagatacactttctataggagacttaaccaaagtcattgtctggttttccgaacacctacctgccctatccaagttcatgcctccgatgcctaccctgttagctctctcggctagcagcagggaaagggataaggaagtagcttcctccaaccagaattgctcctctgcctgccctgcccttccggccaggatcaggaggtcagaaagtccaggagtgcacatgggaacaatggtgtctctcacctagacctcttctctctctgccacactgcaacccctcacatgaggttacagctcttggccctcgtgccgaatt

SEQ ID NO: 1935 - DNA, 435 bp, Rattus norvegicus
  Genbank Accession No. AI136714
tttttttttttttttttggggacaccatattgggaagcaactgcttttatttgacagtggatgaggaggagatgggtgtcagaagagatggggagcattttctgtcctacgactaaatgacatgaatttactgtacaatgacagtgtacatggctagggtaagtaacgtcaccgacttcacagtcagctgtaaagagtggcatttcactggatgcctcgagagacagttctgttggagtatttgagtttaaagactttgaaaggaaagagaatttggctgaaaagtatccttttctttagttaaatcgaaacaagtctccagtcagcacccagtcaaacacagtgctttgaactttgggtaatttgtcggacagtatactccacgccactgtggaactctggagaacggaaagggcttggcacagcctcgtgccg

SEQ ID NO: 1936 - DNA, 560 bp, Rattus norvegicus
  Genbank Accession No. AI136747
tttttttttttttttgtccagaaaattttaacaggtttatttataattgttataaagttgaactgttgaaatgtgttcactgaaacattttgcttgcattaatgctttacatcttgcatttatattaaaaattcacacacaaatgaacgtggagaaactgccaatacctgattctgtcccctatgtttccactcgcaatcatatacttaggtacctttgacccccatggaaaaaaaatctcgcggccgctcccacttcagattggtaaccctcgtgccgaattcttggcctcgagggccaaattccctatagtgagtcgtattaaattcgtaatcatgtcatagctgtttcctgtgtgaaattgttatccgctcacaattccacacaacatacgagccggaagcataaagtgtaaagcctggggtgcctaatgagtgagctaactcacattaattgcgttgcgctcactgcccgctttccagtcgggaaacctgtcgtgccagctgcattaatgaatcggccaacgcgcggggagaggcggtttgcgtattgggcgctct

SEQ ID NO: 1937 - DNA, 400 bp, Rattus norvegicus
  Genbank Accession No. AI136830
tttttttttttttttttagtttttagaaattattttatttatgttaagtgtgtctgtgtagagatatgccacatgtgtgctagtgccagaggaggccagtgttgagtcttctagggctggagggaattacaggcagttgcgaatcacccaaacatggctgctgggaactgagcagagtcttctggaagagcagcaactgagtgctcttgacagctgggccatttctccagtcccaaatttgttttttaagaggaacatatctgtaaaactgtgaccactagccacataaaatggcttcctcatttcaggccactaaagcgagagaacactttgttttccccagtgctgccctgagctgacttggcttgcagggggtgattctgaagctatttctggagta

SEQ ID NO: 1938 - DNA, 462 bp, Rattus norvegicus
  Genbank Accession No. AI136862
tttttttttttttttttacagtgtgagagagatggaattcagttttattttgtcctctctgtaacttccatttacaccacggccttgtctatcaaagaggaggaggaaaaccttgccttatgccaccaagctcaagtacccacgtacttgttagagacaccaggcagggtatctgtttctccagtttttggctccaagaggttatacttttagtaccagcatagtgaggaacccctggcaaactgctggaaatgtcttctgtgttagtcagtgtaccatcccgtaaagtgcttctggagttaaaaatatgtcaagctgtcaaaactgtcgacgcttttgcaacaagggataaaagatcccaatggacatttcactgagtctttctcagatgggtctcgtaattggcacagctgctttaccctccaaggcgctggccctcaccccaggcgaagcctcctggcc

SEQ ID NO: 1939 - DNA, 449 bp, Rattus norvegicus
  Genbank Accession No. AI136891
ttttttttttttttcttgaaaaaacggggtttattgatttttaaactgcaaatagtcgttacaaaaagtttttttttcttttaaataaattcacacaaagaaagagaaatagaaagcgacggtagtgaccagcaagaggaataataattacattcatctttatgtgtgtgccagttgtttacatcaacatcggaaaactccaacctggagtccagaacctcaaatctgcaagcggaatgtcttgagatgggcacatggaattcaaagggtttttctctctctctcttttttttttttttgttttcccttttagaagctatacataaatggtggttttccttctgtactgtcacagaacttatacattctcagtcctacctgtgaaaggcctaaggagaaaaaaaaacctttgcggccgctccaacatcagaacctcgtgccgaattctt

SEQ ID NO: 1940 - DNA, 426 bp, Rattus norvegicus
  Genbank Accession No. AI136892
tttttttttttttttttacgttccgaatttttattatttttttttaaactctagggtgggcagatagctcagtggttaaaggcacatactattcttgaagagaaccagagcttgataccagcacagcacagcatcgcacagcatagacgacaatgcctcacaagcccagttccatggatctgacgcactgtcctgtcccccacaggcatggtgctcacgtacacaaacccacactcaccgtctaaattatttttaaaagttttaaccattttagactgttggggaggaatcatttaaaatagggtctcattgtgcagcttagcctggccttgaacctgtgtcaattttcttgtctcagcatcccaatgagtcattcgaagaagggccacatgacacctaactaggtaggaagtgattttctttttc

SEQ ID NO: 1941 - DNA, 358 bp, Rattus norvegicus
  Genbank Accession No. AI136972
  misc_feature (1)..(358): n = a or c or g or t
tttttttttttttttttcaaagtaaaagtgangggttgtactttttttttttttaaaaaaacccttcagagggtctgtctcaggtgcagctatctggactcaaacgtccaggaggcagcacataccagtcaatcctgggataggagagcctaaaatcctgctattcccctccactcttcgctcagcaatgtgatttctacacaatgatctttttcttccccactacagatggtggctttggacatcttcagaaaaattggtctaaaaatgcatttggtcttcattctcttataaggacagtcaggatgaggcatcttggctcaaaagtaagttaccgatcacatcgaacgttccagat

SEQ ID NO: 1942 - DNA, 376 bp, Rattus norvegicus
  Genbank Accession No. AI136977
tttttttttttttttttaattcactcaaaattcttcagtttttacaaaactaacagggtggagtagggaagggagcagggaggcagccgcaggggtgggtaggcggagaggcaggctatgcttctgtcttcacctgagcctggttgcctgccacattgttcggctcacccttcatctcagcatcagtgggatggtccacctcaaatacaagtgtggcatttggttgccacagcaatatcccaagccttgatgacctccccttttcccaggtcaaaggagaatttgtccttgcggtccaaactggagtcaaactttgtgccatctagcagccagccagtgtagtggacaaagactcggtcccccctcgtgccgaatt

SEQ ID NO: 1943 - DNA, 495 bp, Rattus norvegicus
  Genbank Accession No. AI137038
  misc_feature (1)..(495): n = a or c or g or t
ttttttttttttttgttagaaaaatacatttaatcacacatgacaaggcctcaaagttttcagtctgcagaacagaacatgccttagctacacacctatggggttttgtttgtcaagcctgcctggcagctcaggtttcttcagctctctcctgtattagcctgccaagtgctagggtcacaggtgtgtgccacacccatcatgttttgaaaggttttctctttagactaaggccctttgctggtctgctcacatgcagaagctgcccatctccctaccccggagagccagccaaacctgcagaccagagccacactcctgctggtccacacatctttcatcttccttgttctgtagccaaggattctggggcctcaggctcatactccattccagcggctttccaggaagagctatggtgccaagagactgtatggagtgttctgatngacctttggtgcttgngccttccactggcttcctgacctcagtcta

SEQ ID NO: 1944 - DNA, 434 bp, Rattus norvegicus
  Genbank Accession No. AI137065
tttttttttttttttttgatgtctggcaagtactttattgaatattcccgaagtccagtggcctgcagaatgcagcttcatcggaaggtgattagcatcatgtgaccacagggctccatctgtggggagaggggcagcttcgccctgacccttcccgctggactggagcctggatcaggcaatcaacaccagtctcccacgggctcctcaccgggtccttcacaaagaactttaagcccaactcccgcaggcacttgtgcagatgtgctgtagcctccctgtgacgccgccaggaattctccaggccctgctctgaaatgagtgctaggctctccctcaggcagtataagctgatgacaggcaacgtatgatgaattactctggtcttgccctcacagccccacaacttggacaaataagtgatgtctgtgtag

SEQ ID NO: 1945 - DNA, 446 bp, Rattus norvegicus
  Genbank Accession No. AI137211
  misc_feature (1)..(446): n = a or c or g or t
tttttttttttttttttactgataaaatagaatctttattaatgaatagtgtttagtcatagtttcaacaactattctctttcaacccggaaatgacggcaacttctgtcccaacaccccaagaacgtcgtcggcttttccttcctaagtctcatacatgagtgggatgaagatataggaactgtgccttggggaggggtcactgtgtgagggctggtgcanaagttgctgggaggggactcctggcattctgtccacccagagaaagacagatttgctcacgctcactgcaggcgatgctggccctgccgagcaactagcacacatagacataaggtctaagctggccaaggccagtgagagaatggatactggttcaggagggcagctgaacagcaagagccacagagagagagattattcctgaggtangaacactgtatgca

SEQ ID NO: 1946 - DNA, 565 bp, Rattus norvegicus
  Genbank Accession No. AI137232
tttttttttttttttttgaaaacacaacgctttttatttattcgcggaatatgaagaaccaaacagaattcagaattctgaccaaaaaaaatcccagataactgcaattacttaaatacaaaaaatattgtttaaaaagactttaagcctgcctctctatctggaatgtataaaattttactagtaatttttttccaatcccttcagcaagaattcccagcttaatacaaatgtaacaccatctttttgattcatgtacaacttggatcacaccccagtatataaggacaaaaaataaatgtacagtaaaaagatcggataaatgagcagaggctttttggtcttgaattcttcacctacaagtaatgaagcagcactgtaggcagcccaaaacacgccaaatagttttataagtgtagacaccatttcaaaagatccaaccaccaaaagtataggggctattacaatgagaggaagtaatgaatatcctataactccaagaacttggccatatgcaacttctccaccaagaaccctagccagtaagaaaattgtcagtgaacca

SEQ ID NO: 1947 - DNA, 345 bp, Rattus norvegicus
  Genbank Accession No. AI137332
tttttttttttttttttccaagttaaatctctttaatatcccaatacaaagtcttgatgcaaaaagacaatgagaaaaccctgggaagttgggaggaggggtttgataaataaacccaccccagcagcttttcaagggagaaggggagacgcaaaggagctagagaagcatcaatccaaagagggagtgcacagctcctaggatttgcccttgtcccctcacttccagttgctgctcatccgccccatcacgaggggctgcaccctttggatatctgctcctttctctttggtccctgggattcaactagctctggcttcaatcccctacaaaaattcctgagat

SEQ ID NO: 1948 - DNA, 424 bp, Rattus norvegicus
  Genbank Accession No. AI137344
tttttttttttttttttagttttttgcatacatttacaatataaatattaaattcttttcaaagtaaatattctttttaacagtgtgagaaaattatgtagcatgggatagcaatttaaagtaaaacctctacagtagtgattcagggaaaatagaatgtttttggggtgggggggatcttacaaggatgagaatgggcaggaggctgagtgtttgccaggaggatgggagcagctttgtcggacccctgggaacagccctggtgagttctttaaaacctaacctggagagatatcaaaagcatacatgcttgcatagtgcattaatcttaaagaagccaacatttcattctcattttcagtagcttaaatgaatagcacttaaaacacaccacacaaaattaaagacttatgcatatatttcc

SEQ ID NO: 1949 - DNA, 399 bp, Rattus norvegicus
  Genbank Accession No. AI137345
tttttttttttttttgtcaaaatattttattgacggtctcacagtcttagaaaagtgggtggtagcacacacctttaatcccagcagtcgagacacaggcaggtagggctagctcaggatttgaggccagcctggtctaccagagtaagacctctctccaagaggacgacagaagctcgtgggctggaccttgctgttgggaagcccaggtccccgtaggctcagtgtcgtcctagtggtcagggcagagtaggcattctatggttgggcttagggttcaggtgttaagtgtctgtctgtctgtctgggtaaagggctctgattcttgttctacaccagggtcttcatgttctttgtacctgaaaccccacttccactgatatgggagtcagcttctca

SEQ ID NO: 1950 - DNA, 540 bp, Rattus norvegicus
  Genbank Accession No. AI137406
  misc_feature (1)..(540): n = a or c or g or t
tttttttttttttttttaaataagaaattttaatatttaattattaattaactgcttccaatattaattaatcttacaactgtgacatttctatggttctttcttccctatcataccagtgtcccttcccaagttggacacacctggatacattaaatgttttattttggtgacagacaattccttttattttagttagatgttttgaatgcctacagtaaatctgcccattccgggaggtcgcagacctcctggcctccccccaagtctatgatctcattttcacagataaacacccacttctcagaccagctacccaaagcatgcatgttctcgagtcctttgcaaaccggttattttgtctacataacctcctcatatcccttcctcacattcttcgtaggcagatgctggagctgttgctctaacctcctgagatatggtggcccgctgggggagtctgtttggcttcatttgaccttcncataccagctcncaccagtccagccctttctctgaggaacctggagaaaaattagc

SEQ ID NO: 1951 - DNA, 537 bp, Rattus norvegicus
  Genbank Accession No. AI137443
tttttttttttttttttcctctatcttcatttattgccacccattctgtctgaaccagcattgggcagaaaagcattggtccccaccatacatagttcccagaccaaaggaggaatcaggcacaaacaaacttcttgttggaagttaggtcagaggaggcttcctggaagaggtgaccttgaatctaaccaggcctcttggccacctgtgcctgggtctatccacaggaccgaggctgatgggaagtcctatgtgaagtaccaggttattgggaagaaccacgtggcagtgcccacacacttcttcaaggtgttgatcctggaggcagccagtgggcaaatcgagctgcgttcctatgtgatgcccaatgccccggtggatgagactctccctttggagcgcttcctagtgcccatcgagagcatcgagcgggcctcgggattgctcttcgtgcccaatattctggctcgagctggaaacctcaaggccatcactgctggtagcaagtgatggagtaggactccctcgtgccgaatt

SEQ ID NO: 1952 - DNA, 416 bp, Rattus norvegicus
  Genbank Accession No. AI137468
  misc_feature (1)..(416): n = a or c or g or t
tttttttttttttttttgaagctacaaagacgctgagcggctcagccagccgggagctgttttattaactgctttggtgaccctgaaacatatgaggcaaagctagataaacacatggtagcctgggggccagcacaggaacagtgagaggtggaagagttggggcaaatggagaggagcctgagggagagtcagggaatancattcctggctgagggaatggggaatggcagatgctgggaatctgcattctgacatgggaccaaattgcttcagtggcaagcggggtacccttggcccgcaccccagttgccatcctcacaaggtcnccagctctgccacgtccagcagtcgctgtcncctcacggcctcgggccccgcacagagtgtgtcgttctgcgagaacatcttatgtc

SEQ ID NO: 1953 - DNA, 432 bp, Rattus norvegicus
  Genbank Accession No. AI137488
tttttttttttttttttgagatgctcgaagtttattgcaaagaggaaggcggggttggtgtagggaggtcaaggagaaaaggaagaggaggaaggaagggaggaacatcgagaggagaggagggtaaaataacccggagactttcttgctgttgagaaggtcctgtctccttttcagggtgatgaagcccaccagacatcacaaacaactgcaacaggttcaccggcaggcagcacaggcaatgcctcatattcagatcttcacagttgggcatagtatcttgtacactctggtgaaatggttctcacagcaggagcatcacagccagactggacattctctcaaaggggtacgagttgcagttctgaaggcccctggctttggttgttcacaaagttcagtcctgtttactgtgatccttgcctcgtgccg

SEQ ID NO: 1954 - DNA, 535 bp, Rattus norvegicus
  Genbank Accession No. AI137495
tttttttttttttttttactcgcttttcaccgactttattggctgcggactgtagcgggctcagcaccggtagagttcacttgctcttcaccttctggctctccgtcttcttgggcagcagcacggcctggatgttgggcaggacaccgccctgcgcgatggtcacacggcccagaagcttgttgagctcttcgtcgttgcggatagccagctgcaggtggcgagggatgatgcgcgtcttcttgttgtccctcgccgcgttgcccgccagttccaggatctcggccgtcaggtactccagcaccgccgccaggtacacgggcgctcccgcgcccacgcgctccgcgtagttgcccttgcgcagcagccggtgaacacggcccacggggaactggaggcccgcgcgcgacgagcgcgacttggccttggcccgcaccttacccccctgcttgcctcgcccggacatgctggacccggctcctgaagttccaacaccggctcgctcagttccgggaccctcgtgccgaattcttgg

SEQ ID NO: 1955 - DNA, 490 bp, Rattus norvegicus
  Genbank Accession No. AI137506
  misc_feature (1)..(490): n = a or c or g or t
tttttttttttttttttgcacagccaaattcagatttattagaaccgcagcacaggggtcctgccgtgcaggttgggctggccttcctgtggcccccaccaccacaattacccagcagctgggttgactactttccctaggaagagcaggctctgggtggtcacctcccanagcagaagcaggaagggcctgttaaagtgggcgtgtggggctgacgtcatgttcagggatgggggctgggagagcaggccanaggcagctgcggcctcagttcccttctcgttcatgtccacgacggccttgtgcgataccctggagacagttttgttgagctgccccataattcctgataggtcggcttccacgtcaaagaggctgctgaggccaacgaggggcaggatctcttccaggttgtaggttgcagaaactgaaaaccgtggcaggtgcaaatccaacagactccacgtntgagtcatctgcaggtgcttca

SEQ ID NO: 1956 - DNA, 522 bp, Rattus norvegicus
  Genbank Accession No. AI137572
  misc_feature (1)..(522): n = a or c or g or t
ggtttttttttttttttgaaagcacacctcacatttattccctttatacaagaatcctgaggaagactgacaagaataggggctagggattctccagaagtctcaggctcatcagctggggtgagttactgtaacctcccttacaatcctggttcttcacaacaagtcgggcagtggttttccaaaccggaccgcgaagcttctcatggttcatcagggtgttccattaaacatgcacggcaaaaaggccgttttctcggcattaaaaacagcaaaaggcagggagtggggaggtgtatgtgttcttanaagtcaagagaggtgtcacgccccgaggggaggagaacgtgagtctgtgctctcttttactttgggttggtgaatcccagcatacattgttcagccagccggtgccaccggatgcccggaacctccttggtgagggagtgtctgacctctcaccatgcatcgagaaaattccgttgtctcttaagacatctcagcttccatttggatgagttt

SEQ ID NO: 1957 - DNA, 475 bp, Rattus norvegicus
  Genbank Accession No. AI137579
  misc_feature (1)..(475): n = a or c or g or t
tttttttttttttttttggggaaattattctttattgaaaaataccaataatactgacagattccaaaagcagttactgtcccagagtacaaagcgcttagctcatttaccccaaacctgtttgcatctcaaggttagcatttctgtaaatcaagatacaaatccgataacttcaataaaacattttccagctttattctttaaggagctgtataccttcaaagtcagggtcacgaggtcagcaggagcacggggcagaatgcacccggcactccctgggcgtcagtttgcagcaacactggaaaccacattgttggtgctggaaacaaaaatcccgcacaagatagctgccctccaggatgagagggatgttggaaacagcatgtcganagatagcttgtttttcttataattaacacactattattttaagattgctctttggaggaaatcttaagaatgcactgtaatttcc

SEQ ID NO: 1958 - DNA, 496 bp, Rattus norvegicus
  Genbank Accession No. AI137583
ttttttttttttttgatgtcagacacattttattataatcttaatacagtctacataaatttgaactggtatttatttgggttcagttataacatagcataaaaaaaaatcaaagcactggttgtctgaaataaagcgagcaatcgacaaacacacttgatttattttgtataaaagggttaagtttacaaccaaacttttataaaaagtttagcataagtacgtcattacatttcaatgcagaaagttatctctgccactgtacaagaaaactctaattaaagagtccacaaggtttcactcaatatatatatatatatatttatatataaatatatacacagcattcagtaggctcgtgtcaaaaaggccatttctgaccaaagacttcatttaagtaaccgaatactgggtccttctggtattcacgctccacctttgaaaaaaggcaaagtctgcttagattgggcaattccttgtgatttttttttttttt

SEQ ID NO: 1959 - DNA, 415 bp, Rattus norvegicus
  Genbank Accession No. AI137586
  misc_feature (1)..(415): n = a or c or g or t
tttttttttttttttttaaaagggtaaacgtttatttggagttagtcttctggcaggtggtattaaggcccttcaggcagagttcaggagctcctgtatggctgcctgctgctccggactgagttgagctatgcattcagtccacaatcctccagaagtctgtacttggcgaactacattggccaggcgtttggcacaggggtcttcatgtttgatggcctcatgcatttctccttctgcaattatactgaatattttcggtagattggtattatttgggccaagaacaattggatgattactttcaatcaggtcacacaggtaactgaaggtctggacagcttcttctttatcttcatgtanggggagccacgacagccagtgtggtaagacctcctccacattcacgcagtca

SEQ ID NO: 1960 - DNA, 490 bp, Rattus norvegicus
  Genbank Accession No. AI137752
  misc_feature (1)..(490): n = a or c or g or t
tttttttttttttttttaaattttaaaaatcagcttttacgatatagaaaaaacccttgctttaaactctgagcaactagaaatggaagacttggctcagctcatccaggggctcttacacagcagacaagcaccaccaacactgcagtgctccccaacttagtaagatccaggactcatttctccaagactgcaatgcatttttggtcacctcatttcccaatgccctacaacagttaccactgatatcccaaggccccatgaagtcagggttataggcaagcccaagggaagcatgtgttaggaatgtggactcatgtgggttttaaggaaaggcaagacgggaatccttaagccaagggcgaagtttagggggcgtttcctgngtatgggaagtttaaaaacaatagtctttcatatcattggnttttgttggtctttaatattttctctgtgtgtagccctgggtatcctggaactctgtagaaca

SEQ ID NO: 1961 - DNA, 440 bp, Rattus norvegicus
  Genbank Accession No. AI137783
  misc_feature (1)..(440): n = a or c or g or t
tttttttttttttttttaanggaaatacatattactttaatatgaaacatcactttgttttatacagatgtctacattttaacagatccttaaaaagtgaggggggaaatgctatttccacacaaaaatctttgtgctgtttgtaaaacattgagaacaggagacaaaggggcccaaaccccatagccattaagggaagctgcagaaccaagtccctccaaagtccattggtcattgacaagcctctgtgagcagagacctcctggcccaactcctccccactgactgngcaaactgtcaagagatttctgtcagcaagggatgtttacacataagacaaggtcagtgtagaatgacagtaacaggtaaaccaacccactaccttccttttgggtgatagaataaagaaggcagctctatgtcagtacaattagtttctt

SEQ ID NO: 1962 - DNA, 221 bp, Rattus norvegicus
  Genbank Accession No. AI137864
tttttttttttttttttcaaagtttctaccagtgtatcagtgatggacaacggagagacatgctgtagagtgtttgcctagttgacaaagctgcttttgaatgctgttaatgaggttgtggcagggataaaggagtacttcaatgtaatgttgggcactcagctactctacaaatttgagagaccacagtatgctgaaattctggccgatccctcgtgccg

SEQ ID NO: 1963 - DNA, 408 bp, Rattus norvegicus
  Genbank Accession No. AI137930
  misc_feature (1)..(408): n = a or c or g or t
tttttttttttttttttaaggcattgttttttagtatattttccctatagacagataggcaggtaggccaagatagcaaagtatgccaaactctaaaagtagcaacacgtgacaagagcaggttgaatccccaagttcctcatcctcgatcccatgggctccttcctcctccccacttctgtttctttgaggaagcaatgtttctactcctttggggttggtcttccacctanggacctggctttggcatggcagttattccctctggactggactctccctcttcatcagtaccttctggtcctacaaaccagatgacctcccctaaaagaatgtgtttgctttgtgagtaaattaatacatttattcctgctcagtgatgttgtgtcttgctccccttctggagca

SEQ ID NO: 1964 - DNA, 558 bp, Rattus norvegicus
  Genbank Accession No. AI137935
tttttttttttttttttcctgcggagactttccgtttattactgcagtagacaatcctctcaaagtgcaacactaggacatgctgccacagcccctgctccttcccttcccacaaatccctggaaattcattcttgggagcactgacaagtttttctctggatgaaaaagtaccccactgccagtgccacagggaaaatacacagacatgaacaaaagaacaaagagaaaggctcttgagaggagtgggccataagggagaacagcacaaacatcattcccccggtctagcagcaacctattgtgctggtcgccttggctccaagggcctctacctcctgtttggaaaacagatacagcataactaggtggtatctcggcctaccagaggcctgtggattcaaaataaatggagagacttctccagttagcttgaaaaaagtgggtggtttgggtaaactgagtgttcaatttccccttacgctgttaggcagagcacctggaagaacatggggttaagctgctgcctgacagtgagaacccctctattgagcacact

SEQ ID NO: 1965 - DNA, 570 bp, Rattus norvegicus
  Genbank Accession No. AI137976
  misc_feature (1)..(570): n = a or c or g or t
tttttttttttttttttccatttaaaaattatttattgaacatctactgagcatctggactcttcagaggctggtcaaatcaaggatccactttttaacagcaatgatttaatcctgctggcatacaaagtttcttctttgggtctaatttattctaatatatgctgtgaatggatgaaacaggatggtttatctagcctatgaacaaaaagacagtgcctgagttaactatataaatttaggcttatcatcacggacctgcttgcaataatctttaactgaaagtttataaaaatacactcaatttanaattttgcttgcacaaccaccctaacccttaacactggtactcttaggacaagatttttctatttaatcacaatcttcctccattgaggaagtaagaacttttggggcaggcagtgctagagattgcacccgagggacttgcatgctangcaatcgctccactcctgagccacacatcagtacccaccctctagcgtacccctaatcactcaccagagtattctangcaagagctgcaccacatgctggggtcactcacat

SEQ ID NO: 1966 - DNA, 513 bp, Rattus norvegicus
  Genbank Accession No. AI138020
  misc_feature (1)..(513): n = a or c or g or t
tttttttttttttttttcctcnacccancagggtaaagtaggtattttatttgtggtccccaacaaggcttcccccgcttgcttccactctttctatactttagaaatctgcatcctgggaggctctgagtgagtgtctgtccaggtcagtgcctgtgaatcttaggaactccagatggtaaccccaaagaagagagagaggggggataagtcagcatccggccaactccctcattgcctctccttcaaatcgaaaggagagccagccttccgattcggtcagatcttgagcccctagaaacttgtacaagttcacggccttcttgttccagttcagaactgccaggcggaactgggagcaccccttacgcagagcgacctcagccacctttttgattattttggtaccaatcccttgaccccgatatttcggcatcacatagatgtcttccagataaatgtttcgtccggtccatgtgctgtagatgaagtagtagagcccgtagcccacca

SEQ ID NO: 1967 - DNA, 398 bp, Rattus norvegicus
  Genbank Accession No. AI138121
tttttttttttttttttagtcttcatgttttaattttatacaatggctagcaggcaccttagtaaccagccagacatcaatttcatccaccatcaacccctaaactacagtaccaggatggctggctaaagaaagaagacggctggctgtagtctgacgcgtgcccagtacaaggtgtctggctgactttgtcctaaataaggctaacattagtgaactaagaacagcgtcgtgtggtgggccgtgcctggccttcaggagcacccctccccgatgcgctggcaggagcgccccactttccggtccagtttcaccattttcatgatggcttcctcgcggccacggcccatgtggtcgaacgtacagtcgtgctgctctgggaggcgatgttacatgca

SEQ ID NO: 1968 - DNA, 343 bp, Rattus norvegicus
  Genbank Accession No. AI138143
  misc_feature (1)..(343): n = a or c or g or t
tttttttttttttttctggctccttttctggctctgggaggagctttgctcaaaagggacaccacctatccttagcatgcttctcttgaggtacagtatgcacaaccaataggagacccaagtcaataatatataaaaggtgcttaaaaaaaaaaaagcaaacagtaacacacacgaagaaatcaaccaaaaattggtggacatctgttttttattataatatagattctgaatattttaaggaataaagagttattgttttattacattgccctctaatctgtatggaataaaattatgactttgtnaaacaaaaaaaaaaaaaaaaaaaaacctcgtgccg

SEQ ID NO: 1969 - DNA, 576 bp, Rattus norvegicus
  Genbank Accession No. AI144586
  misc_feature (1)..(576): n = a or c or g or t
tttttttttttttttttggggccagtcatatctttattagtgtctgcagctgagccagtggtgccctcacatatgctaggaattttagtgggcactctggcctctgagccagagattttagcttttctattggcaattgggacagactgatggaatagtttggaatgggatcaaatggaaagattgcttgccacctacagacaggcacatgagagattccccaagctggtgccaaggtgggtcaggccctanagcaaaataattccatttccctccagagtgaaggaagagaaaaagcttcagatgttaacagtcaaagtcagagctgagctcctgggatcagaaaggcatttcctaatggaagcaactttgtaaggccagaggtcccaaagagctcacctgttccacagctaggaaaccttanggttagctgaactatcataaggaagctaccaagtggggaaaaggtgccaaatgccgtgttctggataagggtgtatgttctgccagtactaactagacaagcaaagtattcattatagttgaaatccagaaacttcataaaaagccccatca

SEQ ID NO: 1970 - DNA, 374 bp, Rattus norvegicus
  Genbank Accession No. AI144591
tttttttttttttttttggattttacaaaaaagtttattaactgttctcctctttctcataaatggaatggataattctttacaaaccagtactcatttaagaaattttaaggagttgccaaaatcacatattgaataacaattccaaagagcaatgggaagccaaatgatattaataatggagtagaggactgacttctgaggcattctagttcagtgcagctatgcaagatgaagtgtttggggaatctcaaaaatggagtttgtctgtctagtaataaaatgaggagaactcggaggaaaggcagaggagccaaatcaaactccacaacaagaacacagcactgacagaaaacctatgaacctctggaatt

SEQ ID NO: 1971 - DNA, 374 bp, Rattus norvegicus
  Genbank Accession No. AI144612
  misc_feature (1)..(374): n = a or c or g or t
tttttttttttttttttacgttaaattaaagaccttattcaaaattgacaaggtagattttcatcttccaaggacacagtataattcttaacagtgaaaataagcgaaatttctgggtaaacataaattcaaattttatgtcaaattttcatggttctagggacgatgtgcagagcctctttacagctctttcctttttcatctaaaagcaagagtaataacaccataataacatttcttctttacaggatgagcaacatggctcccccaggcagtcattcgttagctttccattattaacccgagaatgggtgtgtcnctaactatgaagacagctcacaatttctttaagatggagtagagacattttactt

SEQ ID NO: 1972 - DNA, 510 bp, Rattus norvegicus
  Genbank Accession No. AI144741
tttttttttttttttttaaaaggatttaaaaattatttatttttttattacaataaatatttatcaataaagaattaaaccattgaaaactaaaacctactgccttaaagttggggtccatagcagcagacacaaacataaaatccagttgaaaggtcaagggtcaaggtttctagactccggtgacaacagtcaggtcctgattatatggactaatgacggggaacggtaacacagagaatgcagaacccacactcaaacgacccagagtatgctactatacatccaaccacaagacttggaacattccggtgaagtgaagcaggctcagagctctgcttcagcaagatcaagtatctcccagatggcgtccgcaagcacaccgctcccaaagctcctcccagccgaaagagggcctgggagacccagaaacctcaaccccaaagataatagccagcattctcgaaaccagtctttctggctccaaagttcctggtgaaagggacgtgg

SEQ ID NO: 1973 - DNA, 588 bp, Rattus norvegicus
  Genbank Accession No. AI144797
  misc_feature (1)..(588): n = a or c or g or t
tttttttttttttttttangaccataaatatttttattaaatgtgaaaatacacgggcataaaaatactgcccatattcattgacatgtgtaagccccagttgaaataattttagttccttttgtattaaaacactaaattgagatggattaagtcaggtttgtaccatttaaaacaaatataaaggtaagagtaataatttatcaaacgtctctaatgtttacctcccctgtgcccacatctctttgcacaggtatctcaaccacagacagtgcaatgaaacctgtcgttactgtacacagagccacgcagtggctaattttactcttaaatcattcagcaaatgagatcatctattaaaaaaaaaaatacctcgcccccctttaacatcatttgaaattacagaataaatgctgccactactagaaaaggaatgatacgacctggaagaagatcagattagaggttaccatttcctctcctccctccatcactacggcaaggtcaagtacattcacgaaagccgtcctcactcccgttacccagacgcatctgtaagacagggcggcacacgagggcctgcacagc

SEQ ID NO: 1974 - DNA, 488 bp, Rattus norvegicus
  Genbank Accession No. AI144832
  misc_feature (1)..(488): n = a or c or g or t
tttttttttttttttttagttaggaaaattcctttactatttgtgtccacatgattgttgaaaaagcgaacagtagtaacgtctactttggtaaaaacagtccccgatcttggggggctacatcctctggacgggctttattcccagtatatcgaagcctttggccatgacagcagctacggcttcacacaggagcatccgccacatgttcaccttcagcactttcccagtctgccgatctttctccacacagtagcagctgtcatagaactctgtgaaagtggttgctagctcataaatgtaatcacacagagtgtggagaaacaggtcatctaagatcttctgtaggatttcggggaaccgtaaaatgcaccgtcccagtttccactccttctcgtggtccaaaatgatcttggtttcncgagctgctctctgcagcatttcctcatcgatattggccaggcgtgcaatggacctgattctggtga

SEQ ID NO: 1975 - DNA, 455 bp, Rattus norvegicus
  Genbank Accession No. AI144877
tttttttttttttttttggcagcatgatgaatttaatgcaacagtcatagcagggcaaggggagagaaaggcagatggactatctgcatcatcaagcgagggcttgtgtcggcggctatgtgcatagaccagcagggcgaggcacttaaaagctgctggatgaaaatccacccaggagaagtctgggcctacgtctacagtcactgtcagtgtcattactgtcaatagtaacatacttctcatgaagaaacatgcagcagaaacagtgaaaagagcctacgattgttctagaaatgaacaacacaccagtgtccagagtgtcaattacaaaagccaaagttttacactgtcttactttagtagtggtatgtagttgaaaatctctttaattacaaaagtattggcaatgatagaaagccctggcggtacagagatcgccgcaccgcaccgtcggt

SEQ ID NO: 1976 - DNA, 512 bp, Rattus norvegicus
  Genbank Accession No. AI144936
  misc_feature (1)..(512): n = a or c or g or t
ttttttttttttttattgtatcataccaaagtttattgattacatcaaagaaaaatttctgtaatgaaaaaggcaagttgcattcataaaagatggcattcatgttcattttagaaagcaacaaagtagatgtaaaaaactgcttaagtgaaaaatgtaatatcgcagttccattttataagctgaaaaatgattttatcaacatttgcataaaatctgcactttatatactgcatgttattaaaaaattccaccactaaattatgacttttgcaaatttaggcttacatttatactgttgctggtgtatatgtagtagatatggaatggatatttttttgtttaataggcaacatccttaaacaatagacaacaatttggaaaattacagacattttgacagctcaaaaattattattcacatcatagcaatacggtcctactgttagatttcttgccatcttctgacataagagtagttaanatatagtgctaggaatgctggatggctc

SEQ ID NO: 1977 - DNA, 576 bp, Rattus norvegicus
  Genbank Accession No. AI145037
  misc_feature (1)..(576): n = a or c or g or t
tttttttttttttttttgaaactgtgaagaatgtttaattgttattgaccatggtagcatagaaagaccaggaatgaaaaaagggtacaaaagctgctggaggtgactgccgtggagattgtgagcgcctcgggtcggtcactgacctcggtcctggcgtttgtctttgttctttttcttcttttcctccaacctggggttgagggcgcacacacaggctgacacacctgcaatggcgttggggagatcgggcccccggctccacctgttggcctcacggtcatacacttgcacagccctggagaagggcgtgctctcccagctgtagccccccaggatatagatgcggccctgccacacggncacgcctgactcactgttggcctgcagcagtggcgccacgcgagtccactggttgcactgtgggctgtangcctccacgcccagcacgtcaaagcgctccatggactccatgtggtcgtcgcntgccccgatggaatagatgctgtcacccaggctgcacatgctgtgccagccccgagctgttgtcatgggccgcctctcctcccacacatc

SEQ ID NO: 1978 - DNA, 530 bp, Rattus norvegicus
  Genbank Accession No. AI145424
tttttttttttttttttcagaaccagttatctttattttttggaaagtaagttggctgtgttaacaaaaccacatttgccagtgtgggctgaaaaaccatatgctaggccccaagaaagtcaccctgagccactgtcctgaccctgctggctgacaggcaagggacagccacccaagcctagggcccagtaacagtataacctgtcacaaaattgcattcagcactctctcccaagctttgaaaggtagcagtctaggctataaaaagtctagaatcactgcatagaagtgttaagcctacagcaaaacaacttgtagaaactcaataaattatagatagataaacttgtaacagacatctattaacatctgaaccttctttgcagggccagcccctccctgggcacaggcccctgcctggaacacataacaattagaataatctgtatgaaaaataccagttcaccttgaaatctttaaaaatcttctaaagaaagtcgctatataatctaatcccccacagaagaggg

SEQ ID NO: 1979 - DNA, 439 bp, Rattus norvegicus
  Genbank Accession No. AI145569
tttttttttttttttttcagtgttccatttctttattttaccttcatcaaggcaagccaagtacagatgctgtacattaaaaacataaatacccctcttacaccatgtccacctcgcacaaaggactctacgcactgctctctgaagcacataaccacactaaatgtacaaagagccatccgctggccccacatagccaactccaatcagcaagacgtcgattagggtccatattcccagaccaccaaagctgaagagcttgccgaggccttcacgccactggcccaggtagaagcgatccgctccaaagcccccaagggtgatgctcagagccagagccgtcgaccacttgtagcctccagtccagttgcagtacagcagtttagggaaagtccggttacccaagcaatgaatgtggtcgcgcacagtgcagttggca

SEQ ID NO: 1980 - DNA, 483 bp, Rattus norvegicus
  Genbank Accession No. AI145601
tttttttttttttttttaagggcaaaaccttttaattttcaaacatatattgagcaaaaaataattaaaaccctattagcagcccttttttcctagagggaaaaactacaaggtgtatatgtgggagggaacatgacagtgtgaggcgaagggcggcagagcttgtcctcagcttcttcataactaaacactaaaacagggatctcctgatctacagctttgaaaggccaaagactcagccctttcttgaagaactggggtcctcgcttctctggtattcgtgtatagagaggtggtatctctctatacctgaatgaacctgcctatgactggtagtccggtgcctgtaccctcttatagaggctccctgacaggtatgagaggaaggcatccatatctgcagcatctcgagacagagttcatgcctctgtggtaacccgagcagaggtgaaaaccacacttttcctgtttccgagcctcttc

SEQ ID NO: 1981 - DNA, 487 bp, Rattus norvegicus
  Genbank Accession No. AI145614
tttttttttttttttttaacaagcacatgtcatatttatttgatgctgtagaagtgggcacacagtgacttaagttacaaaggctttcacgtaacatctgtaagggaattcattttaaagtggttttacatgttaattactctggataatttctgaaccctgttcagcagcaagtctcctttcttgatggtctcttggtactgccaattcttgctgtcaggtctgttggtttctactatttcatttactttatcgattttacagtgtagtcttccagcagcaataaacctggacagttcctggtcgatgaattccacacccacaccaaatgcttctgccatatagccaagggttaatgacctatatgactccagcagctggctgtatgcatggatccgcatttctctcacatagtatcggtaatgaggcgcaaaaagccagtcctttttcatctcctgctctacgaccgctaacgactggaagaaaa

SEQ ID NO: 1982 - DNA, 510 bp, Rattus norvegicus
  Genbank Accession No. AI145650
  misc_feature (1)..(510): n = a or c or g or t
tttttttttttttttttatgtgtacaagaggcactttattaactggctggaatgcaattacgtaaccacagggcagggcatacaagagaagggtggggcgcgatggcacacaggcaggcataggaaagcctgggcctccaggctgggagcctctggtttccaacatcctggtatctcacggatagccatagtggggtgaggggagggtcttancatatgataggtaaagtgaggaaccagtctactggcccccaagattaagaagtttggcaaacagagtctctagtttcaagtgaaagaaaccagataggcctagttaacttggaatacacaacacacccacacctcatcccctgaaaccatcccttgggtgaacttcagtttctttcctctcacaaagagggcagtgtgtattactggaagagagaggggtggggaggcagaccctattttcactcattttccaacctcaagttttccgtttggaagccatcagtcaaaggtactctg

SEQ ID NO: 1983 - DNA, 394 bp, Rattus norvegicus
  Genbank Accession No. AI145722
tttttttttttttttttgctagaaaaaccaactgtatgaggtttatggaacaggggtgggggagaatttggtacatttaccattacgtcacaatgggcacaatctgatatacaattttagactagcagtatataaaaatactttttaaacaatacttttggtaggcataggtagcacttttaaaacaaacagctatgtagttttcaggtctttggaaggcctagaaacaattctatttaccgcctttggctagctcgacgaggacctggaaagcaagctctcttgcacgttatgtacaccccccccccccaattctacaggctgcagcttctgcctacacaatgaccactgcaagaggtttccttctgtcttacagtgggtgtaaaatgaggag

SEQ ID NO: 1984 - DNA, 565 bp, Rattus norvegicus
  Genbank Accession No. AI145761
  misc_feature (1)..(565): n = a or c or g or t
tttttttttttttttttgaatcttcaacgactgatatttcagtgaatagtgtatttgttctttcaacttttctgtatgtttggggttttctttaataaaagaaattgtggggaaatggctgtctattgagttgccagttattggagggtgtgtgtaggagccctgcccagtggaattcgacttgggagggtgagggaggggtgagcaatctgtctggggtgaggggggttcactantgatctctccttggagagtacaatgctgatgtttgggttactccatcctgaagtagtttggaagaaggccaaaggatcatgagacagacattaccgagaagggatctaagacctgaagttgcactgagaaagtggcacggtgggggtgacaacctgctgcttcccctgccctgcttccttcattttttccaaccctaagacctaagagtagagaagatggtactacagttgactgggacncacaangggtaaagtgtctagagaccggccaccctgaagtgtctgctatgtttctggtgttgcgcgccctctcgtgggcttctggggaa

SEQ ID NO: 1985 - DNA, 387 bp, Rattus norvegicus
  Genbank Accession No. AI145801
tttttttttttttttttaaaaaatattgctgtttaattttctagtcatgtactttaaaaagccaatacaattaagactttcagttatctttcagctctgcccctgaagtcacccacaagcagctgcagaagcacacaggacttgttcccatggtgggcacatgtgaagggcattgggtatctagaaatgggaatgcaagcctgtgtagctgacaggcagcctctgccctgacagtcttaacctgagggtcacacggcaccgaagtaataagcactcgaggtctgccttctgcccttcctctgcccttcctgcctttgcctgtctgcactggtgggtctgttttctcccgaggttgcccatcatgaaaacttgatttcttggcatctg

SEQ ID NO: 1986 - DNA, 556 bp, Rattus norvegicus
  Genbank Accession No. AI145832
tttttttttttttttttaaacattgacctcaatattttatttgagtattttgaagtttagtgttgtgacaaagagttgagggagagcattcattattcacagtcactcagattgactcagtccgcatggatcccacttgtgagttttaaggttgagtcagtggagttttggataagaaaccacagactcatccatccctgaatgtgttcccatgctcggccactcccatcctcctctccaacactgggatctctcatctggtccagcccatctgttcctttctctcccccttgggccctcatctgtatacgcccatgaaggaatgaaccgagatggccaactcaggttcccttcaggagctttgggaaccctcatcagcccatgaacccgtggaaatcctgcctgggtcacaccctgtggtctcacccagagtctgggcagccagttgaaatctcacagcccaagtggaagtcaggtgactaagaagctctgactctcctgttggccaggaacaaccttcacctagactttcagcaactaaagcaacggattcaac

SEQ ID NO: 1987 - DNA, 480 bp, Rattus norvegicus
  Genbank Accession No. AI145870
tttttttttttttttttaagtgacacaagaaatggtctttatttggaaaacgattacaaaattatcatccaaactcagaaggcacagccaacacatacacacaaagtaaacaaggcaggactgcagcaatagctcacttaacaaaattttatctgactttgggtggaggaactttcccaagtaaaaatcaactggagtgctctgtacaaagctttcctaatgtctaatctcattaatgaattacttgcctttgcagcttttaagtcttgagctaagccttcagaatgatttattgaaaagtcttattcagttcagttttagagaagaaaactacaacttctcaaagtttagtttaacacggtctcctcttggcaagcattagatatctttagcttgactgttcctatttccccctctgtcccagctcttttagatcacgttagttatttttaaggatccatcttttttgacatgtctagc

SEQ ID NO: 1988 - DNA, 352 bp, Rattus norvegicus
  Genbank Accession No. AI145997
tttttttttttttttttgagatttttcttttaatatgcgacgaaatagcttgattgtatattttccaaagtactttccagccacatctcccaaccatacaaaagtttgctcccatctttgaatgcagtaaaagatgctggattatagttccacgcaccttttctttgaaagcaatgtaatactaatggatttaatggcaatacattcctcatctaataaagaaaaacatccacaagtatcagaaacccagttttgaaagatgtgcgttcattttgaactgaatcagcttttgtggtgtttttaaaggcagcagtttgactcacaacttgctgatcaaacacatttctactga

SEQ ID NO: 1989 - DNA, 394 bp, Rattus norvegicus
  Genbank Accession No. AI146177
ttttttttttttgttttaaatccatgtttattacccacagcccattagtatgacatagataacataaactgagacattttctgaggttaaagagacagtctgaagtatcctggatgcctaggatatcctgaggcactcgtgttgagcctcactcacacccgcccaaggttggaagcttagcatggacctgcctcccactggctcgtctcctcagtgccccacccttccccagaccagagacttcattagacagccaaagttatgaagtgagacagtggacagacatcttggttcggtggccatctcggcatcttggtcttttggttcctgtactctcaaattgctttccagagatgggaagtgcatcctttgagggaatgtttaaaagtaatca

SEQ ID NO: 1990 - DNA, 632 bp, Rattus norvegicus
  Genbank Accession No. AI168942
gagggcgatgccattttgctttattgaacacaacaccaccggatatttgtagtcatgaaacaatcgtaagatcaccgcccatgtgccctctaaagtgttaccctcatgcactagatccaggaatccactttacacagccatgataagtaattcgcagctcgtcagccagtatccgccatagttcatctcacaaaaccacgtgtgagaagaaagaagtacaaggaaatataaaaagagttcagaaaaatatttccatatctggtcatgatcttcctggttttctcagtcgtcagtagttgatcatcttgcgaagggcatcatagcacttccatttgtctgggatataaaagggctcaaaaatgtgaggaaacggggtgtcatatccacacactctagatattggagcctctaggttcaagaaacattcttcctggaccgtggagctgatctcagaggcaaagccgcctgtcaagggcgcctcgtggctgatcaacagtcgccccgttttgatcacagacttacaaactgtatccacatcccaaggcacaatggtccgcagatcgatgacttcacaagacactccaagcttttcttgggccatggaagccacctcccggatgacatgaacctga

SEQ ID NO: 1991 - DNA, 637 bp, Rattus norvegicus
  Genbank Accession No. AI168953
aactgaaactcttttattgaattttgtgtatatagagacgtgctagtaaaataatcataagtcaatgctaataaaactaaaatgtttataaacgttctaacagttacttaactactcttctgatgtaatgtttcatttacttgattaattcttttctctaaaagtaatagttaaaaattgccaatgggtaaattatgaatacaatcgtgtacaaagccaacatagtatgttttaccatttatctctttcaagttctgctattttaatttctgaatacaaaggaaactcccagaaaaataaagccaaaagaggcttaagttcgacactattatgtttccaaagtttaccttaaatctacagttaaccagtagatggttggagaccagagtcattccttttataggccagagtgactctgggctcttatgaacttaaccctgaaaggaggcagatgtagggacttcagtttagtttggattgtaagaggggactctctacctagagaaactttgaataatttcaagacttagaagcaaacaataaaaatttacaatacaattaggatataattttttaatataatagacattgttaattaactatacacatatggttagatttcggcagtaaccaagcg

SEQ ID NO: 1992 - DNA, 534 bp, Rattus norvegicus
  Genbank Accession No. AI168975
caaaggttcattgtcacatttattagtagtagctgcagctggactggggcttctatggggactgttgggacaaactttgaggggcaacaacaggagggaacaccattgatggtcagcaagggtcttaaaatgggatacagagcacagtgacggtcaccatggtgctgtcacagcacaaggagctactgggtgctcatttccttcctgaacattccctgagcctcagtccacgatggtcaacgcctcccacaaacctggagcttttggactctggctacttcctggaggtgaagtcacacaggccacgccctgccacccccaatcatggccagtcaattgtcttcagtaggcctcagtactgaacactcgtaactgcctgacacagctgaccctaccctacctagtgacagctggaggcattgtctccattcttgcctgtctgcctgtgacctgagaaagaaatggggaaaagaaacttccactttcccaagaaagctggaaaaaagagagggcagattgtttctgggcaggaac

SEQ ID NO: 1993 - DNA, 481 bp, Rattus norvegicus
  Genbank Accession No. AI168981
gtctttctttcatttaataccttttatataacgtacccgcaattaaaattttgtattcaagttacaaaacagaagagtttaaggcataagatgaacatttttttctctgaaatatgaacatcacaaagcataaaccacaccgtttgacataacagaaatctgttttgtcaggaactatcctgaatgattactgtaagttaacaaatgttgtaaagaaggacagattgagtacaataattctcatttggagaccatggctaaacaacctcacatgtgataggttacatgtaaaaccaaactccagttgcacacaagaacttacaagtgactgtagtcactttcaatagtgatttacgatgggttcagtgtttctaacaaccggggttacaccccatacattcttcacaggatgtgagatagcataaacattataaagttttattttatgcttgggtaataatagttcttttttcctcgtgcc

SEQ ID NO: 1994 - DNA, 640 bp, Rattus norvegicus
  Genbank Accession No. AI168996
atggtttgtaaaaatccattatttatagaaagaaatagttattggcaaaaatctgtccaatcaaatacaatgacttcatttagaatcgagtatgttacaatctaaattaaatacacgggtacagttcagaaatcacacacagatcttcaaaccttcagagttatacattgttcttttcaaatggggggtcgtttgactacaatctaacctggtaagttacagtgggcgctggacttcacacttgtgccagcacatgtactggagacacacatgctccatgtggctttcatttttaacaaagtgctaaaccctaacagagttatgctttccacacaacagttaatggcaccctatcgggcatttactcaccttgctggcgtgactgactatactcacagaaacgggtggatgggaaggagccagggcctgtgcaaaggacagccagaggcttccaaccagattaaaaatgaggagtcgtataagaaacgggtttattagaaaaacatgtagtgtacacgggctaacttctatcaccgggatacaccccggctattttgtaattaaaatctgacaggggtctgatgtcttcagaagttagtggtgactccattcctgttgtgtgcctgggaggagtcctctt

SEQ ID NO: 1995 - DNA, 255 bp, Rattus norvegicus
  Genbank Accession No. AI169007
ataaatattcaatttattcaaatcacataagattaatccaaagccacaggcgtgatgatttcctggtagaatcaagaagattttcagtgtggagatgatctcatggagattggaaatgttcaacttgccacgagcaactggaacggactgtctgtaggaaactacagaagagcgggggtggggggtggggagtactatgtctaccagcgctttccgcttctagctggactattattatacagggagagaatgcct

SEQ ID NO: 1996 - DNA, 522 bp, Rattus norvegicus
  Genbank Accession No. AI169075
aaaggagaggaggtttattttggctcatagtctcaggttacagtcggtaatggcaggggagtcaaggcatctgcgtgagaaccgatcagaatgcacacatggcagttgctccactctttctctactcttctagtcccaggatcctctacccagggaatggtgccatccgtgatgggtgagtcttcccacttcaacagacattcataaaggcccttttccctagtgactctaattttatttcaagttgacaattatcattagcagagcaggccatgtctctgcctcccccctcctaacacatgacaggtaagaggatgaaggcagaatgtaggggctacagtgcaagcaggaggaagatatatcctactggcttcatttcgctagagaaaactcttaatatggggaccttgaagaaatatcatggactccacgaatctgctgcttcttgaggaaagagctaaagttcaaatcctctactacaattcattcatttctgggcctgcttggatttgaacaaaaatg

SEQ ID NO: 1997 - DNA, 510 bp, Rattus norvegicus
  Genbank Accession No. AI169104
ggttcaatgcatttatttaaatctcgaggataataaaacatcagaagactgcagttacattaaaagtagacaagactccaggaatcccatgtaacaggttgcacatttaggcagctcgtacctaactctccaggagtttcttgattattttcttatacagaggtacttgccggtccaggcaaattttgctcccattcttcagcgtggctatgagctggggaaccgcacagtggggtcctgctttgatcacctccaggctggtgatgcgtttgagatggatcctggaagaactggtcttcacacacacacagctaagatctccgtcgctttcttcaggactagccctggtgacagcaaccacagctggcagcaacagcagacccagaagaagcagctcagggctgggccggaggcctcgaaacaccgcagtggcactcatgtcaagagggtgctgctagatccaagggctacctcggggaaactggggtctggggctctaagcctcgtgcc

SEQ ID NO: 1998 - DNA, 641 bp, Rattus norvegicus
  Genbank Accession No. AI169105
agaagtcggttgttttattttatttttccaataaagagtccctttacatacagcttttatgagaaattaacatggtcatttattcttgtccaacagaatccccccgcccccggcctccttctgaggatctcccttgggaatcaaacacaaacaaccccctggattttggttagcctttaatacaattctaatttgtaaaacagtaaacaaagctggaggtataaaacatggaatgctatctgtcagtagtcttgaacacattcagtagtcacagcatggggaccgaggccactgacatttttataacactccctgtttcagtggactcctagaggttggtggcacggaggtgaaacccctctgtgcaaaatgcactcacttcgtagaaaagcagctttcttctttctcgctggatcggcataacacaaacaaacaaacaaacaaaaccaaaaataaagttcgttttcttctaacgctaaaagtgcatcagaattgtggggaatcggaattattgaaataaaaggaactacgtatgtggtgtcttactaggtcagtactgatggttaaataccctcagaattagtcattaatcaaaaggttattttgttaaaacttattgcacttacatgccaacaaattag

SEQ ID NO: 1999 - DNA, 659 bp, Rattus norvegicus
  Genbank Accession No. AI169116
aattataaaattctgtttaagactggtaacatggcaaaaaaaagtttatatgttaagtacaaaaaggacaaaattgtatgtacagtagaataacaactatgtaaacaccaaagtttatgcacagagatatctaaagtaacatttaacatcaagattaacagtggtaccattgggtagcaaactggttcttaaagatctcccaattttccttcataagcagtaattgtcaattacaacagggaataatttattaaaaaataccccagtggctggtggttgaacagtgcagtgtcagctgtcacatacagagcagcggctctggctgatctttcagaggacagtgaatacgtcccaggaacataccccaaactgccatctctgctttccctctttcttaccctgtgaccatgtaaattccagttgcaccttttcctaccaattcagaactcagctctgtggccacagggcccagcagaggctgtgggcaggaagtatgccttccaaaagcatgatgcctcaactctggacactcagacgacttcctgcggtcaggcaagccacttttactttcaggccatgcagccatattcacctacagttagacatttgccctcaatgggtcttttggacatgggcttttaaacccctgaaggtaggca

SEQ ID NO: 2000 - DNA, 703 bp, Rattus norvegicus
  Genbank Accession No. AI169156
ctcttttgcagctggctgccatttattctctcttttcaatcaccttcactctttgctcaccatccaattacatcccccggcccacccgacatcatcttgtgtttgagtccagcttcacataggtacacatatccactggttccaggcacagggcatggggagatgctgcagtgagtaactcattttttgcataacagtattgcttttgtcagtgtgagaataaacaggaaagccacgtttcttcataatctggtcttgtgaatagataacaaaggagacaagaccttgggcccggtactgaggcacggtgcctcccattcgcatctctccagtttggtccattagagtccaagatgcaggggttccctcaggccccaagacacaggaacttgggaagttctttatgcagcgttcgatgaatctctgactcctctcgttgccaccaaaaagccagaatttattcaccaatgcagcatgggtaacatccaaagatgaaagtttaaacatctcttgattgatagccttgggcttgccacttcctggtgataaattctttgtatccagcagggaaaggaacagtttcctaactgtctctgataccacatagaggatgttttctgagtgtttgacttggaaagaatggatgcttgcaagattttgtattgctttattcaagtgggactgggaactttgaatctgcaaa

SEQ ID NO: 2001 - DNA, 649 bp, Rattus norvegicus
  Genbank Accession No. AI169166
tttttttttttttttttttttttttgtttttaaatattttatttattttttgagaaattctgggaaatgaccacaaaagtgcagtacatcaaaaaactaggagtttctaacaagctcaaaatctcaaattctaaaactccttgtttgaaacgaacttcaggtaaggtagataaagacaacatcgatgtgcagggcaatgcggaatcagcttgctctcaccacgacgccttcaggataaggtagttacgatttgctttagtaaagtttttcttttcctgttaacaagagcaacaagaacaacaacacagtaccaagagacaccgtaaaacaaaggacccactgaggaagtcactttccgatgtcagagcccgccaccttccggcctccttgcctcgctgcgcccagtggcaggtgcagtacgggctgggctggccctgcagccatctcatcgccggctgggccttgggtcacacttgtcccgggaggcccgcttccttggaggagagcagcccactgagccccgggctgagtgaaggctgcgcttgtaggagtggcttctgtgtttcttcccacttgtttccttctggtcttgacttttgccaggctccttactgccctctttttgttcggggtcttgctccctcgtgcc

SEQ ID NO: 2002 - DNA, 702 bp, Rattus norvegicus
  Genbank Accession No. AI169170
aaagtgaatatacaatttttatttaacattcaaacttcattaagacatgtgcaatatggcaattttactggggggttgttaaccctacctaggatgattgcttgctgaggcttagcaacagggtccagttcacacttagcactaattaaatactttattgaataaatacaataaacaaaatgcattcaaattttctctaaaaaaagatcactttaaagtcctttctagtcaggctaatgacaaacacaataaaggcagatatgctagtttaacataattggctgattttatacagcacttatatcttttagtccacaagtatattattaaatgatagagaacatctaatacaaccatttctacataactagtaaatgaatttctaagaaaaaaagattttacagaccccatcttttatacccacccccaacagtctaactctaaagaggataaagccaatgcctttcctcacaagagctcaggactaaagtcgctttgctatcagaatctgtatttgtgatccgttatgagcattgagacaagattcaaatattctcaaagaagcacaatgcacgttgtgatcgcctattcagcaacagcgagcactgcattccaaactatctcatcccaggaattaaattaggtcagccacattcatgggcatttcctccactgtagtattgtagaaagtctcaatgtcac

SEQ ID NO: 2003 - DNA, 598 bp, Rattus norvegicus
  Genbank Accession No. AI169171
acaactacagaacatttctttatttttcactaagactttcccagaggacataactaaccttgtccccaccccaccccccacgaagggttagtgcgctcactgctataaagcagactcggacagtttcaaggattggaaccaaccttaaatggcaaaaatgctttctatctgaattttcataaaaatgtttaagtaaaaaaacgaaagttaaggatcaaaggggcaacggtggcttcagagtgaaaagatcattcacggttcacgtcagacattcaatcttggctcgagtgtaacacagcgggaacaggctcactatcatacaaaaggttcactacagcgcgctgtgggcacctgttccaagtccacccgcagcccctaacgcttccaactcaattacttcccagtctgttgggcctgactacggaggagcacgtatatcttctctttgatccagtctatgttatacggctggtatgtctgtgtatcagctcggtaaacaagacagctgagatctgccagatcgtcaatgaaatcaaacaactgactgatatcatatgcgatggaacggctgttgggattcattctcttcacatgttct

SEQ ID NO: 2004 - DNA, 637 bp, Rattus norvegicus
  Genbank Accession No. AI169177
aataatgacaggcaatcaagtttattcgtgttcacagaacatactaggcgaccccagacagccgccctctgacaatccatggacccaagacttccagtcaggaagacatcaaaggccacagaccgtattcccaagggtctgccaaagtcttacaacagagtcgaagtgctggaaaatggagtgttacccctaaacctatgccccccgaccaagactaaactaatcctcccacaactctgtctcacggaccctataaatcgtaataaatatctgtgtcacagcaagggggcatatctcgcacccctgcataagttagaataaatattacatacacccctccttcacctaggaggatatacataaatacataaatattaattagacaccgagaagacctccgtccgtcaccagtgagcctagccaggacccacggtgcctcgggctcgccccaagaaccggcatcttggcggtagtgttctgagttagcgttgccttataagtcccagtttgggatacgttcttgcgcaccaggtacccctggtgcctctttgggttttttttccggactgtgacccatcgcgtttagaatgccgccgggtgttgctggagaaaagctttgagatccagagcatagtcc

SEQ ID NO: 2005 - DNA, 716 bp, Rattus norvegicus
  Genbank Accession No. AI169231
  misc_feature (1)..(716): n = a or c or g or t
ttttttgtgttgtactttaaagtctcaaaaacaaaacaacatcccatacaccccacgataactctcaatcatggctaatcactgggctggtctataaaacttatacccaacactgacggccagcaccactcaactgcactcttgaaagcctcttcagtggacgggaaaagcaggaatagcatggaaaagtcaccaattctgtccatttccaagagagacatacacaggtgatagataacatggtccagaaacggctgtcctctcctctcaagacaaacgcccagagcggcaagtattaggccatagaacgatttcaacaagacgttacaggcctggcgaagagcacgccctgtcgtgtatggagaagactgctggcagggaaggggaagaaaacaaactagatagcaggcctgaatgccaggaatctctacatttataactgatcaacagtactgctctctcccgtttgctcaattttcacactgtctggaggactttgggaggcctatcttcatcactgtatgtgttagaggtcacttctgctgaccaccttctgtagtctggcttggctggcctgggaggtataggaacccggggcgggatctcaggcttgtcttcatccgagctaggagaggctctgtgtgtgcagctagatatccggatggctggcttgttaaacgacccggctggtcctgaatgagacctncttaatctgc

SEQ ID NO: 2006 - DNA, 597 bp, Rattus norvegicus
  Genbank Accession No. AI169239
gagtataaatccattttattttgcctttgaactaggaaaacattagcctacacatcggattcattagtagaattctaatttaagcaacagaaaaaatagcacattgaaaatttagattctgtcttgttttcctacttagttacaaaggtgaacctacagttgggtgaacaaatatttaaggcataaaataatttctctactggtttattcttgactccacaaaatgccccattcctatgaattccttagctttggaaccaactgtttaaatacatggagaaaatgttttagtaacatgttgtgcaggtgaccaaactgtaaactgtaagatctacagtttttcttactggttcttcaaaaatgttttcccaagaaagttagaatgcaaatttattgcacggataaagtcaaaagatctaaaatgttttatataagtttaaaacctttgatcattatcctagttttttataaacacaatagagaaactatattatagaatcacacaaacaaaatttacaatcaattctttaaaaacatacaaataagagtacttacttttttaagaaaaagcatttttatgattaaaaatgacattta

SEQ ID NO: 2007 - DNA, 452 bp, Rattus norvegicus
  Genbank Accession No. AI169255
ttataacatctgtgtatttattcaggggaggcacatggcacacatgtagatgtcagaaggtgacatggttcagtctgctttttccattcaccatgagggtctcagggaccaaactcgggtcgttgggcttaatagcaagtgcctttacctgttgggacatcttggttttcattttttaagatttattttgcacatatgcctgttgcccatgactgtcagaagaggacatctgattccctggactgaagtgacagatgtgactgagtcatcatgtaggtgctggaaaccaagccagggtcctaatgtagtccaagctggctgctttctcccctcacaagtttctcccctcacaagtaaggctgctgcaaatgcatttagccattggtcctatggtctctaagcacgagacctacccttgtgccgaattcttggcctcgagggccaaattccct

SEQ ID NO: 2008 - DNA, 652 bp, Rattus norvegicus
  Genbank Accession No. AI169279
ccatttggctctttttattagagaaatcgagaagacagcgagtagggaaatccccatagtgaatggaaccatcacatagatgcctttctggaaccccaaccttctatgatccccaaaagtgtgcttgtgatttcagcaacttacaaaggggagaggaaatactgagaaaggccactatttaataatgaaggagtgaaggtgtacaggttcctaaccagcctagggccaaaaataagaaacaaaaggtgtgcgcagagcaagctagcctcagactgctgagagtaaggcattcaggtgccagcctggcgagttcccggaggcaccacaaggtcaagtgcacatggaggctgttggtagtgagctgcgcagacacacagggcacacgcatgcccacacacgcatacccagaaggaaagttatcagactacacggtggtggtgattctgttccctaagagtttgtgctatgttgaaccagagtctccctgctttgggaagaggaatgactagacccaaagacctctacttctgtaggtgtcatgaggaagcatttcatgctcctgtcccaaagtacgtgaccagagagtatgtctggcttctgatatgtgctgtttcccacaaacctaggtgagcttcctttcggatggacattg

SEQ ID NO: 2009 - DNA, 662 bp, Rattus norvegicus
  Genbank Accession No. AI169289
  misc_feature (1)..(662): n = a or c or g or t
atagtttaatgtattttaatagcaaacttacaggaacagcacagaagacagacaacattaaaaacatgtacttgcatgtaggacaactccgttagaaaagtatagtgaatggatggaatctactgtatgataaaatgctacaaacaccatttagttgctgtcaataagaaatttacttattttaaaaaaatccaaatgctggcattgtccagaaaattttaacaggtttatttataattgttataaagttgaactgttgaaatgtgttcactgaaacattttgcttgcattaatgctttacatcttgcatttatattaaaaattcacacacaaatgaacgtggagaaactgccaatacctgattctgtcccctatgtttccactcgcaatcatatacttaggtacctttgacccccatggaaaaaatatctaacattcagaactactgataacaggaagaagaggaaaaaaaaattttttttttgagaatgaaatgtttcccctcatagtggactcttaagcacgttctccgcgtatgcggcgtgctagctggatgtcttttggcataattgttacacgtttggcatggatagcacacaggttggtatcttcaaaaaggccaaccagataggccttacttgcctnctgcaaagcaccaatcg

SEQ ID NO: 2010 - DNA, 617 bp, Rattus norvegicus
  Genbank Accession No. AI169291
agatatttaatttattaaattatataacaaagtttcttctatacagtcagaaaatgcacatttagatgagaacaaaaattaagtaaaaatacaatattggttccaagatgctattttaaaagcaaaaaattagaaagtgcatttggaaaagaatagatttaaaaaaatctgtattggcatttttcacgaggaatcaccttccatcggaataaagtatgatcagaactgatttccccccatcactaagagctactagggtgtataaatattttggtactacaatttttgatcagattgaaaaaaaaattctttaagccatggctcagctttcccaggttctcaccagaccatcatgcttagaccttgtttcatgtccctggtcccctgagaaaggggcatgtggacacacaagggaatgagcgagtttgggaccgcagtgggaaatgttacatctttttggagttcaggccaaataatgccctctaccgtgacatgagaacaatccgtcattcgagtaggtttgtttgccacaaatgacgtgggtgtggtcatgtatcccaccccctgaatattacaagttcaaaagctcaatgaagttccaaaactcttatctagtt

SEQ ID NO: 2011 - DNA, 567 bp, Rattus norvegicus
  Genbank Accession No. AI169302
gaagtatgagtctctttattttaacagcctggcaggatcaggtaacagtacagagttcagaggtgcatagcacaggctggggcaatagctcctgtctacaatccagagcactaagacctcggctttgtggccttaaagacatcagccccaggggtaatccagatactgggcataaataggacagccaaaacctccctcagtctagccaaacaagctttcatgaggaggcttgttccctggcctggctggctccttccccgaaagcttttgcctcaggtagatcagcgatactaaggattccttcctttggctaatatgggaacttttcccacactagcacagcaggggccgtgaccacaagctatgggcatctgggaggctcccattgggcatcaagtggcgacacagagcagggctgtctgcacgtgctgagagctgggcacacagagtggccaggcggcagggtgtgccgcagggctctgaaggtgggtggcccttatggtagagaaaccagaaggtctggaagagctgctcatcagccctcatgcggtagaccaggttgtgcca

SEQ ID NO: 2012 - DNA, 594 bp, Rattus norvegicus
  Genbank Accession No. AI169308
aaagaaaggcagccaaggtagtgacctaaaaatagtccccagacctatgagtgttggcctgtgaggctaaagcacacactgttcagctgtatggctttgaccctgggtggccagggaggtcagcttgaccctgccatgttggtttgatgtgtgaagtcactgggatcattgtttttgtgaccaggctctcagcaccatgggcagaatattaagtgagagagtatttctatcctgattattgacacacgagagaccaaaagaaattttgtgaacttagccatggaattctgtgaactctctgaggaatttacagtggtttaaaatgggtgtcagcatttatccatgaggattataataaattcagccccttttgctcaaggctcctttcaattgtgaaatgttgatcgcattagatttttaggggtctagctaagagtagcctcatgtgtggtcattcccccatgttcttaccccttctattatgtacggttatgtctttgtgtgctatgacttgccagtttggaaattgctgtactatgatcactgattacatattccgagttacttgctgtttaccacacccaggaactttct

SEQ ID NO: 2013 - DNA, 563 bp, Rattus norvegicus
  Genbank Accession No. AI169321
aaaatgtaattcaaagtatgatcaatatgtaaaggtattatccagtcgacatttttaattattttcagttttcaaaatctagtctgtattttacatttactgagtttatttggatgccaaattttgatttacaacatttctctttgtgatgagatttcacacgtgtacttgaataagtagctgtacccacccatgcctttccaactatactcaaccgccttccccagcaactgaactgaaaatttgtatttaaactaaacgttttgttcctctgctacactagtgatgtttcgatgtagtcggtgtggtggcccacagtggcactgcaagggcagctctgacagaactggtgtcacccgatcagacccgctctcagggagctgcagagctctgatgtagcactgactactgacgatctcctcagccttttctacgtaatgtaagtggccttgacttctccttgatgttctcctcacatgctacatttccttgtgaactttcacctgcattcagatttcaccagaacttcctctgttgggttaggaagaggcttacctggcact

SEQ ID NO: 2014 - DNA, 625 bp, Rattus norvegicus
  Genbank Accession No. AI169337
catgttacacaggtaaaaccctctttttattatatacagaacacattgaaatagagcatctcctctgaacacaagacagaaggccctggctttctgtaagctcccaaaagaacatgaatcatggcctcgaaagagttccttctcaaggtggtggtgcatgcctttaatcccagcacctgggaggcagaggctggtgggtatctgtgagttcaaggccaacctggtctacagagagccttctaggacagataaggctattagagagatgatctcaaaaaacaaaacggagttccttctccagaagaaaggaggagtgcaggggaggaggcagagacagtgtacatgtaaaacctgattccacaggactttcccagcatcatctgaaactatacatcccttgccttacagccggggggtggtttctttggtccagtagacctaggactggggtgtgcaccactcagtctacctccatcttcttattctgcaaagaagccacaaagacttgccactccgttgggtaaaagcgcttatagacattgatcttattccggatctgttttggggtgtcttgatagtaattcttctcatcccgggccatggccttatagtcctatccatgatt

SEQ ID NO: 2015 - DNA, 604 bp, Rattus norvegicus
  Genbank Accession No. AI169347
catcacacattacatctatattttatctattaaacagtaaatttgatgcttgcagctaaccatcagactgagcatgggaaccccaatggaagaattagagaaaggattgaaggagctgaaaaggtcgcaatgccataggaagaacaacaatatcaacaaaccagagctcccagggactaaactaccaaccaataagtacacatggagggacccatggctccagcggcatatgtagcaaaggatggccttatctggcaccagtgggaggagaggcccttggtcctgtgaaggcttgatgcctcagtatagggtaatgccagccagagtggtgaggtgggacagggtgggaatgcgtgggtgggattgggaacatcttcatagaagcaggagaaagtggtgagcgggaatgggaaatgagatgtaaatacataaactatccaataaaaataaattaaaaatcagtaaatttaaaaaaaactattggtgcctgaaatttcccagtcagaagtaatctatatttgaaattgagtaagtccatggctttaagtgacacttgctgtggggaccattgaagtcttgaatgttttcaccatctgagcttgga

SEQ ID NO: 2016 - DNA, 595 bp, Rattus norvegicus
  Genbank Accession No. AI169361
aactaaaagagctgacgactttattttcacatttcacaatgtaagtgaaaaccgcacttttttgtaccacttctccctccagaagcgttctctctgttaggaagggaagttcctcatcatgcacctaggaaacactcagggtcagcaccaagatctcctggcgaaacaacaagaaatacaaaaggataaagagcgcttctgctcttatctgtctggccgggtcatgccaggccgtgtgggcaccatcatagggcgggcgggaggtctcatcattggaggcccgggcatcatgggcatatggcctcccatgggtggtctcatcccaggagctggtcccacaggcatcatcccaggaggaggggggcccatcattggcatcatgggagggcctcccatgtggggtgcaggcatcatgccaggccgaggaggacccgggagactggggggaggcgggatcatggcccctgcaggcggaggagcagagaacggagctggagggatctttccttgttgaaatgcagccgttgttttgtcaatcaggctctgggcctgttcttccatccatttctggtaatagtcttttacattctctttg

SEQ ID NO: 2017 - DNA, 550 bp, Rattus norvegicus
  Genbank Accession No. AI169378
gggagcgtggcaatgagccaggagccaggcccaccgatctgcaaaaatctgcgaacgtggtgacacagagctcctctgggtccctgccgagggtctgaggaacaacactgaaacccgagtctgcagggtcagggcttcctgctccagctgtcaggctccacaccagacccgatgggtggtcagggtgactgagagccctgttcaaacctcttcaatgtgtaaaagcaaagcaattatgggaaaaggaaccaactcagaaccatgtgcaccgaggactctccgcatggcctttctctaggcatatatccaaggaccctgagcgctggcccgtctgagtcgcccggtgactgctctgttcacctctagacctgagctcaaagctcaagggctgatggtggtggcagggccgaggacccggcgctcccttcccaggctggtggcaggtgaacgagtgtggtccggagctaagtgagggaggccaggctcttccaacctcatctggtggcttctggccacagcaagtgttgggtggtgacgggcaacaagggac

SEQ ID NO: 2018 - DNA, 558 bp, Rattus norvegicus
  Genbank Accession No. AI169417
aaattaaccctcactaaagggaataagcttgcggccgctaaacttttttttttttttttttttttttttgcacatcactcctttattatactgatctggaaagagacttagttgttatgcccaaacgagttctgaacccacacagtagggtcaagcagctggaacatgattcagacagtgaaagacaaaaccttggacatgatcaaggggcttcacctctacaaaacaaggcaaagggatccaaacacagcatgaggtacaaggagtttatcccatttgatatgaggaatggctttttttctggtgaccacttaggactctcaactgccactagcaaccttgttgcttttgtgctgatatatgtatatatactttatttttgtaaaaataaatgtaacacatagacttgacaagactgttcccaaccttctagggccagcagctcctttagggtcagagagaaagtagggtcttttaatcggcatgaggttacttttactctccactggaatgactaggcccccagttacctaattgtgggaagagtgcaggacaggt

SEQ ID NO: 2019 - DNA, 449 bp, Rattus norvegicus
  Genbank Accession No. AI169421
agttttggttttttccgtgggtatttttgttgttttatttcaaattctgaaaaaaattccccagggctctgtggggctccccattcactgcccttcttcatacagcaaacctatttcaaggacagcattttttcctaaggaacaactcatactgaatccttaacctgggctgcagaagcagattcctgcctgctgtacagagcacaattccttccctgacactaggttacctgccacattcaaagagtgcctctcccgtcagagtggaaccgagcccgcaccatgctctgctgacaatcccttcactgtagccatcccacagcaaccctgcagttcaggagagtgataggaaattataaaccttcactcatttcccccacatcttcactccaccctttcaaccccacccttgggatatcattgggttttctcccaacagttacttgggg

SEQ ID NO: 2020 - DNA, 530 bp, Rattus norvegicus
  Genbank Accession No. AI169430
ttgattacaaatataatcctgagctgaaaaactgggatttgggggagagccatctttgcatacaaaatatccaaaggacatttactctattttctttttctctagtgacactcaactgccagagaccgttctgaaggcagacggcagagatcataattatagtttagtgtgacgcccagttctgcctccagctgcagcacttgccatggcagtggatgcggctgcgtcctctgcttcttccagttcatcctggagttcttggctgacactagactgcagtgccgcaggagtgagccactcctttgggaggcaactctgtagaaagggtatacaggagctgaagtaggccagccggttgatccagcgaggaatctctttcccacagagaatctctgacagggcggaggagaagtggttgcagttcttgtgcatcagatggtaggcgttgcctttgtactctttccccagctctttcacaatcttttctatgtcatctttccagaagtccgtctcgtgccgaattcttggcc

SEQ ID NO: 2021 - DNA, 495 bp, Rattus norvegicus
  Genbank Accession No. AI169479
tcagaattgctgttatgtacagacatcataaaaaaacacacatacatatactggatattttccacgacgtggagttggaaataaagtctaagagccattagaactgaaactgtcccacagaagttcgaggatggcccctccttaaatgtccttgatcacctcctccagttcttcctttgtgaacatgtggaaattctgaccaggctgcactgtggccagctcgatgttagttgcgttcagcttctcctccatgacttgcttgaggatgatgagtgaagacttgatggcctccttcagagtcatagacttgtggtaaacttcctgcaaggagctctgggcaccctctgacgcagaaccaattgctcgagcatcacactgtacgaaggtcccagatgggtccatgtgaaacagttggggcccttttcatcaactcctccaaacaacaatgctactccaaagggacgagacatagcacctggatctgcattttcttct

SEQ ID NO: 2022 - DNA, 470 bp, Rattus norvegicus
  Genbank Accession No. AI169595
cctcattaatttatcatttaatataaatgctgacagaaagcagataaagacctttagacactttcatatatttacaatccaaaaggtgaatcacctccttctatttgttaaatgaatccttttatctgcaacttacaagagccttaaaccctacttaggagcaacgagaggctgagtcagtttccaaggtaagaaaggaaatagcattttaacaaaatgtgccatctttaatataaacaacatgcacacaaataatacaaaattaagagagaaggccttaatcttctcaagaatatgcaacaagaggtacatatacgcattcagatccagacttcgggagccctaaacacactcctagttctttttccccacctcatttgttctgaaagctgtttaaacatggaaatactaagcagattaaacaagaaagggaatgttccatttcaagcaaggttctttttctcctatac

SEQ ID NO: 2023 - DNA, 583 bp, Rattus norvegicus
  Genbank Accession No. AI169617
ggccccaatttattgcccaataaagccagttacacctcagtgggtgacagtgtatcaataccacctttccttctggcttaagctgggttctggggtgccacataaggtcaaggctgggcagctgccggaagttccaatcaagaaggcaaggacagtggcaatcaagggtcctctctatcgattctgtgtgagggacacgcaccctctccaggcctcctgaagtagtgtgtcagcttagctgaagagtcgaatggtgccatctgccccggaggagaagacccatggctgtgtggggtggaaggccacatccagtacacccagatctcgggtcaggctgtgtcccttaagcaccttgacgggcaccagcaatgggttctgcagcaggtcattgtacaccatgccatggcaaacgataacgctgccgtcgtctgagccggatgcaaagagtgggtatcgggggtggaaggccacagcccgcaaggccttcttgtggtgcctcagcactttgtatggcttggtggaaagatccagggcaaaccacaccagtttgctgtcatagctgccacagatgatgttgtcacct

SEQ ID NO: 2024 - DNA, 627 bp, Rattus norvegicus
  Genbank Accession No. AI169622
aatatttattcattttcgacaatttcatatatttttattatatttttctctatcccccaactcctcccagacccacgcccccccactgctacccttccaacttcatgtgtttttctctgtcttgaaaataagaactaaaaccaagaacaaaagatgaaaactgctataaaatatggagttctatttgtgttagctaactgcttgtgagaatggggcctgtcctgggatcgtgattagtatactcagaatcactccactgagcaaaactgatttattctctctcagaagagagtggaaagatcttttgccttataaaaatgaagccactcaacattccagcatgaatgtgggagggtcacagaagtacccaaccctaaacaaggagttattgacagctgatggtttctggggaggaagtcaattttctttaggggtatggcctttcatatattggcagtaacagtggatggtgtcacactcatgagtatatgagcagcagtaattggactctttgagctattaaaaaatacatgaagttaggaaggtgaaactttagaaacggggactcagaattttttaaaaggtcctcccagttctgagggaattcttttccttctttgaatcact

SEQ ID NO: 2025 - DNA, 556 bp, Rattus norvegicus
  Genbank Accession No. AI169648
  misc_feature (1)..(556): n = a or c or g or t
actangnataggaagactaagtcttttattgatatttgttcagcagctggcaatcccagccttcatcccatgtcctttaaatagatgagcaagctggtctttccattgcagggagttccatcattcatggtaccagtgtaattcgtctccagtcagatgccaccagtccatcccagataaccttgcttagacctaagtattggctttcaaagcagctttgtacttccctgtcatctccttgggtaagggcaccaggccagggcagggcacctgaccttccacttcgcacatgcactcccgcaggcagtacttccgggggccaaagttgcctggatgaaagcgctgctgcttctccagctcctcctccctgagggtctcctctttcttgcccaagattttctttatgtgctccacgatctccgtattactcttcgtctccacgtctacaaggacctgctccccagattctaggtataaccgcaggaagggcgatggcgtcatgttcttaaacagcatgatctgcacccaaggattcttatactggatctgagggatg

SEQ ID NO: 2026 - DNA, 547 bp, Rattus norvegicus
  Genbank Accession No. AI169668
gatccaggagggtatttaatttacatagcagccacgtggggcctgtcaagctgggcagtggggtacttctaaccccagatggcatcccctatccttttccttcaggactgtcttcacaggcccttggataggtcgccccacattgtgcagaggatgctccagttgaaaggaagagagaaatctgggaaataaggctgtccccaagcggggaaagtcctaaacctggagttggttgcctacatggtagctcaggggtcttgcaaaaaccagtccacgtcctaggcacagttcttactcagctgggccttcagaggaagccctcccggcggaactgttcttggaggagggctcggtactggtcaaatcctccctcgacccgagtgacactgcctttctcgcacacccacagctccttgcacaccagtcggatgaagcgctcgtcatgagataccagaaccacaccacccctgaagttgttgagagcatggcccagagcttcaattgtctccatgtccaggtggtttgtgggttcatccagaatataaaa

SEQ ID NO: 2027 - DNA, 554 bp, Rattus norvegicus
  Genbank Accession No. AI169690
gtagataaattatcgccagcataaaactgctaatggagtttgcatcatggatcccattaactctgtaaaggaagtgaggttccatggtctcataggaaaaatatatctctctgcttggataaagtccgttaaaagagcaaatcaccttggaaatgttctttacatgtctccaacctatgaatacacaataaaacaaaaggtatattaaaaaatataacttttcatttaaaaagaagaattaaatactaatgatgtagaggtaaaatacatggaaaatatacaggtgaagttctaaaaatttctcctattttattagtgcatactaaaaatactcaggaaacaacaacaacaaaaacaataattacagctgatcataaaataaagtacagtagttttacttttaatatttaggggaaaggtcaaacaaaatgttgtccattcaaacaaacaaattttaataactttgattcaagtaacttagaaacatggttcacgtggggtttaatgtccatttatggctaaatatcattttaagagagaccaaaattaataac

SEQ ID NO: 2028 - DNA, 490 bp, Rattus norvegicus
  Genbank Accession No. AI169706
actacagggttgggacctaggaatacaaagttaagaatcagattctagttcactagcaccaagctctggaaaaggaaggcagacaattttaatactgtatggttgtttcccagatacacgtaggtggagtgcaaggaagtagggaactaacatcagctgcttaattccaagtgtcagacattagcaatgtttatttcccaattttgaaggcaggtttcaatgtccctgacttttacccagtaatctttgaagggtttgcacaaataaatatactgtttggtttagaagatgacttacccatggtcaaggatgctgaggggctttggaaggctctcccctacccaagtacttcctgcagtttagaggaaaaaggacatgggctcaaagataatgcagtagtgtgtgtgtgtgtgtgtgtgtgtgcccacgcgcgcgcgcgcgcgttcacgcacgtttgtgtattttcgaaacatggtctcacttaggcctg

SEQ ID NO: 2029 - DNA, 629 bp, Rattus norvegicus
  Genbank Accession No. AI169735
agaaatacccaatttaataaagatggagaaaaaaataaagccagatcccaaggtccattccctcattcatcctcagagtcattcctggctggagaatgagcttatgagggaaaaggtcctatacaacaggtcgagcaagcgcaggaactggcggtctctgtagtcaaagcgctctccaaagacaatggagcagattatgttgcctgtgacgcactggaagaggaacgttgggtccagggagactccctgatgattcttcagttcctccactaaacatttggcctcctcctttatctgatcctccacactctgctttcctatcccaaagtctctcatggtggctacaaataatcgccgaaggatcttccacctttcttcattaacaaaggacacaccgtattcctgcataattggctgaagcacagcaattattccccggccagagaaagcctcagcatggtccaccagagcctcccttatggtctgtgtcccacacagcatgaccacaggcctaggtccaaagtatactgtgaacacatctccgtgtttttcttgaagctgaatgaaagacttacgaaagcctcctctgtccatctgcaagaggtttcccaagaggggtaagggacggg

SEQ ID NO: 2030 - DNA, 492 bp, Rattus norvegicus
  Genbank Accession No. AI169751
aggagggatgcagctgcagatggtggagcacgtcaggatcagaaaccagaatcctctatcaagtctggagacgaggagcattaagagcaatgatgacgacagtaacaatagtgataatgaccatgaggatgctgaggaccagggagctgatgttcaggcatttggcagtggatgcgtaagcctgggctccagtcatatcacccaccatcttccgatccctagacttcacagagtaggcatatgcaatgaagcccaggcagcagaagttcatgaagagcgtattgaacagggaccataccacatggtcaggcacagagacctctctgggcatgttgatcacggtagttctgacagaagccgatccgtggggtgcccccagttcagacacctcatattcttccttgattctttcgtagtttgggggttgtcccccagtggcagcgttcacgaaggcttgagaagtgtggttcatggtaccgagcaaaagcagca

SEQ ID NO: 2031 - DNA, 494 bp, Rattus norvegicus
  Genbank Accession No. AI169779
cacatcctaaacgtctctgttttattctcaatattctgtacagtatgtacaaagaaaatggatatgtcattaaacacaatttaaaattaataattaaaaatatatgacttagggttggggatttaactcagtggtagagcacttgcctagcaagcgcaaggctctgggttcggtccccagctccaaaaaaaaaaaaaaaatatatatatatatatatatatatatatatatatatatatatatatacatttgacttaccggggataccagaatatgccacatcatgaagtcacctatcacagaagcttctggcatgaatagtacgattcaaattttgatttttaaagacaacaatttttcacagtccctttcccctttgtccatccttgccccattctctattttattgagttataaatgcttaagcgaatacctgtttatatatctccaaatctttagctacaaatgcacagctataccctaacaagggttct

SEQ ID NO: 2032 - DNA, 482 bp, Rattus norvegicus
  Genbank Accession No. AI169829
gttggttatccacagatttattgccgctgtagacccctgacaagagaaaaggagtgcagaggcccttgtagagtagcggagcccgtgacattaaatatacaaaatatagtatcatttatatgtgccattcatggatatcggagtgtgatttgatgaccccagttcccagttccctccacattccctctccaggcctttccagctgcttctgtctgacggacattcctgggacagtgagcactcagcctgtgagggccacggccgatgctagcaatcagggaggtgcccgttgagagcgtagggatcttctgatctcaccttccagatgagcagactgaggtttgcaggagaaaatgatggcaaaggtcatatgggcagctgaagggggagttcgtgacagaacccaagactcagggctctctatctcttctaagtgagtgagactctgtccctcaaccttgacccccagaacaccaaggggt

SEQ ID NO: 2033 - DNA, 202 bp, Rattus norvegicus
  Genbank Accession No. AI169883
caaaaagctttatttttacttggcccaagacttgggaaaggctccagggcggttacaaagctgcctagtggctttaaaggttcattcgggtggaggtgctgaggcggtcggtgcaaaccaaaggagggagccccttggaaggcacaaaggcctaatcgtgcttcaaagtgaggcgctcaaagagatacccgcccaaaaatgc

SEQ ID NO: 2034 - DNA, 581 bp, Rattus norvegicus
  Genbank Accession No. AI169903
ataacgcaaaacaatctttaatgttagatctgtatttttacatttcccaatacctgcttaaaatagacaccaagatctttgaaatacaagcaacaattgtgatttgtaatctcagcacccaagaggctaaggcattagtgtaagaaatacaagaccatcttgagctacacagtgaaaacctgactcaaagagaaggaaaaagaggaagaggagcaggaagaggagcaagaggagggaggaagagaggctgccactgggaatcctggtacacacttttaattccatcacttggaaggcaaaggcaggtaatccaagttacaggccaaccagggctctcacacatactaaaatgaatgataaatgggaaaaattttaaacaaaaaacagaacactgcttttgattgatatatatatatatatatacatatatatatatatatatatatatatatgagagagagagagagactcaatgcatctaattaacattatggtggtgaatgatggtgaaattcaaacaaaacagcttttcctctgtatccccagcaatggcttctgcaacacatctgtgatggccctta

SEQ ID NO: 2035 - DNA, 557 bp, Rattus norvegicus
  Genbank Accession No. AI169947
ccatttattgtatagttagagtttcaatatcttttcatttgggaaaccaaaagataagagaataaatgtacattcctactaaacttgcctttgaaactttaccaatttaaatgatactatattacaagattcgtaaggattgacacaagaaaggactgaaggatgtaagacatggcccatggctggcaaaaccggaaaggcaatggatatatttcagcacttcctatgtcctcaatcaccttttagaaaatccatcataagccagaatgtacatggtagatgctcctcagaaccacctcaagtgacgccacataactaccgcttaggttgcttcgaactaggttcaacctctgtggaaccccaagtgcctggtttgagaaggtggctaaacttaatgtaatttatagcaaaaatatacatcataattgtacctgcaacttttagagacaaaagtgattaacctggcactgacatccctctatcaaatgccggttaattgaaaaattagaaaatatcacagcaatataacaggttggggatcttaataggaaaagaac

SEQ ID NO: 2036 - DNA, 449 bp, Rattus norvegicus
  Genbank Accession No. AI169984
catggacgcactttattagtggcttactggaggggaggggtggtgggaagatcagctgggtcctcacaggcatattaatgggctaaggcagaatggatttcatcctagttgaatgtatccaggttgtcataagtgactatcagaactagacatgtcccaaagccctaagggccactctcacagtttatccacttataatctgctgggaaactaagtagaagaacttgacttattctgaggcaattgggatggttacagctcgagatggtcatgtcaaactgaatttataaaaaatactgtaggagttggggatttagctcagtggtagagcgcttgcctatgaagcacaaggccctgggttcggtccccagctccgaaaaaacgaaccaataataaatactgtaaatactactagttaaaggacagaataggacatcggttctccctgg

SEQ ID NO: 2037 - DNA, 442 bp, Rattus norvegicus
  Genbank Accession No. AI170002
aaaatctgataaatatctattacggaaaaatgtttattttgaaattattttaatttagaaatagaaaagtcatagttaggaggaaagaaacaaaaaccacaaagcatccaggcaacttttacttcatgagcttgtcaccccctcattggttcaccagtcccacgatgagcaaagactcagccacccacaataatgttattaatagggatgtggatcagtttcacaaagaagccgatgaaccccatgatagcgaatccaatcgctgtggccatggcgatcttctggaattcttttctatcaggtttggtgcatcttttaaccagccgaatcgagtcctttacaaactgccgacttggctcgacaaactgcattacctgatccatgtttgcctcgtgccgaattcttggcctcgagggccaaattccctatagtgagtcgtatt

SEQ ID NO: 2038 - DNA, 520 bp, Rattus norvegicus
  Genbank Accession No. AI170038
acatgaggacaaattggttttattgtgggataccacgatgctacaacatatacaattgataaatgttaacacagcacacatatgagttatggcagaaattacatggtcatcttaatatagttagaaaaagcccatgtttcccctcaggataaaatgttggaagaattaggagaagaaaaatgtctttacatattaaaggctagatatgatgaacctggaaatgacatcatacttaatgaagaaagacagagattttcctctaaagtcagaaatgaggtgtgtgatcactcttgccattcttagtgtagtgctaagaaccttaaacatcaggatagagatgagacaagacattgaggaaagcaggtaaggataaccatgtattaagatgatgttaccacagtgaaagcccctcctttgcatgctaactgaagttaaggatttctagaaaaataaagtttacacagtttcaaatgtctacaacatgaaatatgaaggtactaccagaatctcagcaaactgg

SEQ ID NO: 2039 - DNA, 502 bp, Rattus norvegicus
  Genbank Accession No. AI170056
tccatttgttgtcgtttttttttttttttgtaaacaaagggttaatttatgatataaggtaagccaataagctctcatgtgctacagagagaaaacatacagtgcacataataaatgaattccatatactgagaataaataggataagcgtagtaaagaggaagtcaagaggagcccacagttacagtcacatgacgagaagttaaaaaaaaaataaaagaagaagtccggggagaaacaactttatttatttggagccatgcacttgttttagtgccaagggcacaggaagatggacaagataaggtcctgatcacaccagatgcttagaaagatctttcagtggctaacctacatctagaagagtcatgaggagtagtggcagggtgtgtgcgccacaacctttgaggaaagcgatccttatacacaggggaaccccaacaaccctgtcattttatcatgaacacatctgcacttcttgcttttcacagacaggatagga

SEQ ID NO: 2040 - DNA, 525 bp, Rattus norvegicus
  Genbank Accession No. AI170059
cttttgttcaataaatgtttattgctttttcaattatcctatttacaaacaacatgggattcttggcctcatgatacaaagcaatactgtagtctagcagtgtaggcaacatcatgggaaccagaaaaaggccaggccttttttgcaccagccaacattttccagttgaaaatactaatttacacataaagaacacttataaaatgcacttgcatgtaaacactgtaaaatcctgcatttaaaactctatacctcaaagaactctacgtacataaaaaatagaagaaatttctaactgataccaagaaggcatttttaaaactacaaacagctttctttattcaatttcaaagctaatactctgcaaatacaataaaatctgacatttcatatacattcctgctttatatttttatattttaaaagaagccacctgtaaatactattttcttttgcaaagtaacaaaaaagaacaaaaaaaaactttaaaaaattacagtaaaacataaagtagttctcaagtgg

SEQ ID NO: 2041 - DNA, 501 bp, Rattus norvegicus
  Genbank Accession No. AI170117
ttttttttttatgtgaagacatattttttatttttttattttttttaggcataaaggggtatgttaatccattgccacatacaattcctataattacatatagggggtgaactgtgaaccagttagaaacctgtatctagttgccaacgagtgccactggagaaaagaaactccacaagttgaagactgagaattagcttccttccagtgtgacgcggtacacggaggtgctctcgagcgagtgagcttcctcctttcgcagacgctaatgcagtagtagcaatcaatcttgtcctctcttgtaaacatctgctggtggtccagagctctgagccagtcatgctgctgtctaggttctaacagctgtttgtggactcagttaccattgcaagtggacaccttacccgactagaaataaacattttccctgctctcctgatgccccgttccttctttctgcaaacacatcttaggattaagactttaaacctttgatctccc

SEQ ID NO: 2042 - DNA, 425 bp, Rattus norvegicus
  Genbank Accession No. AI170124
gagttataaaatttattgtgtaagcattcagacactttgaggtgggaaagatgatacgcaggttgtactacaagattcaatggaagatgtcagacaggacatctggtacagacgcagcagcacaacccaacacaggttagatgagagcgcttcatccggaagaaacttaaaagaataatttaaagctctgtgagacaagatatgttccaattgaaaacactaagagacagtaccattgatggaaaaaggaaaacttctatgtgtaccaaaagggagtgttccacgaggggggggataattattattaatgacagaccctgtaaatacattctacaatccatatcactggtcacgaacttcacatttacacgtaactaaaggcaacgcactaagactcgagttctggcctgtcaaatatttactcc

SEQ ID NO: 2043 - DNA, 495 bp, Rattus norvegicus
  Genbank Accession No. AI170270
cagtgatttaatgagaagtccgggcttctccagaagcctctgctagccgctctgaagtccctcccaactagtggacagtaagtaacgcagctggggcgagcatcgtggcctctgggctgctgctggactctgtgctgttaggcaaggagcagtcgggctcttgtttccccttaggagggacgtgagtcttcatgtgctgcttaaggtgatctttgcgcttgaacatcttctggcacactgtgcaggtcacctcctctttatgggcttctctcgtgtgcttcagaagctctgtccacgtttttcccacaaaggaacatcccttttgacataggtagccctcgtgaaccttcccatgccgtttcagcctgctgggggaggcaaagtgcttcccacatccctcgtgggtacacctgaagagtggctcatttgtgtgctggcactgatgggttctcagctgctggtgcttcttaaaggccttcttgcaaccttcaaaat

SEQ ID NO: 2044 - DNA, 491 bp, Rattus norvegicus
  Genbank Accession No. AI170298
cacagaacgtttcacgcatgggaagagggaggaaagggaaggaacacaaaatttaaaacaaaaacaaaatcctggatagcttttagcatcggttccattcccacattaataaaattcacttgggaattcctaagaaaaaaagagaacaagaaacaaggcggtcgaggaagagtacacaggcggggaaggctgggagggacaagaggcagggcatccgaggcaggggcgaggcttcccgagagaaccccagagaagagaacccgggtattgcagctgccaaggggaagaggaggggggaagcagagggccaccatcggggtcacaggaaggaaacacacttacccaaggaactggaggaggagaggaggagaggaaaccgtgagggcgggttcgtatactgggagagacagaccgtgctcaagagcacacgaactgaagagcaaatgtcccgagcttcagtatttttaaaagaaaattgtccccctcacccc

SEQ ID NO: 2045 - DNA, 631 bp, Rattus norvegicus
  Genbank Accession No. AI170314
aactttcttagatttctttattgatacaaaggtaggacacagtaattagctgtatacatttgtgatattatgatagtttggttgttatgtattggcaagtaatactaatttgaagtcagagtcagtgtgtcttccactcactgtgaatcagaacctaacaacaaaaggtatccaagaaaatctgaaaagtcctgaataaaaacagacattgaagaactaacatttattttcttgcttagacatagtttgtccttggacatatcatattttggattaggagttttgaatgcaatgttcttgctttgtggcaacagtctgtaaagttactgattaaccaccatataaaaaaagtttatatacttattagaagaaatgagctaaacaatatttcaaatgtaaattcaaactgtattagtaatatacatgtgcatttctaaacaaaggttcatccataaggtttactaataattgtatagcgattttatacacaagtgggataattgatgtgaccctcaatgcactttgtacgaaacggaggtgatcctctgaattttctatatccaggtttacacatgaattcaatattctcccctgattgggaataaatctttgcattttccctccatctgag

SEQ ID NO: 2046 - DNA, 615 bp, Rattus norvegicus
  Genbank Accession No. AI170332
gctattcatgtgctcctttattcaccctgatgttcaggggatttcatgatgacaattgtcgataaccaattgtaacaccagaaagttcaaagaatgggattttcagagaggccattttttttgcatttaatttaaaaagtatggcatttccttttcatataccgagctgagaggccattcagatcatttccttgctaatttttgcctcctgccataggaaggacgatttccaatacattctcagtatctgatgcacatccatcattctcaaacaccagaaggaagatgaggtcaaaagatgtcggcgggcagaggagatgccccgtggattgaggagttgagaaaatggacagtaaaatatatgttctttggttagcaaagcgaggagggagaggagcgtgtacatgacagacatagcagcattctaaagcagagacaagaatgtcgagagtgcgctcttccccgctgccagatggaagggctattattataaatgaaaggcagcagtcgtggatgccaggcactttgttctgtgccaggttctgaagtccagatgtaagcaggttacccctgggacaggacaggcttcagctccctcagcagcacagagccaat

SEQ ID NO: 2047 - DNA, 604 bp, Rattus norvegicus
  Genbank Accession No. AI170363
cttagtgattctttatttataaggtaggcagaagcaactgttacaatgtagaagggagacacattacacgctgttatctatacaagtttcaaacaaaaactgcacagggagaggtcaactctcaatacaaactagcaactaaaccacaataatttacctttagaaagggtttgttttcagctgtgacactgcttttacaatgtgcaaaaacacaaacagaactacccaaggtgtttgtcacattctttctacattgaatttggcaacagtttatattaactttattcagattatactaacgtttaaaaactaaacaagtgagaagctgtaccaaggtacagttacatccattcctttcaaaggtttaaaataccacttgtctctattagaatgacctcgcagcgatttctgcatctgcaaaaaccatctcaagcatcatatgcacaatgcatcagctactttgagtcatcaaggttggtgggctaaaccacaggcactactgtttgcttatagtctgtaaaaggagcttgtttttcaaagaaaagagcttaagtcatttctaataatcatgcctttgctttaaagccataacacctcgtgccga

SEQ ID NO: 2048 - DNA, 688 bp, Rattus norvegicus
  Genbank Accession No. AI170379
ggttgcatcgagtgcctcacagacactataaaaccaaaacggaatagaaacatctcggtggttaacagaacacaggaaagccaggtacagagtataatttgtcaaacacaatattgctgctccccgccccacccccacttcctccaatttataaaaagaagaaagaagaaaagaaaaagccatttggataaagagcaacacaaaatcaaaattggcagctcactgaatgcttaaaattcaggaaatcgtttttgtaactgaaactggatacattcaccatttctaacacttaggctatttttttttcaatacatagtttaagtccattcttcaggtgaaaaaaaaacatgtctttaaacacaacaatcaacactgttttggtgttccttgtttgtgtgtgtgtgtgtgtgtgtgtgtgtgtgtgtgtgtgtgtggacactgatctatatactgcttctatgccattgcctagggtgggcagcatgcatgggtaagaggaagggacatgcactatgtcatccaagtgccgcccagcctctgccacagatgacagaccctgcatccctcatttctagatgagaaagccaaggctgtcaagtcataggctctggagggaagtgcgagtataaacactgcagtgtggaaatccttcaagaaggtttttaacatctacagaagctaaacattt

SEQ ID NO: 2049 - DNA, 705 bp, Rattus norvegicus
  Genbank Accession No. AI170384
ggaacactatttattaggtcaatagttcatttagcaatacaagtacagaatatatcacaatgctggttacaaacatacttagtgtggtttaatattacaaataatggcgggcactacaagtggggatggtaggaaaggctgttctgacccagtgaactgtcttcaggatttattaatgaccagagattctactatagaaattactgtggcacgatagtggggattcctgtaaagaatgacagtgattcgtttgtaattattccattaagggtttttctttttattttgagcctattaaactaaaacccctgttacttaataaggtataaaaatagtactgacctggtattatttaataaaatgtagcattcattcacataaaagtaaaactaaattgaaaagttttagtcaccatggcaacatattttcccataaaaggaatatacagaaacgagcaatgttatacaaatggtacctgcgattcagtgattccacactttgtgcaccacaaccaagtttcctagatatctctatatatagcatatatatttaatcttaaattttacttttgaaaaacatgtgcacttcaacaaactcattaaggccactcatgctatagatacctagactgcaattaacaatagtgttatttaataaatcctaaagcactctccctcaaatcgctatcatgggaaaagccagttt

SEQ ID NO: 2050 - DNA, 673 bp, Rattus norvegicus
  Genbank Accession No. AI170394
gctaagtacacactttaatgaatatttatacacatttttgttagtagagctacatatttatgggacaaatattagacactttaacaggaagtttctgcattaaaggtctggaagtcttctgctgtgccttgttttgcagacttagtaattcttaaagaatttacaaaatgaagccagtatgtttagaaatgtgattgtcttcaatgaaacattaaaatgcaccccaaacccataaagcatacaaaggttaaggagaacattttattgttcaagaagcaggtttgatggagaggttatacatcaacccccttggctgggcagttggtagggcagagttcaaattcagtcattcatttctctcataaattactcaactgaaaaagaatgagtaatttactcccattcccagagattgagacacttggagctcttcaggtgggcctactgtgtgcacaggcccttgattgtaaatattgaagagagaacacatcgtctttcatagaagatagctcactgaagatgtgctgtgatgaatagatacataacttctaagacagcagtggaggaattttcatgttgtagagaattaaattctcagaggtgaaaattgagcaaacccccaactattgctaggtgtcaatcatgcagcctgctggacgcccccatggaagcc

SEQ ID NO: 2051 - DNA, 683 bp, Rattus norvegicus
  Genbank Accession No. AI170407
ctgggtacatgaacatattcacatacatatacacagtcagtttccacatcccacaaacaggctggattacaaagatgaggtatacactgctgatgtgtacatcagaggttcatggctaaagtgtttggttagaatactgcactaacatttcagagcttctctggtaaaaaaaaaatcccattaaaaaaagacattcaaaataagcacattcttctaacagtaaagactcttcccactttttttattttgacatcatgatagttccataaatttaaagtggaagatagctgttcaataaaagccatttcatatatataatatacataagttattttaaaagtctgtcatataacagattgatttggtgctaccaaaaacttacgatacaaataaatgactacaaaggaaaccatcactaaactaagacacacgggaacaacgttgcatttcagggggaaaaaaacccaaataatttctatcatgttaaaggaatcacgttcatttgtcattgtgtgcataatcatattcctttaaagcagactcctcagaacctttaaatttaaaaatgttcaggtataagtctttctgtacattcaaaaacaatcatattctgattacatacaatgctttcatcgtgcaaaaaaagccttagtcaattgttttctaaggtctaacgtcaaatg

SEQ ID NO: 2052 - DNA, 575 bp, Rattus norvegicus
  Genbank Accession No. AI170446
gatgagtgttaaataatttaatagtcttcagaagtgtgactctcatcagtagtttctttttcacattcacagaatttcggcaaatggacccagccactggggtatatcctgtaggaaaggagtgagaacacccacatcttcccacaggcttcaaaacccaaaaccagacacgcagtttattgtcctaagttctctctggcctgacctttgctgaaagctttctctacagaagaggtgtctggtggttcctgggcatatctgctccagtgagcaatggtttcctatgtcgcgtcatgtggcattgtgaaggaaacccaagaaaaaggtccctttctgggatcctgaataatgacgcacagcaagctttcttatgagtgaatgaaaataagaacattcgttgtaaataaaaccatcaagacggtgtcaacggccaaactaacaagccttggggaagagtatgccttggggaagtcttaaactcacgcaagatagcacagctgcgctcgcgcgcacgcacacacacactcacacacacgcacgcacgcacgcacgcacgcacgcacgcacgcacgcac

SEQ ID NO: 2053 - DNA, 329 bp, Rattus norvegicus
  Genbank Accession No. AI170501
attattctgttcattctagtcctttttgtgttcattcgtagcttaggccaagagctaaaatagtgactaaaataaaggcagttgctattattgtagtagtattggttgtttgaatcgctcatgggagggggagtagtaaggcgatttctaggtcgaatagtagaaatgtaatggctactaagaaaaattttattgaaaaaggaaggcgtgcagaacttgttgggtcgaagccacattcatatgggtttgctttttcggagtataaatttatttgaggcaatcagaatgcaattgaaatgaggataaaagataaggtgatgttaattgtg

SEQ ID NO: 2054 - DNA, 503 bp, Rattus norvegicus
  Genbank Accession No. AI170502
  misc_feature (1)..(503): n = a or c or g or t
ggcagtcttaaatacagctgtattttttcatctctgaacacactccaatcacacaccttctgccctcccactcccaaatgcaatccaaaggcattgggccagacacagcatgcgtgaggaggggcctgcccattcactgaagctgggggcaggacaaagcttgcaggcagagaggcctcgaggtacacgtggggcttcaagaagccggtgggctcacttttgtatcaggaaaagaggaccagggtgcagcacagtgacaagactcctgatttcagtcaccaggacccaggacccagaacccagtggtttcacagtgggccaagcagttgcggggttgaccgacattctgccctcaatagaggcactccctagtggggacactggaccaaggaaaagataagttctggtccagaataaggcanaaaggtgtctggttcaactccacatgctccttgaagaaatgaacgggacatgtccagggaggccaactttacagcatgtct

SEQ ID NO: 2055 - DNA, 422 bp, Rattus norvegicus
  Genbank Accession No. AI170516
gtagaaaaaaagtgtctttattcctgaatagtttagtacggtggtgtgggctggggagagccctggaaggtcggttcctcttccgcagcctaggccctggagagggctctgatggggacggtagtgagaccaaaagtcaagaaaagacgcctaagtcccagagaccacgcagtcacacgcgctgaggagccgatctggatgcctgaaccgcagtggggcgtggtcccgacttgcccccagccttggtggggagccgccactcgggtggctctgcgaccggtgtagataagtttggtggtccggcccaccctgtctacacctgttcaaggtctgtgtcctcgtaaagcagggctccgctgaagatggtaagcggctcctctgagtgtgccagctgccccatgaccaggtcgatgcatacagtg

SEQ ID NO: 2056 - DNA, 526 bp, Rattus norvegicus
  Genbank Accession No. AI170532
atataggaaataaactttattcatctgatcctctgagatgacatggccaacagtcacagagctgcagacaataggattatgttctatttacaatttacagtagtattttttcctctgaaaaataatataagtacaaaagctaggtaaacatgaggtgctgccatctgggacttatcatagcttgaagaagcaagccttagcaaatattcaattaaattctctaatttatcagaaaaaaattcactaagtttcacctcaaaatgtattgcacaagtctttaagaagaaaaagaaaccaccctaaaataaataaggaagatagttctttaaagagagggagaagaacccaagaaagacactgaacagccaagtcgggtggccggtcagaacagcctttgaaccacagagaacttcccagaaaaaaactgaatgaaaaagaacaaaactatcaccatttccccaccaagaatgtctgcttcaaaagctatgtatctgtggccagggtagcatgtgtcttcaagctacac

SEQ ID NO: 2057 - DNA, 500 bp, Rattus norvegicus
  Genbank Accession No. AI170538
aaagctttccattttgggtttattttcagtgcttcacacagagtatttataatgttaatgatgtggataccaacaggttttcagattcaacttcctggaaaatattttttccagacaaaataaccaaataaaacacaatttcaggagctgatacggccacagtccaccccaattactaagctagcagtggttaaaatcaggacgccatgtgcctagacagcgtcctgtgcacctccacactcacctgggagtgcccggacactgcataacaccaaaccaaaattcactttgcaaaggggagctattcttttaatcttggccttaagatcatttttaattatttaaaaaaaatctggtgagtacagtgactgatgccggaagaggggctgcggttcacaggttccacacgactcaagatcctttgttgggggaaagggggaaaccatgagcaagactgttttataaataagagtctttcctcaagagggacaatgcctgat

SEQ ID NO: 2058 - DNA, 634 bp, Rattus norvegicus
  Genbank Accession No. AI170570
aatcaaaggtttttattactacacagaggagtcaccgagatgctgtccctcatttcactcggtaacaatccattctaaataaagtactttaatgctggtcatacatttatataattatcttgacagagtaagaattagaaatacccaatacatttttgttagactgttgttttaaaattaacactggctttgacaaaagcagttggggcttaagggggacacgaaggtaaatagcagccggctcgtattaatactgctatttccctcccttatcacactccacagttcaatttatttatgctcctctctgggataccacgctctgtccagtaataaagcagtaaccttattgcacacacagttggggaaaggtgaaaggtggaaggtgaaaggtggcgagcagctagcatggagtgactcagtgcttggggttttgaagtgtgtactgcaaagagccagagaggccccagaagaaacttgggctgtgccaggtaagaaccctacagaatatcatgcccagcagttttattttgaaaataagctaaactgtttttggaaaagctttgaaggaatgagacagatgttgctcacagaacagctttctaagcaacaaagtaatgatgtcagtaaaccc

SEQ ID NO: 2059 - DNA, 445 bp, Rattus norvegicus
  Genbank Accession No. AI170597
aaaatgtattttattcaacttggaaaatgagtataaatccctgggtgtttgttgtggggaggatgacaatcagtggaaaggcggaagggagggaaaggagcaaggtgcaaacatcacagtggctgccttaggtccctgcctgcgaaggggagggtgggttcagctaagagctcaggtccggaggaacaccatggtgaggagacctaagacatatgccgcgaccagcttctgtcccatggacacatgcatgatgtgaggcagctggctgccaagttcgtcctgcagtggcagtagcaggaaggccacagagatgatgcctgccagtaagaagagcaggaatgagctggtggccaactgctgcggggcgttctcctgaagatgtctggctggagttggtcctgtccaccaaggatgccctgggttgggggttggctcagaatgtccc

SEQ ID NO: 2060 - DNA, 318 bp, Rattus norvegicus
  Genbank Accession No. AI170606
ttattttttttaaagggtaaaattggtggttttattgaacattttaaatgtaataccagtgcatgaagatgtggacataagaattttgaagcaagcctaggggatgtttttcctagttttttttttttttcagtgtggactcagtgtgagttgcagaaatctcttaagtatcatctgagcccattcctactgtagcctcctttgtcactggattatcaggcacgagagcagacttatactaccagcactggcttacctaggatagcaagcagcagaaactacattaaaaaagctgtagttgactttcagcctcgtgcc

SEQ ID NO: 2061 - DNA, 500 bp, Rattus norvegicus
  Genbank Accession No. AI170617
cttaaaaatctcacaatttgtaaatgtatatttttttctttaacataaaagtttacaatatacggtaaaacaaaaggctcaagaaaataatctcaaaaaaaggaaaaaaaaaaagaaaagaaaaagaaacctgaaattctgaattaaagctgaaggcgttttttaaaccctgttgttgaaccagtgacgtgtttttattgtgctgatgggtcagagaaaagaaatatatttaaaacctcagtccaaacgcggccttcgctgcccctcccccccaggtcgagtggccatttattttgtccttagcgagtgtgtgattgtcacgagttcaccagtcccaaatcctgccctgctgccgtccccctggctagcgcctgtagggatggaagccctgcacgttgtggttctgcccacgtccgaagccactgccaccagcggggggaccccctgagcccggaacagaggggcccccataggagggcggctgctggctggggtctgaa

SEQ ID NO: 2062 - DNA, 591 bp, Rattus norvegicus
  Genbank Accession No. AI170663
aggtggtaccaatctgtgtttattgaaaacctatgtccagcacatggtgcatgtttcaacatcgacaagacataggtgtatcccctgttcagtgaaaaacaacaccacccccccacaaggagaaaaggcacagtatatacacaagacacgagggctaggctgccccacggcaggggccataaattatagtgccggctggggacaggtggaaggaaggtagagtaggtggggtccaagcacaggaagggcctgcccctacctactctctgcttcaaccagcttgaagggatgagaagcacaaggagggacaattcctttcaagtctctcaggaagccctgagccaagcagtccacaaaagcaggaccactcttctttctaggactcccccgatctcaaggcaagagacctgagtcctgctgcctaccctgaaaatgagaggcttgtggctgggaaaggtgtgggaccagtgtctgccgccctggcttattcagacaggaattaggggtaaaaatacactctatgggaggtaggagttagggtgggggaggaagaacaaataatcatgctgaagacccctggaccctcgtgcc

SEQ ID NO: 2063 - DNA, 645 bp, Rattus norvegicus
  Genbank Accession No. AI170665
ccggcaaaggtaattaaagatagtttatggatgacagtgtgggtcaacggagaacagacaaggacctgtagtgacatttcccaggaacagatcaatgggtctataggaagtgatccagacaaacaagcagacagacagagggataaggaaatgaaaacatggggatgctgtgtctgtgcataggatccagctctgccctggactcggtcaatgacgagggatgctggaccttggtccttgaagagctacttcgcctccttctctgctctccctcatccaaaaggccaggaacatgggcaggtgatgttaccagggttggggtactctgggtggacagaggatcaaggctcttggaggctccctggggctgtgggggcctgggtagtgtgggattagcagggcccacatccagggcaggtcccccacctgccctgcccaccacaccaacatggtgcaataaataaagtttcaagtaataagtcagggtcaatgaaggaagagttggaggctagtaagcaggcaggggtataagacacaaagtcccctggccacccgccatgccttctcagctttctctaggtccatcaagtctatctcaagtactgcatgctgatgtccaccagtatccaccggacactccttgca

SEQ ID NO: 2064 - DNA, 636 bp, Rattus norvegicus
  Genbank Accession No. AI170671
gcatgatgcttttattaaagttttatggaaaaacaaacccacatttttgtgtgttacattatacagttttcaggcagagtctggtggtgagtcacgcgtggagagaagctttaaagtcttgacttgtgtccggttgtgaatcagtgaagcagctctgcacgccgccatcaaaggtcacaaacagcaccatttaagagactcacacttacttaactgccttcaaattaagtcacccctgccaaatgacaaactcaaagtgctacagtgtaaacaaccaatacccaccaaatccaaattcgcctcgataggccacccagcacagaatttaggacaaactgatgctgatgtctggctgtcctaaaacgctggggaaggtactctacagagaggaatccaagatggccaaccccagccataacacttactctaggtgtcgcctgactatgtagcccaacacctacaaatccctaatatttagtatttcacatcaaacttactgcaaatgttctgtgccacacttaattcaaatcaagtccacctaacgttggaagtacaaacatgtttattttgaatgaagcttgctacttcaaagcaatggtgagaagaaatcaagctgagacagatccactttaaaat

SEQ ID NO: 2065 - DNA, 631 bp, Rattus norvegicus
  Genbank Accession No. AI170673
aagaaatttaataaatattccaaataaatatataataaaactatgaaataaaaataccaagaatgggcaactaattgcatgaggctcatacagaagcgggtgagtgaagttcagtcagagttctttatgactcaggagccaagaaaccacctcctctttgctgctgctgctgctgctgctgttagttctttgccgacatcttatctagcagggtgacctttcagaatgctgaaccaatcctcccacccattcccaggccaatccttatgtgaacgcctaccgaagtctactcccggttctctacaaaggtgagcagtccaggcagcaaccttctgtgcccttaccccaccacctttccttggtctaaccactacccacagcctactatttcatatcagacatagttaactactttttatttcattggggaaaaaaaagtctgcataaagaaccgaactgtggttcccttgaggaaaatgttggtgtcgggtgtggtggcacacgcctctttaatcacatctgataagtatgcacgcaccgtgggtctgaggttggtcaagtctacatacggagttgcaaggaaaaaaaacgaaccttcaaaaacatttaccactgcttgagtgaaacctga

SEQ ID NO: 2066 - DNA, 671 bp, Rattus norvegicus
  Genbank Accession No. AI170679
  misc_feature (1)..(671): n = a or c or g or t
gaacacatggatctttttatttttgaaatcaaaggcaattcaaagggacagtcactgaagcttctgttgaagatctacagagctggcccgattctgagattaaataatattgcactttaagaggacctaatttctaggcttttcatccaagaaggaaagtattgctttgtttaggctttccttagactaaaagctcattgcagaaaactactttaaaaatcaatagtgcagagtacaacatagtaaataaagtacctgcttgctttataatctgaggacattttattgtaaaactctttagcccataattagtagaaagtgtagctgacagtgctcatttcagtggtccaggatccgaaggttcccagatacaatcttgttctctaacactgctcctggggggatgtcaattctgtcaccatgatttgcaatgatgataactgttccctttaatgaaacattttttccaaatgttacatctcctgaaaccgtgaggtggtccagttccaacatatcgggtatactttcaaaccttcttagataatcttgaaccttggtaaaagaactgcctaatttaaccaaaggtactgtangaaattcacgcttttcactcatggtcaaagatcctgcgttaaggctgtanaggtttgacatcacaagtaagagatctg

SEQ ID NO: 2067 - DNA, 419 bp, Rattus norvegicus
  Genbank Accession No. AI170692
aaagctcacacacagcaaggctgtggatcgtgttgtccccatcccgctctcacagccaatccaacacaagttcttcctgggctggggaagcagagaaaaagtaacaattgagctcgtgaataaaagacgacagcgtgtgcggtgtgatgtttcctgatgtcttcaccttgcgtctcctccatggttgggagccctccctctggttccccaagtcccacacgcacccctcccctacccccaagtccaggcgctcccatctgctgggcttctgcctcatttcccgtagacactttcatcactgtaggccacatacagaaaatagtcttcctcatggttgtcctcatacagctgtcccatggtagcactggtgggagggatagtgttgttgacaaagaagaataaggcgtcctcaggtctca

SEQ ID NO: 2068 - DNA, 483 bp, Rattus norvegicus
  Genbank Accession No. AI170693
gtaataaagacactgcttttatttagtttgatatgtttctatacagaatgcagaaaacacatcttaaaatcatatagaaggaaataaagacacgtcagtggttggtgaacacttgaatgtgagattggctctctgtctcagagtctgatggccatcggcagctcagggcttagggaggaggctgcctgcaaaggcattgttgctcttgttattctgttcactgccccactgcctccagttgctatgacaacaagccactctgggccagcctcctctctacatggcaatgcccaatggtggtgttgctaagagcaacaacagttatctggaaggctttccaaagccctcacctggaatactgggattgattgattgatttttgatgaggtcaccagaaataatttcatcaggtcagatccctgctcttgggttaagggggtacatatggagggggtgatcggtatggggtcatgttcttgggac

SEQ ID NO: 2069 - DNA, 562 bp, Rattus norvegicus
  Genbank Accession No. AI170715
cccagcccccgcttcctttcacgctatcggtggccgtaggtggtcgtggccaccgcacccggcgggaggtggcggcggccagtaatgcccgggaaactcctctggggagacatcatggagctcgaggcacccttggaagagtccgagagccagaggaaggagcggcaaaagaatgatagaaggaagtcaaggcaccattctgaatcagaggagagaacagaaacaagagaaaatggtgttacagatgacctggatgctcccaagcccaaaaaagctaaaacgagagagaagctaaatggagacaccaaagaaggacttagattttcagatgaattttccccatctcataagtcaagaagaaaagacctgccaaatggagatgtggatgagtatgagaaaaggtctaaacgagtgtcatcctcagaaaactctcacaagtcaagtgataaagcagatgagactctaacacgtgagcaaaaggaaggagccttctctaatttctccatttctgaggagaccataaagcttctgaaaggtcgaggggtaacataaccctttccta

SEQ ID NO: 2070 - DNA, 712 bp, Rattus norvegicus
  Genbank Accession No. AI170751
cagaaagaattaaaacatttattgggcataaatatattacatatacactacagatacagttaggtattacatatagcatagtatttgcaaaatctatacattaaaattgatatggcagttttaatacaatgtatatgaaataatctaaaatttacaagacaggaaacatatgattatttttttttctcctaaagttgaaaagcttggaatgtatgtccaacagtgaggtaaaacattttgtctttcaatttaaagaattgtgcaaggataacattcaaacacattctattagggcacttgtcaaatttgacacaaatactgaatgactgtagccaaagagacagggtcagaaaatgccaacatctcaagtgtgataagaacaaggcagataatatgcaaaatagccttttaaaaaagttttctttgtgaacattttctttgaggacagagggcagtttgcttcaggtgactggaatttcttgtgtcagggatgcagttgatgtacagagaagcatcagggcatcagaaagccattcactcattcctacgtacggcaaagggcacagagaaggccaatagaaagccattcactcattcctacgtacggcaaagggcacagagaaggtcaatagaacactttattgtattgttcctttgtaatggcaatatatatatagttatatatccatagcacatatacagatctgtgata

SEQ ID NO: 2071 - DNA, 652 bp, Rattus norvegicus
  Genbank Accession No. AI170754
ccaactaccactttatttatattactatgcttaagttacatgggaaaagacaaccaagcagttctgccccatttcagaaagtttccaatcaacaccaagtacgtggtgacaaggaactagggatggtgacatctgtgggtcaagactgacaaggaagaatgggttctggtgctacagttcctctccaacaagaatatggcacactggccagcacaagccacgctaacactgagcctccagcgctgggcacagattcggatctcttcttgaagctagcaaattaagtgaaataactgggttaaaaagaaaattttaaatgaagcccaaataaatttaaaaaccatgctcttgacatattctccactcaaaatgtacacaaaacactccttttcactctaaggaccccaattttttcccttacatagcccaccatgtagttgcaaatctgcctcaagatgtaaacacagggaaaaaattaatggcatatgcataaaattctctctacaaactgctgttggatggaaaatacaaaattaaaaaaaacaaaacaaaagaagaaagaagaaagtttccatcttagatgctcacaacctcttgttccgcagttcatgaatccgactctgatgctaaggtgacagtgtatgtaaggaga

SEQ ID NO: 2072 - DNA, 671 bp, Rattus norvegicus
  Genbank Accession No. AI170763
cacagacatatacacatttgctcagtactcagagccgtttaggacacagtggaaatgattaccacttaggtgatgtactaaatgacaggttccctgcctcctcagtcatctatgaaaactcactacaataccacagcatgctggttcaactgctaagtttacctttcacttagcagagtaagattggtttgatatgtgacaaaccaaggcacggaccgtttgggaaactttctgcagcatcacacaggaacgaagcgttgcacctaagagttcttcagtcaaatggccattatccttttccagtctaattactgtggctgggataaggtaaaatacacctcctagactttcacatagaccatgcccaacacagcaccagcctttcatcaacagtcctcagtataagcactgtaccctaaggattttctgaggtggatggtgaccctattgttgataacctaatatggctctattttaaatcttccctctttctttcctccctccctcccctcttatactccttccttcctttcttgatggttttagggatagaactcaaggccttgaccatgctaagcaagctgtgtcaccaagtacagctctaagcttttttcccccttgaaaaatttcataaatatgcccagtaattttcattttgaaaatgtaaacta

SEQ ID NO: 2073 - DNA, 618 bp, Rattus norvegicus
  Genbank Accession No. AI170770
aggggccaaaggtggctaatttaatataatttctccttttctagtacatgcacagaaagcctgtgcagctaagtcaacgagtacatgtatgtttgctgaaacacagcctcgtttcccaccacacaaaggcctcgctcgatgaagcagctgacaggcaagggagctcacaggctgtgcttttgctcatcggtctatttctccaaatacaatatcctgggtgcctatgatggctacgacatctgccagcatgtgtcctttagacatcttgtccaaacctgccaggtgggcaaaaccgggagccttgatcttacaccgataaggtcggctgctgccatcagataccaagtacaccccaaactcgcccttaggagcttcaatggcggtgtatgtggctcctggaggaacttggtagccctcagtatacagcttaaagtgatgaattagtgactccatggacgtcttcatctctgctcgtttaggtggggacactttggcgtcatcaaccttgatctcccccggcggcatcttgttcagacactgttcgatgattcgaagggactggcgcatctcttccacacgacacagatacctatcgtagcagtcccctcgagaaccaat

SEQ ID NO: 2074 - DNA, 585 bp, Rattus norvegicus
  Genbank Accession No. AI170773
  misc_feature (1)..(585): n = a or c or g or t
aattgaattcatgtttaataattacaggcaccgtgcccaacccttccccctgccctggcagcagcaggggtggtgcaggggctggggcatatgcccccagcagcgaggacggcagtcccaagagtgatttcagaaaataaaaaaggaccctagaggcaggcggtagtgcccctccccccgcaaagacacaccaaatttcaagactttatatatatatctctgtgccctggggggaggagagagacacttggcagcatcctggaggggggccccaggcagccccaagccatcctgcctcatcagccactttattagctcaagacacatcgcactacaggcacccactgccactgccgccacagccgccgccgcccccctgcagtccaggcggctggctggctgggccatccacgtgtccatggctccaagtcccctgccccacccgccatcagttgtgatcagactcctcgtcctcagcctcacgaagccaattgaagaatgctgtgacagatttaagggccacacccttgccctgctgttcagcagggtccttgctgctctcccagctgtanaaggcgtcttcct

SEQ ID NO: 2075 - DNA, 629 bp, Rattus norvegicus
  Genbank Accession No. AI170795
aggtactttttattttcattccgcatgtgtcttacaaatttaaaaatttcataaaatgaaagatcacagagaagtcatcaaggtcaatttaagtatggtcacatttcttggattatgtcattgctatcagagacacattgaattcaaaatattttagatgcaatttgacaaacaaaacaagcaacgccaaaaaccttatggtgagattttaaaacagaacattctttaatttcctcccaagttactaagcagtctgatgacttcattttaggaccacaacgtgatcactgcctctagtctgcaggggagatggatttcctcattgaaacaagaaaaacagctcctttccatgtgtgaaaaactgttttctgtttgtttgttttgtccattttgtttacttactttttaagattctttctactggaaaataactatgcttacttgctgatgtgtccgttcaggtctgagaaagaagaaaatctacaaatggtccaaagatgaaaactttactcaagtcttagatctgcttgagtttcttctaacttgcaaatatcaaaatgaaaaatttagttaaagcacctgattcatgtggagaaagtaatgaactgtattttgatgctaacatatta

SEQ ID NO: 2076 - DNA, 655 bp, Rattus norvegicus
  Genbank Accession No. AI170809
ttatttttttttcgcttttacaaagatttttatttggttcacagacgaagccattcacttggtctgcttaaaaaagtagagacacaatgatttacatcttaaaatagtttccttgctccagttctacttaaagatagcacaggagcagatccgctctgcttgtcttgctggtttatagggtgcaactcatcctcctgggttctggctgctgggtacagggctgagagtggggttaggtttggaaaaaacatggctgtgggtagcacgagttggcttttgttgtgtttctttgcataggtgttaggagccgagagcagctagggtgaggatccagagccggaagctaacgaggctctttgaacacaggcttgacagtccccatcctgtttgcctgccactggcctggggcatcttgcttagcttcgaggaagtcctaggaaatagtttctgtaatgcatcctgatttgaaatcagtgaaagtggattgtctaagaaagtgaggatgcttttagcatctatgtcagtatctgagggccccagaatatgggcatcaggagtccagtgatgatattacagctgggcggcgtttctctatttgacaatactgcccactgtcagtgaaatttcagacatacagtcccatcccatccagtct

SEQ ID NO: 2077 - DNA, 662 bp, Rattus norvegicus
  Genbank Accession No. AI170820
agtataaatactgtatttattaaatatccttacagtttatttaaatgtatttacagaactattcctgcataagttatatttcagacatcgatcaggtcattgcctctggtaggacaaacaatgatagtctcgacagaacacgcagctcattagcacagactcagatttgctcgtcgttactatctttgccaccaacttcctgctaacagtcacgttttgacatggtcactgctctattgagaagttcaattttgtgataatttacttttttcaaagaaatagaatccaaattcttgtttcatattttgttttataagcagatttttgcaaatttttttaaatgtaaaactgtgacagtctccagagaaactgagtgttacaacttggccagagagagctgctgtacagtgacaagaagccatgaacctactctaaagtacaaacacgcacagcctcagccagcctgccagtgcctccaagacactcctggggagggcagtgctgggacgcttccgtctgctggctactctacccagagcaagggcactctcctgcctcggaacgctggtgccagtctctgccgcagacacacacctggaatggactctgtgagcgagtagcctatcgaccaagctacttcatctccacttgataatttaata

SEQ ID NO: 2078 - DNA, 498 bp, Rattus norvegicus
  Genbank Accession No. AI170894
aaacattaaagaattgtataaaatgatacatgacgcagaacaagttctcttacaaatgttcacgtcatttacaactaagatcaagcagccaaaaaggagtagattaataaagccacaggaataaaacagatgcaaatatttaaaaaaaaagatacgtattatgtgttgaataaaataaagtctttccttgtgttggttgggtagtcttttgccttaagaggacaaagctgtgtgtgatcattgggttcagtcttcttccaaaggaataatatcaggaacttcatcagtgtcagatgtcgagtcaaaagcagagaaatcaagcatcagccagttgagaggcgtgttgttaacaaggtaatccataacttcatctaaggactccttcattttctgcagctgccccttgctagaagtgaggacgccatcagacacttccttgaaggaggtaacattgcggaacgccgagttgatgtcacctgccatcacccccaagtgttt

SEQ ID NO: 2079 - DNA, 551 bp, Rattus norvegicus
  Genbank Accession No. AI171090
ggatattagaaaattaaacctttaattacataagctgttttcaagaatcacgtacagagatttcccagagacgctggagttggcagtcggccaccgcagtagattgagcccaccatttcagcaaaggcgctgctggcagctctagcccttctatgtaggagagggacctctgtgaggccggctcatttgccttcattccatttccccatccaggaatcattgtgtacacccaactcccacagttccggtttaggtgaacaaggggctcagagtttgcaggtggcctgtgccactttggaactggtttttctgttcagggcttgacagatgaagtccccggcttctaggagcttctggaggttcacacccgtgtgaatccctaagccagtcagcatgtagaccaggtcctcggtagccaagtttcctgacgccccctttgcatagggacagcctccgagtcctgccaccgaggagtccacaacgctcactcccatctgcagggccaccaacgtgttggccagagcttggccataggtgtcatggcaatggac

SEQ ID NO: 2080 - DNA, 544 bp, Rattus norvegicus
  Genbank Accession No. AI171091
gaacagcatgttttccgtttatttctgtgctcgcccttgcagtacatcaaagctcagtgaactaccgctaactgagaagtctcccgacagtcacagtgtgtgagagaagcaggctgtgtgaccctctgtggcagaagacacaccgggcgggcagtctgtctgctctgctcctggacgtgaagtaactagcagctgggctggggtaggcatggccgtgtcctgcttcagtctgagtccatggcaaacagttggatgtcctgtgggttccagtacaggccgactgccgagttgtagaccagagaccagacgtatgggatgaagaactcctcaggctgctcttcctgcacgtatttgaatttcagttctggaaatttctttagtctgtctttgggtagtgccacaaccccttgtttaatgatttccaagacccgttccactgacagctcagctccagattgtagcagtcttgagctaaagaaggaaattaccaggtcaatgttctgcattatgtcttggaatgaggggtgagtccggaattgctcaa

SEQ ID NO: 2081 - DNA, 575 bp, Rattus norvegicus
  Genbank Accession No. AI171231
caggattaagtgtttattttagttcagttaaaacaaacatacattgtttcattgaaactggcatagcactccctgccaacaagccacagtggcctgtcagcctctacagtacagcgggggcatttacactatatacatacaaggagtccacgtgacttccattgaaatcacatgacaagttaccagatagccgcgttgtacctactgcattttgaaaatttagacacctcatttaaagcttttagtttgatatctgaacttgcgttgatgaccaaccagtctattgcacatacaattaaaacaagttattttcaattttagtattatacacaatgtcaatattgaatcctatgtacaagtaatccggggacctatatataatgtgaatccatcaaaatgcagttaagaaaatttagggggaatatatacgcttgaacccaagacccaattccaacatgttatacagcttatttacaaatacatatggacaatgtatgtacagtttaccataaatattgaaaaataggttacctttaatggatcaatgctgctctataaataacagtacagttatt

SEQ ID NO: 2082 - DNA, 588 bp, Rattus norvegicus
  Genbank Accession No. AI171262
gagaattcattaaaatttttattttgaattatgacctattctgaattcaaaaaaatctactttggaaaacacctcattgggtgttgacttactaataaaaagtaagtcatcactgtttgaacataatatagaatacacaataaattatatttacatgcactgaccagattatcacacacaaggtaaaaaaatacagtattttatgtacattcttaaagatttacattttcacataggtttataaagttaaaaattctctgtacaaaatcttccgtgtacagagtgtacacatcttcgtccttatggctgtatcgccacacagaactgctttaaactagcactacaacactggagggctcacttcatattcacatcttggcacccatgtacaacacatcatgaaatgtgaattataaaacaattagaaagtaatcatgcagctatcttaatacaagaaagtgagatgagctgatcagcacttatcacctccatttctgttcgtatctgtgccacttcctgctgtgtatgcctattccacttcctgttccgctttcacacaggtgcatgcaaaactagcagattatgaac

SEQ ID NO: 2083 - DNA, 637 bp, Rattus norvegicus
  Genbank Accession No. AI171267
acttttactaacctaaaaaaagatttgttaaaagctgaattacaacttagaattacaaaatataaaacaccataatgtgtattaaaataaaccttgcaagtttgcaggtcgaccctctttggcccatggtctagtagtaggtctagtagatctagatgatctagaagtatctatagccgatcgctgcatctagatgttttcttcaatctaacgacgatcaaactgacagccaaaagagccaggtgaggcttgattgacgcaagaagatttttctagttgggaatgtggtcaatctggtgttcctctttctaaagcggaggggggccccaattgtaagccaaatttactgttacggcgatcaccgactcaaattttctgccctttaaagaataaggtgaagctaggtgtagatgactcgaggggatctggcctcttatgctgatcacctcaaggtctaggaggatcttaattgtcggatttgcaaggcgcctcagcatgatatcataaggctcgtgacattctgaatcaaggcgactgactcaaacgaagaaacctgaaaggttttgaccaggttgattattaatatattaacatttttaattaaacaaaaattgtaaaatacacctgtacaattaac

SEQ ID NO: 2084 - DNA, 600 bp, Rattus norvegicus
  Genbank Accession No. AI171276
aaaaggttttacttttatttaaaataaaatgcatttatacagtctttaattcatggattattggaaaatactggtaagtccacccctccctggcgcccttctgggctcgtgagctaggaattgtctaactagcaccaacgcagatgtaacagcgcaaaagactagaacacagccggtccaggctgtggttaagggcatcacggcaagtcacgagcatcatgacgtcatttgtaatgtagcagatactgaaactgcatattaatattatatattttaaaagcacttaattaatgcaaagatgctacatttaagccatttcctagttgtgaatagttttttaaaaaaaaactgtacaattttataaaatttgtgtttgtacattagttacacaaaatgcatacttcatagatctttacttcatatggtaacacgggctgcataccttaggcagatagtgaatatgctggtgaacactaagagtgatgtaatacagtttggtgtaaaaataaacacaaacgacgtacaacatgcttacttaaggacaacccacccgaccacaggctaacagtgtttccttcaaggtcaacggcatcactgctt

SEQ ID NO: 2085 - DNA, 506 bp, Rattus norvegicus
  Genbank Accession No. AI171289
gcgcattcacaacattttatttccctggaaaagttctccatcgtaaagcagtttatttctttcagctaagaaacctaaggaaggaggaggagcagccagcggtgaggtgctaggactcagggtgctaccagccagctcgggtttgggctgcagcaaagcagggctgtgtggagcaggcagagctgctgcgtgagcaaaaggccgccatgaagacattccaagcggcttccaggaagcagcctgagcgctgacacgcatgtggactgagcagtctggttggctgtctctcaacactggtgtttcctagagctttccattggcaaatgcagcctcctggaactgagggacaaaggttttgaaataagcctttgctctcttggccatttcatttccatcccatctggggctgtatgggtaatttttctgtgcttgggagtaaagctgtccactgttggtaaagtggtagacggactgaaacgtgagggttggctgatctcgagggaaaa

SEQ ID NO: 2086 - DNA, 425 bp, Rattus norvegicus
  Genbank Accession No. AI171305
aagcattcatgtaatttattttccttaaataattcgctacaatcctgccacaaattaaaaaaaaaattaacatggtattcacagagcagaattctttaggacaatcaaaatcccagagtacttagaataaattaacatcaaattgggtttatattcagatagcctgattctctcctctgaaatgaaatggagaccattgtaacctagggtgaacgaacacacttgttcttctgtatagacatgaattctttacataaactcaacaataatttgaatcaagttaggaatcctgagaaagtcacccacctacaggccacgcgacatattggaaatgggtcactgtgtgctcttccccggtctcagtgtttgtaacaagcatttttcgggacacttaagcaatggtacagtcctttgcctgacactgg

SEQ ID NO: 2087 - DNA, 476 bp, Rattus norvegicus
  Genbank Accession No. AI171307
cacaagaaagtttttaattaaatatacaccataggttgtatttctacgctggtcacagtcaaccaggttaggacagtgacaggtaagggtagctagaacattacagaaggcccaagcaagggtgagaatgtcagtgtggatttcctagcagtggaacctgggtatcaataaggcaaaaggcataggaagggcaactgacacagcaagaacagcacgtacatagcctggcaccaagaaacaattcggtaagatcattcctgacagagcttggcagtcaggcacagggctgagggcttggagaagacccatagttgggaaccatagatggggtgggggtgaggctagagaacagatgcagccgattagagagaaacttggaagccacagttcagaacttcatcctgaagatggcaaggcacctggagggcctaaggcaagttaagagatgaatgaccaggagtgaatgcagcatctgt

SEQ ID NO: 2088 - DNA, 397 bp, Rattus norvegicus
  Genbank Accession No. AI171319
gaacatgttaccttttatttaaaagtgttactagccctgcctggggctcctatacaaaaacaacacacaacccaaatgaggctgcttcccgtctctagactcggggacagtgttggggtttagcgagtggaatgtgtgctgaaggagggcacccaggaggctcctaccccagtcctcaggatggcaccagctgtcccgttgcctttctatttaccacagaggaaggaaaggcagtcttttgagatgctcagtagaagtcgagcatggatggcccttgagggtcccacgaagggtcatttgctcggtcatggctgcagatgttgcgagtgtcgccgcagcgacaaggatggcaccggatagcttagggagccaagcaccgcagcggctgccaccgcga

SEQ ID NO: 2089 - DNA, 531 bp, Rattus norvegicus
  Genbank Accession No. AI171354
caaagttaaaaatttttttgatttaaaatgcacttataaaatgtccacagaagacatgtcatttttcactgctatataaatttattgggaatgttattcacatttattgtcacctaaaacatactgtaaacaatgggttattccctaagacaaatgcatacgtgattctcagcaatcattggtttgattattagtaggttacaaggtcacatctctgtggaatgtcagtgaccgctgtagtgtgacaggcttcagcgcatcattgcacacactgcttcagaacagtccccaccgggtctggacccaggacgcaaagcaccccctctgcttgaaacggcagcatgaggttcaggtcaaggtcttccaaatcccggacacgtcagtccgtttccaaacttctgagttatggctctgcagcaggtttagcatattaaatcccaagtgttctaactccctctatttcaagtaacaatgaactcttgaggctcaaactctttaggttttaactgaaagtaaccaaactttagaaag

SEQ ID NO: 2090 - DNA, 644 bp, Rattus norvegicus
  Genbank Accession No. AI171362
ttttttttgtatggttggttttttaaagatttattttattttatatgagtacattgtagctgtttttatacataccagaagagggcatcagatctcatcacagatggttgtgagccatcatgtggttgctgggatttgaactcaggacctctggaagagcagtcagtgctcttacccactgagccatctctccagcccgatcagtgttttaacatgaaagaacaaatgatagttttattaaactacttaatgcttgcacacacttacataaattttaaactgccaagatttttgataagtgcaacaccattttcaaataagcatagtctaactttaaatattacatcatttagactcatgttggaaaacgttaacttataagggttacaccaatgtccatttactgtccgtagcaaaacagggtccctgatagatgtgtcagcatatggatggctcctctactgcctgagcgccttctgtgacggctttgacacacttggccattgtctgtgaggctctgctaattgaatctgtcatatagaagtcttttatagttagctgaggtggaaccagtgggtcagcaagaaattcctgggcttataacttggcaagctcacttgcttgttgaaagtaattagcttctt

SEQ ID NO: 2091 - DNA, 579 bp, Rattus norvegicus
  Genbank Accession No. AI171367
tttaatctttattctgttgattatataaaagccatacaatattaaatagcataaaatattgaaggttttacttatgtggtgtataaattttagtaacaaaggtttaccatgaatgtagagctgaaatacggtcatgatcggcaagtcaaggataatatagaatttgctacatctcatgatttttcacaagaaagatctgcttctccaaactcatgaacactcactcacattgcacctcctttccatgtgacatactttattcttgtttttttgaacaaattctggaagagagttgtgaggatcgcagtgagaacggatcccttcattctcggcaggaagcactgcactggcttgaggcttttaactttgttggaaacggttatcttcaacaacaatagatcttttaggagccacgtccacaaatatatatcgaaaatcaaactggccactcctcgggttctcttccacttctgcgtgtaccgttccttgcttccctggctcagagccctcgatatagaacttcacacggatgcgctttagcccgttgtttgcatattcagtaaagctgacatgttgtct

SEQ ID NO: 2092 - DNA, 589 bp, Rattus norvegicus
  Genbank Accession No. AI171369
agaaacatgttttatttgttttgcttataccatcagaactgaaactactgtctgtcatttccctaaaatagggaaatgaatcttaaacatatactggtgcttttcaaaagggtggtagcagcagaaaaccatgtggccaaaagtgttatgattatccatccattagcgatcttcatcagtacctattaccaatttgagtaacaatacagcaagatccagggttagtgatgacaatgcacattattgtgaggaccaatcctcatgtaagtcattgtttcagagaaactgttaaagtgttcaaaagatatctaaataattcacattgagcacagaggcagcccatccagattataccccatatttgatgcatatcttccagaagagtcagtcaaagcctgatttgcatctgggctttgtcttacacagtatccactagtaaagagcagtttacatgtgttttcaatcacagtcgtttggccagaagactagtgagtgctatgtcagggctggtgtaagccaacctcacttgtgtgattagaacccatgcataatttggtatgcttctaatctgtccgtgctccaatttaat

SEQ ID NO: 2093 - DNA, 505 bp, Rattus norvegicus
  Genbank Accession No. AI171374
tacttttacattgtctacaaccatggtgaacacattcccggtataaagacacagcctttcgagtttgagatgtccccaactatgagattacatatataaaaccgcataactatagatgaggtaatcaaagtaagatagttactatctaaaataaaataaaatggaaataatttactcataagattcatatttaaatcatctttatttacaaaatactatcctgagaattataattccattaagcttcaatttgagcaaaaatataatcaggtaagtaacggcagttacttaaactgaaagtgagaaggcaatgactgccgacagacccaacacggtcagctcaacatatctcccaggaaagtcttaggggattcacatggctcatccccacagtgtgtcctcagcacctgagacaggatagagatgtccctgatccaggccatagtgtacaaagtccattcattcagttgtgatttagaatatatatacaacctggatggcattc

SEQ ID NO: 2094 - DNA, 515 bp, Rattus norvegicus
  Genbank Accession No. AI171460
agaaggctgaagtctttaacatccggcttgatacaggtatatcacaattagacaacagaattttctacttccaaggcaaaaatgtagaaattaatactgatgtgtagcccttacagaatgtccatgcactaaaactgctgctgcctgtaaagacagagacttcacaccttttagattacaactagtcacactttgttttgagacatgttcatacaaagatggaaggaatcatttgtagtatccattagctaatttgtttccattagcaaatgtcacccatatagatatgattgtctaattaataggaagatgtgtgcttgatccagatcaccattacagtaatatcatctctaattaggcagtgagctgtaatcctccatccacgataagaacatgtcctgtgatgtatggtgactctaaaggaaacacaacggcatgtgccacctcaagagcttctccaaacctcccaagagggatgtttttcttgaaatgttcttctttcaagtgttttgtca

SEQ ID NO: 2095 - DNA, 465 bp, Rattus norvegicus
  Genbank Accession No. AI171487
cagagttctgaggttgctgactgagcacagcacagctgtgtaccacaggtcgaaactcgaccttaaatattacaatctagcagtgtctgctggccggagccggccagcccctgccagcatgtgggcacttcttcatgtaagtctattctttggcagctgacacttgcgctgacagagagaatccagtgacgtgttagggatttcacgactaatgttggcttgcaggcctgtgtgtttacagttctggactctgacttggcctcagaggtttccctggaatgcggttcctttcctcctttactattctgaaatctgggctaaacaagctaacttgaatgtaacagatgaaaaaattatgtcagatatatttaaaaaatccagcaatttgagtgttcatgtctatgtaaatacatttaaaaggggattaagcaatgtctaacttatactatatgaaattcagaatgg

SEQ ID NO: 2096 - DNA, 442 bp, Rattus norvegicus
  Genbank Accession No. AI171535
ggagattttatttcctttattgagaaacttaagtcttgggtacatcaaaaccaatttctgggagaggggaaaaaaaaacagaactcataatagaaaaaaaagttaccatcatctgggccacaacagaacccagagaatatattcttataattgaaaaattctaggtgcttcataattgaccttttgatacaaaatgacctgttgaatttgtaacttggttcttgaaagaggtccacagacaaactaggaagtcttcagacctcagctgaatgccgtgaggggttatttggcttttgactccttctgggcagcttctttcttggcatgatgagcctgcaggactgccacagcttcatccaccttggaacggagggactcgggggactccagcatgtggagcagctcagagttgtcgatttctagcagcatccctgtaaatttt

SEQ ID NO: 2097 - DNA, 495 bp, Rattus norvegicus
  Genbank Accession No. AI171583
  misc_feature (1)..(495): n = a or c or g or t
gagggttggatggattgtaattgatggttgactgattatggaattaaatcgggtatagcttccagctgggctcttctctgtggcactgggaccactaggctgatggcaaggggtgggcaggaggtgctgagaagcctcagttcagttcctgaatgccagctgcccaggaggggcgggcgaagggctcaggcagctgcagcagagggtggagggacactggagtccacagtgtcagcgccgccggcagaacggttcttgtcaatcacttctcgaagtcctttggcaaagtggaggtcagccccaacagtgacgaagcctgcatggttggtcaccacctcatgcacgaagttgataccctcagggagggggatctgcaccccacgccagatacgctcattcaacanaggcatcactccgatttgcagcagcgtcttcagtggggcctgcagtgggatcagtgccagagactccagcgcagactgattggagtaaatt

SEQ ID NO: 2098 - DNA, 421 bp, Rattus norvegicus
  Genbank Accession No. AI171586
aaaagccatcactttaatgtaagctcctttacctgtgcctgccctcagtcattcttctatgctgaaagttagcactgcataagcccaaagccagctgcaacttgtatttcgcttctccacacttcagacttcaaaggtccagcactggaggccagagagctgacagacaaaaggtgatggcagacgcatggtgtttgtggcgttcttctcacactgacttaaaactgccaaaggaaggtcaagaagcacagtaggcctgcagccgcatcattgtcagctgctaacctcgtgtgcttagatttctaactcaggtggtttcctcctcaccacggaggagggcttgaacactcagccttctccaacagtaacaaagaaccctgcagtgtgagtgccctgcaactggcctgtgggctgcccactg

SEQ ID NO: 2099 - DNA, 631 bp, Rattus norvegicus
  Genbank Accession No. AI171587
atatatacaacaaatttttaattatgtactgaaaataaattacaggaaataactttaaaatgcaacagaggacaagtcacaataaaacattcccattgaattctcttgggggtgagattgcagtgctcaaggaagataaatatcacaaatatatcaaaacttcaaactgtctatgcattcacacactgacatgagccacagacattcctttcacaggactgtacttattagcctaccacagaaccagattttgccataaactacaaaacttttaatacaaaattgtatttatatatttataattcatatacatgccctacctgtaatttttagaaaataaaagctacacactgtacagacactcttaactcacagctgtaggcaacatttttggatggaatttctcccccaataaaattaatggcgtattttatgtacatgaaaggctaaactgcaaagacagctcagtttcccagataatgcatctccgttcagggcaggtttacaaatttaaaaaggcaagacaatgtacacctcagaattaccttctcagctacgagttgtcatgtgatttctgtgaagtttctgatacatgcatttatgtaatactggcattgaaggcagtaaagca

SEQ ID NO: 2100 - DNA, 515 bp, Rattus norvegicus
  Genbank Accession No. AI171611
tttttttttttgagaggttgtgtttattacgccgagcctttgcactacgcatccacctacagtccgtaaacaaatacagtacatttggaagtaggaggctagcccatcagaagtggcagagaaacaattctgttcagacagtgcaacctcaccacagcgccctccttaggccagctgtgaaaaacaccagaaggcaggcttaggccccaggggtggatctccagagattcatcagaaactgccgtggagaggagcaaggcaagagcttacttagttacattcacaggtgaagcttctaatccaagtgtccctagcgccacaagaaacagcaatcagcaggtggttacagaattaggtaactcagagtaaagcctctggccgtccgagcaaatgaggaatttgcctgttttcatcatgggtggactatgataagaacatcagctgacttcaggggggcatcagtcaggaagggtcgtttcatcctggccacatgtccacgggtccacagaaagcaa

SEQ ID NO: 2101 - DNA, 600 bp, Rattus norvegicus
  Genbank Accession No. AI171632
cagatgagtttatttaaatgtttccctttcaataaatagactataaaactcccggaagtgtatacaaaagcagtcactactggctcctgtgcactccggactgtgcagctcagtctgcaaagcaggggcagtgtaccacagccaccaggggagcccttttgagggcaaaaccagacaagtctcagaatagaagggtgtgttcaagtgtcacttctgagttctacttctgggccccttatgtgctgaatacaaacgttgaatactcctttaggattagcccccaccagactgtctcatatctgggatcaagctgttatcttctaatttctctttgtagccacacccagcagctctgagcagtcttacatgtattagaccaagtcctgagatgctggtgagcttgaagctggctctacctaaccttacccagtatcacttcacggactgtgtggtgtgcttggcaggcagaccagactgctcacagcagcatggacaagccttgactacttctggaaaagtctatggcattacaggaacctagaatctgaggtgctggtgacacatgggacttagtgctttggtgagagctttgggcactaa

SEQ ID NO: 2102 - DNA, 684 bp, Rattus norvegicus
  Genbank Accession No. AI171652
ggccataacaaacaaacaacatgaggtttaatcaagcacaggagaaaaaacgatacattcaacagatgtggtatacagaagatgaggctgctgctggcttgttgttgaaacaccatgtgagtatactctcctatgaaaggtaagtaggaaaatgacttggaatattctgatctgtcttcatacaggaatattgatggagagcaaaagagcataatcaaaggcagcagtcaactctgaatggacctgctgtcctctggctgtaggccagcaagtagcactgccatcttctagcttaagaacaaagctcagcagtctacgggaaataggcacttacacaaaagtttttaaaacaggagtttttgacacttgaaggatttcattccaaactctcaattatataattacaaaaaaatccatgtttcacgaaaatatcctaaccctaacataaaattcagatcacttaccacaaagttagacaaatgtataaggaaacagaacagaaagcatatttacaaatttagactacatgagacattgtgaagaatctttaacaacactctacgtacttttacaaaccacatttaaaatgaggaatctgtaaatgatgtgagaaaggtcatagcgtgagaactctaacttttaaagtccaaagttatgttgaagattttaaaagtaatgatgaaa

SEQ ID NO: 2103 - DNA, 336 bp, Rattus norvegicus
  Genbank Accession No. AI171662
catttccttaactttatttataaagaacacaaccctgacacagacaaattccaacacactccagagtccacaacaacaacaacaacaacaacaacaacgacaacacgccccagttaatgcctgtctgtagcccacactgggaggtcactgggaacgatgccttggaacttagaacacagcaaacaacttggtttttggaggacagagtaactcctccactgaaggaagtgacttttagtcttctgcatcatcaaactgtcctgtttcaaagaccattttggagtaatgtggtatcagtgggggtggatggtgcaactggggtcataccctcgtgcc

SEQ ID NO: 2104 - DNA, 452 bp, Rattus norvegicus
  Genbank Accession No. AI171692
gagggtcctaataacttaaaactttattaggaacagtagcaacatcctgaggtcacaggagaagatgtagagaagccacagagccttggcagggttaaggtggtaccgggcctgatattccaccctttcctgccccaggcagagaggccagaaacaatcaaaaccctacaggcaacctacagaggagtaggctgagacccagaactggcccccaacccaatagtccagatggacactgggaaaggatggcttcaacccccaagacatggcctcttttctggaaacatgcgcagtcacacagctgggcccttcagtgccatccctgtgctaaggcatagctgaggcctgtgttcgaggtggggctgagggcagccttctcagggttggagctctttccacttgcgcagtctctaatccatggcctggaatgtggccttgtccttgacaaaaca

SEQ ID NO: 2105 - DNA, 471 bp, Rattus norvegicus
  Genbank Accession No. AI171726
acttgagctccatagtatattttttttctcattaaaggttcaaaaccaaaagcggtttctctttgcagcaaatatacattaaaatagagtctctgtacagccaagggctctgggccctggcttgccccatggccctgcgcctccctggccaaacccaaaaataaatatagtgttattgctctgcagggcgtagaggcagtgctgtcccccatcccttgaggtgggagctgatagggggccctggccaccccaggggtccaggggctggagcctgcttggagttattgcttcaagggggggcactaatgcccaatgcaatgaggagaggagcgaaggggcagggcctttgctttccaagcccccctctgctctggagaggaggtcggagtaagcagcagcaaaagcatcacccactgggagactgtggtctccatccccttccctccctgagatcagtttttgcctcctaca

SEQ ID NO: 2106 - DNA, 431 bp, Rattus norvegicus
  Genbank Accession No. AI171727
gaagtgaaccagcaagcctttaatggggatcacaggacgtcattcagatcccaccggctttcgccccacaagggagaagagtccttcattattggatgtggtagaagagtaactttgagaaatcacctcgaactgctcgatggtgtacccagcctcttccacggcatctcgaacagcctcccggtccagggaaaggctggaaaacttctgttccccaatcatgtagtagctactcttaagagcgtccaccatcaccaggaagccccctggcttgagcaggctgcccaggttcctgagggcagtgcgataggccgggaggtcagggcaggcagcatccaggcacagtgtgctgagcaggcagtcggcaggaggcagagagaccccacccagaggctggctctggctcacatcgcacttcagcacctgcttga

SEQ ID NO: 2107 - DNA, 573 bp, Rattus norvegicus
  Genbank Accession No. AI171745
gaggtcagaaacaagctttatttacacagggataataaagatatcaactcgaatattcaataatttagctttgggttggctacaagttcatgccgcaccaatcctgttttacagtagtttaagactacacttggtattttcccttggttctgttattcttgaaacttgtaaagattcaaaatactgtagagcttgttgaacagcaacataaatgagacaatgtactcagaggtcagtctctcacaaaaaatacgttatatccaagttctgttagggcgccagccagtaaggcccataaaggaatgaagacataggagagattgatggtagtaaagtgttccagtttagcacacagtgcgaggcagaaggctaacttcagtaacattgcgatgaggtaccaggctttctttttaatattgtgtgatccatgtcgggggtcgaagccagacttacaccgtccagccattttcacaatcagcatgacgagaaggatagtgtcaaatatccagactggaataaatatgaggaaccagttccagggtgccttctcatccagtttcaacaccaacatga

SEQ ID NO: 2108 - DNA, 503 bp, Rattus norvegicus
  Genbank Accession No. AI171759
aaaaataattgagtacatagtgatatttgtggtacatcacactattgctgtactttcagctaaagcttcagagaaactactattcttaatcaaaatatccactattaccacaacctgtctttgggaagaagttcctactatgttcttaactgaccagagcagtttctttccaacacctagtggtcatatgtgtgcacatcctgatggtgactggatactcaggctgggagggaccagcaaccactcaagtccatgctgtcttctaaagggaaaagaaggctgagaggtgcctctcaaggcccccactccagcagcccctttagcaaagtatcacaaaggactatattatgtatatttggtcctcttcagtgagataattatttctggttattcagattgaggaagaaatagtaaatgctactaaaaatggtatgacaccccactgtcaagcccacttagatcaaacactggctccattcttttgttaaaagaatcacctggta

SEQ ID NO: 2109 - DNA, 633 bp, Rattus norvegicus
  Genbank Accession No. AI171764
cggttcaagttcttttaatatttaaatacaaaaagtgagcgctgacttctttggtatacacatgaaggtctaagagccgaaatgtgcagaggaaatgagtgtctgctctgcccagtctccccctggccaaagctacagccagccacccttttccctggcacacaccgggatccctggtggctgctgtactacaggtgtaatggattttgtcagtcccacactgtttaacacttcctagacatttccattaaaaaaaaagtccttatagtcaggggtacttaacttctttcccactatgggcatgtaagaacttcttaggagcaatttattaaaggagagtgggataaccttccaaatggctgtactccagcatcggagtgagaacaggaagtaaatgagggcattcattatgaagggcacaggtttacctggggtccctccacgagaaacggagaaagttcccactatgttcaaagagatctatgtgccaaggttaaaaaaaagaataaaaagttcaaacaatcagcagttcaaacacaaatgaatttcaaagttctcccacacggacaaataccgaaataagaatctagatctttccaggaagtggaggtagagcccctggcattcctcctg

SEQ ID NO: 2110 - DNA, 540 bp, Rattus norvegicus
  Genbank Accession No. AI171768
acaaaagctacaagtttattaacattatatattctaatgctagaaaactttcaaataagtcattctaggtctcaaataagaaattgcaatattcattcagtattaataaaaaagagaagggtaaccaagaccacacatggctgttactcatttggggggatctgtgttgatgccatacttttccttgagaagcttcagctgctcctccttcttcttggtgtccatcttctggaatgcccggttagcattgtaatataaaaccacaaggtatctgttacaaacgttgaatcctgataggtggtcacaggcattcttagcatcaaagatgtcttcatagaccacataggctgttcctctggtttcaggtgtatttcctactctgatttgacgaataggtccatatttcccaaatatatcatacatttcttctgctgtgattttgtatggcaaattccttatatacaaaatccgatttacttcaggtgggaggcggatattcgccctcttagccgcttgcatcgccatcttggcgggccgatg

SEQ ID NO: 2111 - DNA, 667 bp, Rattus norvegicus
  Genbank Accession No. AI171772
gtggtggcgcatgactttaataccacttaggaagcagaggcagatgatctgggagttcaaagccagctggtttacacagtgagttcctggacagccaaggctacacaggttgtcccaaaaaattaaaaaaataaaaggtacaacttgtcatctcaagtcttaggattttagcttctgtcaaaatgtcaatacatgaacaaactaccccagcaggaacacagagcgtgcggtgagccagccatacaaaatgaataaatgactattgtcagacagatacgattataaaacaattctacaaaataccttcttcaaatttcattttaagatgaggaaaaaataaatctgtcattttatttaacattcattctgaagttacagttttatcaatacaatctgcttctaatgaaatcttagtataatcctaaaagcatgcatttatatacagtaatttctacattcctaaataaattacatacatgatatatattaaacaataaagaatagcaatttgagaattcaggacatttatttttctgcatgggggttaactactgtggagcacacacggcaattgcttactaagtagtgagacactaaataggcatactctttttaggcgacaaaatattttcagtccttaacatctcactcacctagcaccagatgc

SEQ ID NO: 2112 - DNA, 697 bp, Rattus norvegicus
  Genbank Accession No. AI171788
gtcagtaagcatttatttttgtctacaaagtagacataaaacacaagtttagaatcaacaacaaggactcctagttcataagtgtgtatctaagcactatatagaactcagacgacagtcctcaaagacgtcacctgtgggaacatcaaataggaaagaaggacaaaaggtcacagtattgaatcggcttaaaatctcattaggaaaatgttattttagtttaacaacaagatcaaacttttaattacatatttttaattgtaaagattaaatccaccaaaatatactaatcatttagagacattacagtatgcctacttgattttcttaatgaatcactattttaatactttttaacatgcaatatggcatttttgccaggtttttttttaatttgtagaaaaaaatggataaattcccttctctttccaagtgtgaaaagaaattaggcaataaaggtaaaaatgcaaatcataaaatcatctagtgttcttttcacaatcccacataataaaaaggtatgcatggttctaaagtttctatagacaatatagtgcaagacagctgatttctctctccctttacgtagcagtcttgctacgtagcccagggtaggcttgaagtcaagatcctcttgcctcggcctcctgagtttgcaggtgtgtaccactgcccatggcaagatttctcactttac

SEQ ID NO: 2113 - DNA, 711 bp, Rattus norvegicus
  Genbank Accession No. AI171807
  misc_feature (1)..(711): n = a or c or g or t
gtatagaattagctttattagactggttttacagaaagcagccagattagtttctctgcctacctaaaatacaagttacgtgcatccagattattcttaaacatgctgtagcaaagtctgtatttaagatgaattctaagactctttcttagagcaaagagaggtgctccatgatacatcccccgagggaatgttcatgcagtgggcacaatggcaaactctcttccaccaggctcgtcttcagtgagctgtgttcatccctgacctcacactggtaactccctaccccaggacagacttcacactacaacgttcacagcagcgcacaggtacactgctcgctgtgagaggatgggaaatttagcaagtgttaatttcctggcagatacacatacatagggagctcagtcctgccgggcccaggcttccatgcccaacttgaatggtgatggtgccagccttgtagtgtgaattctggtctctctgaccctgacctggccttcctgtgcccgactttcatcatctaacttcaatcctggcattttagcaattctaggctggttttgccaagaaggcaactgaataccagagcaaagcacgtacagtcccatgaggattatacacgtgaaaagactcanaacaggattacctagtataaaaatataacgataacacatcacaagtagagtataaacagtcctctgagtgaac

SEQ ID NO: 2114 - DNA, 414 bp, Rattus norvegicus
  Genbank Accession No. AI171855
  misc_feature (1)..(414): n = a or c or g or t
acatgaggtacaatttactgacatgacaggttaccccaggccagcccccttccctctgtcttgtcccaagcttgtgtgagatcacattcgggagttcctttcctcatcctcattctccaggaggtatgctgggcggtagacagggtgccctcctgggctcaggcacttcagggccggattctgctttgtgttttcccgactccccagtgatgtgtaccctctgtcatacaggatgcagtatgggacaaacagctgccgcagaaattcccagatgtttctgtaggtccagtccagcagcgggttgatgcgcatgaatgaaggccagccagggtcggtgggcagaggagggcaccatcgacagcttctcccaaccctcccctcctagggttntgatggctgcttggagctcagggt

SEQ ID NO: 2115 - DNA, 653 bp, Rattus norvegicus
  Genbank Accession No. AI171948
caggtactttattgctcacctctcacacaaacacacctccagctactttctttcacagcttgacagtgtttacatgtacaaaaacccggcagaagcatcgagtgacttcagtatagacgtggagggtgactcagccaggcttctgtcttctgcagcaataatgaagggcctcctgcactgagcaggactcgatctcacttcgtagtgcacttccgtcacaagaagggtctcttgtgtaaagcaagccaacttgtatttgtaactagtgcataaaacacatgtctgctcaccctttcttctagcgaatttcaagtaaaaacaaggttgaaggagggacttttgtcttggatggatgcaggtctgtttgagttgctatacttaactaagtgcctacaggtactacggttcacaacttagtttgcttttgtcgtgttcatggatttggccgtgttcgtggattttggaggagcatatggtatagtattccacccacaggataaggctactgaatgtgctatctgcaaaagagctcacgtaataggaaccaacccaacaggtctaccagaaagaaaggtgacgaaatttctctggacaaaatgccaatcaaggcagagctatgctgggagaatagtttacgaaaacacacatgggtt

SEQ ID NO: 2116 - DNA, 593 bp, Rattus norvegicus
  Genbank Accession No. AI171952
acgtaaatctaatatttaatgtaacgtgactaaattataaatgcatgtgtgagctaccttcttctaacagtatagaagcaaaagtcttacatttaataaaaatatacagaatgtataaaagctctaatcacatgtagactaccaagtataaatgatgtaatgtgaggtttccatatgaagacaccctgttcagaaagaaaccaatctgaagtaaacccatcaacacccatattgcaaaggtacacaaagtgttatcatttaccattgtacataagataataaactgtaaaaattaacatcagagtcttataagggacaatacagtgacaagtctaagtacattttacttacggagcataaatagcagaggtcaaagaaatgaaataatgtatgagtgagacgacatacaatgtactgtaacgaggagttagaaaactgaatattgtggaaaaagtttattaatctgtacaggttggtttttaacaaactagtggctacttgttacagtaacttatcaacgatctcactgcaatagcatctccccgccagtcagagtttggaacaacagacatttctcaaattgtcatttatag

SEQ ID NO: 2117 - DNA, 587 bp, Rattus norvegicus
  Genbank Accession No. AI171953
gctctgattggtattttatttctcctttacaagttccacataatagacaaaggctttttgataacattgttatctttgctgaaaacgatcatataatcattttaaacaacacaaatgtgtacatacatgactgaggtttctgcgcctataaacatctctgtgggtttaacaaggaaaaaagcaatatactgataattcaactgtaactcttagaaaaacaccggtttccttaccaagcacgagtgtcctatacagggacctatcatccaagatggcaatgagttcagcctagggcagccaggagcagctccccacaccggctcagaagacccttcccacccagcacttcttccaagggctccttaacctcatcacaggaagacagcagtcgccccaagagaggacagagcagcagacacactggttgtggtttctgagtgtcgtgtgcggcatttcacatccagcgtctcaggaacgtgtccatgcaagcatgcgtaccattctttagactgctcccctcatttctcgagtgaggggaccaggccttcctaattcactttaggtgcctgggataacaaagtatttca

SEQ ID NO: 2118 - DNA, 663 bp, Rattus norvegicus
  Genbank Accession No. AI171966
gtaattccacaccagtttatttcttaggtgtgatcgtgacacagtgccttctgtgacaaggtggggctttcaggagggcactgaaccccctcctcagagcagctcacctcagaaaacacccgaggcagatttgattacgaataccccccaggccaccaatatttacatgggaaagtggaactgagtagaggaattatgacacaagaaagtggggtgtcctgaagatgctggggggcatgaaggcaccatcaaaagtctggatctccttctcagcgcggggctctgccctctagggccgtccttccgggtaggtggatccagggagaggagtgtagctggaggagtgagacttgcgccatctgaagaagccaagacagaagatgatgaagcccaggcccagggtggctgcagacacagagaccttcactgtctggatgggggacagcccgggtgtccagttcgcgcggatgggctcaggggtcccgctgtgctgtaccacgcaggtgtagatgtcccagtaggaaggggttaaggctaggtaggagacggtctggtatgtccagtccccgttaggctgagccgtcttctccttgttgctgtgggaagttacaagctgcccgttcttcatccacacgacggtcacatccgctggatagaaacccc

SEQ ID NO: 2119 - DNA, 577 bp, Rattus norvegicus
  Genbank Accession No. AI171975
aagctcttttgattaactttattgaatagccaaatttataagttagcacagatcaaacgattgtttgcatgggttacaaatgacttttttttaaaaacaggaataaaacagtgaaaattacaatctgtaaaaaggaagaccaatcttgcctcaacatttcagagcaagactgagcacaacacactggaggtcaacacatatttttgatttgagaacatggacttaatgttacaatatcatacaggctactttacaaaattaaattttctatgtacggattgtgtttatagtagttaaaactgtgaactcacatttggtggtccctagatgagagctgttctgcatctctgattagaagaagtaaatcttttactctaattattgcaaaacagtctattagactcaatacattacattaaattaaaatatatgcaagctaaaataaatgttactgcttgagtgaatattagtatgtcagacttacagaaacattattttaaaaattctagaaattagaaaaatagagtactttttatggtagaactgccatgctcagatttatatatcaagaatgccc

SEQ ID NO: 2120 - DNA, 619 bp, Rattus norvegicus
  Genbank Accession No. AI171982
cagggcagactcagattttatttcagacgagggcgggatctgaggcttgaccactcatgatgaccactgctcgtgatgacctttgaacctcgagaagaacacaggggatcacaacgcagatggtggacgcggttatcaatcaacatgcgatgcacacagggggaggggttaacacacggcacgtgctcggtgttaaaggtctgttattggttctgtaataaggacgatatatatatatatataaaataaaatacctcaatgtacaataatgtatatagtaaaataccataaatattatatatatataataaaatacattagtgtataatagatataataaaataccataagttattatatatatataataaaataccttagtgtaataatgtatataataaaataccataaaatattatatatatatatatatatcgctgtaagattcactataaggtttgctataggatttgctataggatctactataaggtttgctatgagattggctataaggtttgctataggatctgctatagcatctgctttaagatctgctatagggcctgctataggattcgctttaggggccacgtgacacccttaagacgccaggccg

SEQ ID NO: 2121 - DNA, 620 bp, Rattus norvegicus
  Genbank Accession No. AI171998
tccaacatttgtaactttatttcaaaatataaatattttacattttacaaagatgttacatcagtaagttgtgaaagcaaattaaagctaagaaatggcatgtgtgtaataaatatttattgttgcatctgaacattagtttcctttcaaaccatctcacttcttcacctgagaatgctgaggtgatctattttccgggttaaatgattacaatggtatgttctatcttagcttcacaatcaaacagtagctggagcacagtcaagcacctgaacaaggggcactgcagggacagagtaataagagtcacacttctgggtcactccaacacagagctggtttgcacaataagcaaaaacagtgtggagaggtttccatatccttcgttgtatacataaagctggaaggaaagaccagtatgaagacctttggacttggagtcagagactcgtagccaaattctggctctatccttttaagatgtaaactctggagggaggagggcagaagaaggggaaagagaaggaatcgagacaagcttttcagggcttctaggacgtgcgtcctctgtgcagtcgctataatactgtctggctcacagggctgtcccccctcgtgcc

SEQ ID NO: 2122 - DNA, 369 bp, Rattus norvegicus
  Genbank Accession No. AI172011
gacttcctctcgccaagcggcggagccaagctggcttctctttttggactggaccaagcatctgtgggccatggaaatgaattcttccagtatacagccccaaagcaacctaagaaaggccagggaatagcagcaacaggaaatcagtcagcaccaaaaccagcaccagctaccacaggcacatcctcagtgctgtttgccactgcagtgcatgcgtaccgatgcataaacggtcaatatgcaaagcagggcaaatttggagcagctgtcctggggaaccacacaacaagagagatggttgtgagccaccatgtggatgctgggaattgaactcaggacctttggaagagtagtcaggtgctcttaacc

SEQ ID NO: 2123 - DNA, 660 bp, Rattus norvegicus
  Genbank Accession No. AI172034
  misc_feature (1)..(660): n = a or c or g or t
agtaggaaaactgggtacatttttattttcccatttgtgaaaatagtcaaaataaaatacatggtcatagacagaattcttagaaggggtgactgaaaaccaagtcacttgttttcaggcctatcgcaaaattacaagtaaaaacccaagtccactttgtacagtatgaagacagacccacatgcagggccaggtgtccaaacatcagttctgtggtcagcaaactagtccctgggctgcccttggcctgtggaacatttctatatggccctgagctaagactgatgtttgtatttctaaaaggattaacaacaacaacaaagacacaacaaagaaccctatgtggacgccagtctcactggccacctggctctccacaggaagcatctgcaggtgcagcactgcacaggtgtctcctgtcccaggtcatgtgcacctgcttcctcaagagcatcttgacttgggaaagggatcctctgatgccattttccagattcttttccttataattcttttttcttcaatatcatcagagctcatccttatttctctttacttggctttggaacgtttccaattttccataaattaaggcagcaatactttttgcatctctggaatttatttgctcttnccaaatacttttctttgctctttcat

SEQ ID NO: 2124 - DNA, 520 bp, Rattus norvegicus
  Genbank Accession No. AI172045
atcacaatgatgaagcccagagggaggggggcctgggtgtcacagggcaggctcctgctccatgggctcctcggctggccgggggctgtgctcttgagtggcagcagcctgggcctgctcagcccccatggaaagcagggccatggcgctcacagtctcggcctcctctttctcacccgtctgagcctcccgcagcgagcagcccagaccagtggcaaacctctgtacacagctccagtgtttgctctggatctcgatgactttctctagtgtggcaactgcattgacgctgggcttttgctgcaagactgcttcatccaagggctgcagctccacgctgagcagagccgagacacaggcctcagaagcatcacagatggcggtcaagtcatgacctccctccagggccagcaccacccggccccctgccagtgtcatgagctgcctggtcaagtggccaaaacatctggcggtgacagaatagccacccagtggagacagatgtccttcaacagcatta

SEQ ID NO: 2125 - DNA, 621 bp, Rattus norvegicus
  Genbank Accession No. AI172050
tatacacaataataggtttcactgacattctcatacatgtataatgtattctgagcatattcacccgttatcttcttaccactttccttctcccattaattcccctttctcaaatgcaagaggccttggattcaatccctaatacctcaaccaaccaaaaaaccaaccacacagtcccaaggccacaaaagttacacgatagaatttttcagtatttaaaatgtcatatgaagtaaaataaagtttttgggaataaatgtctcaaagctgttcattcccatgagttattttcttacataaaatcccactcccataacacacatgtctgtcacagtgtctcagagctgctacttcatttcacgtcttcataatctgtgaaagatgaagtctaacgtcctcatttcacaccatgaagcaatcagaatgaatgctctatcaatcgaagagggcaaactgaattctttttccttctagagatgttttataccacctctcccttgctaaggggttaactgtatagttaaagttctagatacctgaccaatttaagatctgtatcctggctggaatcgagcagtctcttcaaaaatgagttctttgagcttctccttaagtaagtcg

SEQ ID NO: 2126 - DNA, 647 bp, Rattus norvegicus
  Genbank Accession No. AI172056
gggggggaaaaggtttattttttcctcagaagaaacagactggggaacatttacaacccacattaacttgcagttggtcctaaccctttcgggaacaggtgttaaaatgttaggtgctctacggaatgaaggtgttcaccccagacagaatgtacatggacgatgcttgaagactgcatgttttttccctgagagacgtgtaagacaaacagaatttgctgagagccatctttccaaacaggaagcataacaagccaacatgtaaaggaaggagaagccaaggttaattcaataagacaggtgagacacctagaaagaccaatacaaaaattccaaacaaagcttggcagtcattagtagaaaagaaatacatatttgttttattgacaccaggcttaaacttgtgttaaacaagtaaagcctgtgaatagcaccgtggtaaagattagtctgctttcccaaagcattttacaatttagtaagtcaacaggggatcaaatgtcttacatctacctgtgatccttaaatacagaaacagattggataattaaccctgcatagttataactcggatttgttctactacaaccagtccacacacacaactggctctgcatatacactagaactgatcatgacaaagtttt

SEQ ID NO: 2127 - DNA, 660 bp, Rattus norvegicus
  Genbank Accession No. AI172057
aagtggaactttctctttatgacagatcagcataagcaccctgcggagtatttcttataaaacagtataacagtgatgcagaatgatctcacaaagccatcttcggacctgacatccgggctatagcctaagagcctttagcaagtgaccgatcaatcacaacattactatgatgctcattatttaccaggtaaacctgaaataaatcaacaaaataaaacaaggacaaaatccaagatctgccaaacgacgactgtgtttagtaatgggaaaaacactgaatctgagccggtccatctgaattcttgtctttgtccttggatggatgatctgagaggacagccttggttaagtctttcagtttaaattgacagagctgcttttatggttgtgtacagtctttttctaacaacgcaaacttggcaaccaattcgacctgcatataccatataactcctgtgccctgtgtcatctcagtcctcaaattaacaaacatcgtgtggttccttaccagacacaaactcgagagacatggtttcatgacagattacaaagtcacggaagtccgaagaaatatgagttgacctcagacatccttcttggtgaaacaatgcaaggacttacggagagaaacaagcgagttcatacattaattacacc

SEQ ID NO: 2128 - DNA, 630 bp, Rattus norvegicus
  Genbank Accession No. AI172075
ttattcagaagataataaaatagcatgcactttttttaaaaccaccaagcgctgataaaaatatatcactgcagccgtgattccacatcaaaccttatcagtaagaatagatttattcttcacatcttgtgctggacctggcataggacacctccctccaccagggccataaaggccaaggccaggagtgagcaagtgccctggtgaagaggggtaagtgccaggctccctcctagccctgcagaacagatcagggcaagaccttgcccttcacagccactgggacacaacactgaccaagggttgctcctggatggcagagtggacaggagtaaaactgcaagacagcaggtcctcctgtctttttcaaggtccctgaaatccccaagggagatttaacagtccctacagcagggccccagcctttgctttgtttgctggagtggggattctgcaaaggacagctcactctgaacacaaagtagccataggacactttcctatattcagtgtggcaagggacaactggagggtgctactgactcctgttaaggcacttgtaacagaacataggtgcacaggcagcagaaggttaatcatcacgggagatcagtggcagtggtgctggct

SEQ ID NO: 2129 - DNA, 391 bp, Rattus norvegicus
  Genbank Accession No. AI172086
gattgggcatttaattgtctctaggatgccccgaggagaggacgaggggcctttggcagagctctggctgatgaagtaacagaaacgatgccccgaggagaggacgaggggcctttggcagagctctggctgatgaagtaacagaaacgctggacagggagtgccaggcagagaggtagccccaaggtctggctagggaaagccatcaccagggcttaagacagtcttcgagaccagttggtgaataaggaatgttgcctctgaaggaggaagaggctacagaaagggcctgggtttgcagggagggaccccaaggtctgaagattaggaacaacaaggagttagttccgagccctggtgaaaactgggtagggtctgtggccatcctgac

SEQ ID NO: 2130 - DNA, 560 bp, Rattus norvegicus
  Genbank Accession No. AI172102
ggctgtaattgcgtttattagcttgacaaggcagatgtgaatattttctgtgacaaaatggtgacaaaatatatcagccacatatcggccacatatcagccggcacacattagatgccacaaggaaataagaactaacgattttagaaacagtaggcatgttcttccctgaagctactggtgtgggaaaggcaggagatggggacaggaggcgtgctgtatccttgcgttgctcaacctccaccatgcatgtggcctgtcctgacagtgcagctcctgactacctttatcttgcaccctgaagagcatacagggcactggcagtccatgtatttccaggtcctgaggtgcacagattggtttgggggccatgctttcccagcccttgggccttacgcaacttcacagcagatgaggcacacgctggcacgtggtctgtccagggcagtggtgcaggccaggccctggtgggctagctgtcataccagtcgaggaagagcaaggaaaaggaacacatcaccaggaagaagaggatccacactcggaagcctgcgttggttt

SEQ ID NO: 2131 - DNA, 585 bp, Rattus norvegicus
  Genbank Accession No. AI172107
ggggataaaggtctttattcgacaagattatcttactcagtaacaaaacagcaggaggtaacaattcccccaaagatctggaacagtatctgcccctggcaggggcagtacagcctgctaaaaaaagtcagctgcagccagggtctctagtgtcagccatttttcaaagattgtagttggggttctttcgaagaatgacaaagccttccagaattggggtgacagggagaaactcctcagtggccagctccgcccgttccccatgggccaacagcactggagttgtgtgagtctggaaccccgtgatcgttttgggcttcccagcctggcccaccacatccactgcctgacccacgcggacagaaactggcaatggtcgcaactcctcatcaaatgtaaccagcatccgaggctgcatggcggccaccagcccatacagtacatagtgagatttccctagaatgatgtttcgcacatccaggaaagaaacaagcacggtgagcagccccgccacagccacttgactcatgagctgccggtcactgtggtaggggcagagggtaagtgtgcccttccctaaatgtg

SEQ ID NO: 2132 - DNA, 337 bp, Rattus norvegicus
  Genbank Accession No. AI172143
attatttatatgagtacactgtagctatcttcagacacaccagaagagggcaccagatcccattacagatggttgtgagccatcatgtggttgctgggatttgaactcaggacctccggaagagcaatcagtgctcttaaccgctgagccacctctccagccctgaagggctctttcaaaggtttattctttctcctttcacaagtcggcatcgaaacttccaagtgtcctcaaagtccagggctccttggactccataacgtttctccgcaatctcaataacttccctcgcaatgttttcttgactggtgcccttcacgctgatatatttgcagtc

SEQ ID NO: 2133 - DNA, 646 bp, Rattus norvegicus
  Genbank Accession No. AI172185
cactggccattagctttttattgacaggtgatgcttccacagaatgcacaagagattgtctgtacagcagtcatgtctgccttgttagcctgatggttgctgtggcctcctgtgttggacagctttcaagtggatacctatacataccggtctactcccccttgacgaaagcaaggccttatctcaaagccctttcatcctaagaataaattctgttctttgtgtcccattccagagattccaagtccacttcctctctggatgccagtctgtggagagcactgccacatgggctgaccatcaggcctcagaagcctttctcaagaagccaggctttaagttgctcatcaaagtagcccttgattcgaagagtacctgtcacctcattaacctgggtgacaggcgtctttcccagcaatgggctcaaaaattcttccacatccttctgtagagcccagatgtcaccttctaccttgcgaattaaggtcatctgtcggttgccatgtgtgatctccttatagacagggatgttgtgcatccgagagcgacgaacaaagtagggcaagctgggaaggggatctctgggaggctgccaaccactaggagtgggataatgtttatgttttggtggctctgggattttggt

SEQ ID NO: 2134 - DNA, 696 bp, Rattus norvegicus
  Genbank Accession No. AI172189
actaaagtacttagtttaatgaatttgtttttaacacaaatgaaaaacaagattcttaccattttaacgacaactacaacttcagaccaataacatacgaattttgcaaagtttttaactacagattatcaaatataatagagaatgcaatttagtgctttttgtcacaatatcaaaaataagcaattttctcaaagttatcaaaagtgccccactcaaaatctttttcttaatcaagtaaaactacctgctattgtgcatgtgtgttaaaaattaaaacggaaaccatcagtgctattacacagagaaaccctgtcttgaaaaacaaaacaaaacaaaaaaaaaaaaggaaaaaggggaaaaaaggaaaactttatatattggatgtcatttaagtgcttaaccaagcaaacatgcctaacacagacagctcacattcttggtatgaaagtcacaccacagaatatgaatgttataacacgacttgtatgtaccaaataaagcaaataaaacctatcatttagtatgtctgcttgtttgcttttggtcaactagtcggcagacttaacgttgtactgcttcactccagtagtctacctcgtgaggttaggttctgtggttcacgtcaattgtgggacgacagtcctcatgagagctgagcgtttttgcaggaaaacagctttcatttccaataca

SEQ ID NO: 2135 - DNA, 585 bp, Rattus norvegicus
  Genbank Accession No. AI172214
atttaattaaaatgtacgtgggtgacagattcaaatatggttaagcagtgagaaagaaaaattcaaatttgtacggacccttcaccacccaatcttatcttgccccagcagcactgttgttagggttcttgctcagtatcatgacctccatgcagcatttagagtgattaagcccagctcttcttaaaccactgtctttagtttcaagccaacgtcggttgttgggattcttctacaatgtcatcggcgggtacccgtacctggggcgaccttgtctgcgctgggtgcagatgctgctgcggcagcgttcctagcccgaatgtgggaggccaaggcacttaacatttcctgagtggtgaggtgggctcctcgcataatcagccgatacccatctccgaataacacgtccacgcagggctcagagccgtcatgcctcacgtcggcgatcacagagcagttgaggttggtggcgcggactttctcgctgctcaccgcctggagaaaggtccttgttgactccacgttcttctcaaacgggcagaactgaactcgaaccagcttgaccggccgtagtcccctcgtgcc

SEQ ID NO: 2136 - DNA, 571 bp, Rattus norvegicus
  Genbank Accession No. AI172217
cattttcaaactgtatttaaagagatgcttgtttagtgtaataaaaccccatactatacattagaaacatggctagccaattgctttaatcctacaaaattacaattggctactgagttctaaatttaagcatgtgattttattctgtcctttcgtactctccaatacagatatcaaaaaagttatttgatttttttcttaaataagatagaaatcacttttttgggaggaaaactccatgctgtgacagaaaatgaattgttttacatcttggagtaattgttagaaaagaactataaaattatgaacttttagggaaaaaatgcactgaaaatgtctagaaaagacatgcacgtggctaggctagggaccagatggcaggcactgccaggcacccagctgtagaaactcacaaaaagaagttagcaccggaatcatctccaactttacaatctcgtagaggcctaagtataacatataaaaacttacatttaacccaaaagcattaccaacaacaagtacattattctcagtgtgaaggaagtagcatcatcgctcgcacagcaccgaa

SEQ ID NO: 2137 - DNA, 625 bp, Rattus norvegicus
  Genbank Accession No. AI172272
ttttccgtctagatttattttatttctctcagtgttttgcctttgtgagcgtacacataccagaggtgtgcctggtgttcttggagatcagaaagagggccctggatcccctgaactggatagttgtgaggcactagatgggtgctggcaactgaagccaggtcttctataagagcgatgggtgttcttcaccgccaagccatctctccagtcccaacattttctgttttgtttaaaggaaagagctttgagctgggggtgtagctgggttcgtagagggctttcccggtactacatcagctggccacggtgacacaggcctctaatcccaagtattggagagtggaagcaagaagatcagaagttcaggtcatggggtctgtgcttcctgctccgtcttcctctcctggcaggtggttcagtcagcagaacttccagcgattcccacattcattgcataagacaaaggtggtcatgggctcatcagcactgcgtgtctgcacctggttataggtacaattcttcttcttgcacttgctacaccgcaagaggtcagtggtggtaccgcctgtcttggccatctggtgctcgcggatggcctcttgagtcatggcgttcctcaact

SEQ ID NO: 2138 - DNA, 607 bp, Rattus norvegicus
  Genbank Accession No. AI172274
aacagttgcagcctgtttatttaacacagggattatcatcacaaatgataatttccagatataaaagctgagaggttaaatggtttgtccagaattccctgagtcatctacagagagctggaatccggctccggacactaagtcagataaacctggctggatttattctgtgagaggaaatgaaggcgaccttcactgttccatccacagtgatcagagccaatgacacagacccaaaatttgcttgagtgtagagaaccaggcagccctggatcccagtgactagccaaggtgagcaatatggaaagtggcagtggttatcatggtcagcaccttggttctaggtaccatgccaatcacactgttcttgtgaagaaactgaagagcctgctgcaaacttctcctctggatcctttatggtgtgtgcttaaaggtagctgggttacttgcccacaaatttgggaggtcgtttctccctgaaggctgccatcccttccagccggtcctgggttgggatgttctgggcatagcacatatgttcaatggccatccctgatgcgatgtccacctccattcctctgtcgatggcaactttgcccctcgtgcc

SEQ ID NO: 2139 - DNA, 634 bp, Rattus norvegicus
  Genbank Accession No. AI172285
aggtgtcacacttcatttaatctgaagaacattacaggctctctgtcttcagatataaattataacagtacagaacacagcgaactcgaacaatttaaaaactaagtaagtctacacggtgttaattccggcaagagtcttgccaatctgtttgaaagtcacccctgacctcatttcagtagacgtgcaccatgccatagaggaatgtccaaaagaggacgtaggtgaagaggcctccaatgaggcctcctgtaaagagaggtcttcgtgacttgaagtatttgttccacctccttcccgctttgagaattaggagcagggagagcaggacggaggcaagcaggtagaagatgaagccgtagagaccggtgaggccgaggatgccggctgtggcccccgacagcgctgacactgaggtccggcagtaatccaggaccgcggcgttgcctcgcacggctgcctcgctgatgaacggcggcccttcccgtttggccaccaccgcggccatcgcatccgccggggctccgcttctgccttctcgcggactcacgcggaactggaatgtagcggcacgcagtccctcgtgttccgtcagacaggaaaaagcggagagtccagcgccgcccctcgtgcc

SEQ ID NO: 2140 - DNA, 405 bp, Rattus norvegicus
  Genbank Accession No. AI172286
acacagacacacagacacacagacacacacagacacacacagctgcttctttcatgaggggttttctctcgcttcctttagttgctttatgtaaaatccaaagctttcagggggctcagtgaaggggaccggctcgcccacatccttgagcaaagatgcgtagcgcttcagaaagaggtcgtccagcttcatgttctttgctgtcaaatgctcatacagcgctttagcggaggccacgtctttgtctgcgacatagcttttcatgctgcaggagtacactctgtcattctcacgtaactcgggaatcagctctaacaaggtcttcagaaccggggccttttttggtttctgagacgtcctgagacagaacaccgacagaattgaggtctgctcggccctcgtgcc

SEQ ID NO: 2141 - DNA, 638 bp, Rattus norvegicus
  Genbank Accession No. AI172301
  misc_feature (1)..(638): n = a or c or g or t
agtgtctgagaacatctttattaaggacagagtagggtcacagcatcttagaaagccttctctgccactgtggaaagagcagggtgagaccagggcacttcaaggaaccaggggggtgtgaattccttagccaacttgggtcaggggtgggtggctggctgttccacaggtctccctgccagcttggtcaaagcctgctccagggcagggttggaaaggacaaggcatgcaagcccagagggacaccactgactccaagccaggcctctgcttccagggcaggccatggttgtcaacagtggggctgagagtccctgagaggggctgctggcataagagtactcccatatgagcagagaacagtgagggtaacaggcaggtagagctaagcaatgagatagctggactatctttagattcagaaaagcaacatcaacaaaatggtggttggtttggacaattctgacagagtttggcattttattacaaatctgaatgtgagtgaaataaaatccattgtcacttttctgccaatgaagagacagacatagaaacacaggcccagggctctgaccatcctgggcatatggaaatctncagaaacctgccccatgcatacctagaactaaagcatagtt

SEQ ID NO: 2142 - DNA, 730 bp, Rattus norvegicus
  Genbank Accession No. AI172302
gggttttaattaaataaacttttattttagaatgactttagattcacagaaaagttgcagagaccaaagggttcccatatatcttcatccagcccaccccagagatatgattacaaactggaaggtaactaagacccagacagtatgagtcctggttgacctgctaaagtgctttctctccctggtctctgtttggtcctaagaatcaatccagcaccacaatacactttattcctttcaatctcattctctgggacactcagtgggtggggaagctggtgacctcactattgagctgggaagacagaggcttgaaaatgacaagcgtagcaagtgccacctcaccctgctgcttccgttgccttgtggactctgggtttgcggaagcccctctgaatgccccgttatccacctcattctgcttatgaatcatccttggagtggggtacccagctctagaaggcaccgtgccacgacttcttctaggttttaagaaccttacttaaaggctgacttggcccctctgtgtgcttatcaataaacttgtgaacgggagtgcttatgtgtgggagtgagaaattctgtctcttgtccaccaagattcatctgtgatgaaagatggccccacgttctttatagttcctcccattgagagctgggtccacttgcacccctggaatctaaggaatgaactgaccagtggagacacagtcctagcaccggggcttga

SEQ ID NO: 2143 - DNA, 497 bp, Rattus norvegicus
  Genbank Accession No. AI172325
atgaaaatatagttgtccaatttattttcattaggcggccattttatgaagaactcctaagatttgtgtttgccgacatgcagagttagcagtaatagttcagctactgtaaacactgtgctcagaagcaccaccacgttaagactacagacgcgattactccaatccttctccatctacatgaaatcagaaggttctgaacagctggttgggaaggtagccaaggtgtaggaaagatgtctgtgcttccttttcaagggcagccaactcttgaacggtaggtgccaggatgtccacatggcctttatagttcccaccgccagcagcccttttctgaccatatgtaactttcccatcaaactcatccactggaacctttatatctggctcaacctgggaaatggtacagttcaggtgttcttctatctcagaaagtagctgcatttcattgtaccagatagtacagccgccatcttccttgagtctagcctcgtgcc

SEQ ID NO: 2144 - DNA, 624 bp, Rattus norvegicus
  Genbank Accession No. AI172328
cactcttaagtatttattagagacactatgaaacccataaattacccatatgtgttttacactggcaagaatcttacatgtataacagggagttgggtagataacatcaaatacatccacaacaaaattattcttttgagccggggtctcctgtagcctgagttggtgcagaacttctgactttatttccaaagtgctaggcttacaggcaggaatcgccatgccttatttaggagaaaaccattataaaatttcaaagaacacttgaggaacaaggtagacaacaatgcttattatgtaattttgtatcactgtaacgaaaacatcttgttcagtggatttaaaaagacctgctttaagtgtattcactcaatgcaaaaaaaaattaaataaaatttacagtattataatttgaataggtgccaaatgtcctgttccttttctccaatcaggaagagaaaattcttttccaaatcacttgaagcttggacaaccccccccccccccaacattctgtagcatcccaggcagacttcagcccttcagagaggacatcccagctctcatgatctcgtcaaccaggagaatgttggtggcgatcacagtacaggagtgaagcagctg

SEQ ID NO: 2145 - DNA, 567 bp, Rattus norvegicus
  Genbank Accession No. AI172405
aaatctttatgttcctttattggagcaagattcctgacgtatacagtgatgtatttactaaacagagtcctgtgcagaaattacacactatccatctagacagattttggttacactttgcctattgatggagtagttccatttataaagttttatacatcagaaagctttgaatttgaccaggctgtccattaatcatctctgaaaaagtggcatttcattttagctctattttacagcattaaaaagcttatgcatcaggtcgcttcccgaaacattgttctctgcacaatggcgctgggcagacagctcttcatccacccaggtcagagtcacgtctgagagtttctgctacatacccgtgacagcccacctcaccgactgctcaccctgacagacagcccaccttctcggtcagttcacactgccagttcacaccagcagttgtcctttgtagatggcattagagtatcaggtcagtgacagtgggagcaggtgctgccatgagatccaggtaactaaaggcccttattttttttttttaaaaaaatgccaaatgtgagataa

SEQ ID NO: 2146 - DNA, 651 bp, Rattus norvegicus
  Genbank Accession No. AI172417
acatgtgtatatattttaatctttctgcaattaaagttttaaagtagtagaaatagtagcctaatacatctgataatattgttaagggttacttgggttgattaattaagtttatcacaattataaatcatgcttgctccagttctacaaggaccccaccacagtctttgggatggaggaaaatcacgggtttcccatgtgcccctattttggcctcatcactcagactgcggatcttctgtttcttcagatccatcacagctgcatttatgttgtccacctcgatgcagacgtgatgcattcctccagccttgttcttctgcaggaagcctgcgatcggactatcactccccagtggatgaagcagttccatcttcgtatttcccaggttgacaaaaaccacagatactccatgttccggaagagggaccgcctcactcacctgggcccctagaacatccctgtaaaatgacgaggccttttccaaatctggtactgctatggccacatgattgagtcgacccagcttccacacaggactggatgcttgatgctgggacggtgatgtggaaaaacttctccctgctgcaactggagtctggactctggagaaaagccctgtagcgcctgcagccaacgcagcggccttta

SEQ ID NO: 2147 - DNA, 534 bp, Rattus norvegicus
  Genbank Accession No. AI172471
caagttttttttttcaaggaattacaaagctacttttaatactttggggtgtgccccacaggaataaaaaacactgggaaggggtaaccccctcacccccaggagtggcccagagggagagaggctacctgaggggaaggaagcacaaaaggaacccgctgcagactcagggcaaagggaatgccatcggtgctgggacctgtgagcactacaggaagaaactcgagcatggtgggactggctccaggcacacaggcgtagggcaagagggttggacacgaagccacaaagctacttgggttcctccttcttctcgtttgcctttttctgcttctgctgcatgatctccgagtccctctgcttgcgggcggcagcagaaagcccatcatctcggcgctttcccttaaccgagtcgctctgcttcttcatgttcttctggcgggcgagctctcgctggttaccgcgggtcatggcgacggcagcggctccaacctgcctccgttgcgtcccctcgttcgggccgaccctcgtgcc

SEQ ID NO: 2148 - DNA, 681 bp, Rattus norvegicus
  Genbank Accession No. AI172489
tttttttacaggtacacaatttaatatttattatatgcattttatatacattatttttcaacagctgtgtgtttgctctgtggtacaatcttaaaaatttgctgattcatagtctgtaaaacaaaaaccttacaaaactcatcaaaactcgcaaactgatcagaaaaggcttttggaagactagaaaaaatactttattgtcttaatcatgcattacacaaagaaaatcttcagttacaccataaaagtaagcacatctaaaaaaataaaacagggaagactagtccaaatccagcagacttctgtatcctgattcaagttttttaaatatcttatttgtaatggtaataaaatatcctccaatttttttttttaactagatcattttgttttggaatcatggtaaatcaagatagtatcttggggagaaacaccttggtttgtaacttaactataaaatattccatttttagtctattttagactgttcaacacgaacaaaatagattccaaaatagatatacaggttcctttagagcattaataaaaggatataaagaccaacaaaaagtaaaataaataataggccattagcaagatggataatccttgataaataaacttgtaaatacagtaagatgtacaaaatatcacatagtgataggatgtcaagattagttt

SEQ ID NO: 2149 - DNA, 174 bp, Rattus norvegicus
  Genbank Accession No. AI172506
aggcccaagggcccaaaggtcattaaaaagttatgaaggaagacaggcaggcaggcaggcaagcaagctaagtgggcaggcaggcctgtcatgcacaagccaaactcccaagaccagggaaggcagatcaatgaaccttgatgtggctcaaattctgggcattgggttctgaga

SEQ ID NO: 2150 - DNA, 499 bp, Rattus norvegicus
  Genbank Accession No. AI172552
tttttttttttttttttggtttttagagacaaggtctctctctgtatgtagccttggctgttttgcaactcccctgtaggccaggctggcctcaaactcctagcaacccgcctgactgtgctgggattaaaggcgtgcctctgtcagctggctaacagcttttttttaaaaaaaatacttttgtgtatgtgcatgttagtactcacgcgttccgggtcaggcagctagtttaagttacaggtggctgaactctggtcctcttccatagttgtatgtactcgtaacctgttcagctttataacctgtaacttcaggtttttgagacagggtcttacactgtaacaaaggctggtctcaaacttgtggaagtccttccttagttcctgagtgatggtattacaagtgtggctatctatttgaacaagagactaattatttttagttttcgatacagggtgttactatgtacccttggcactctcttactgtgcaaactgcg

SEQ ID NO: 2151 - DNA, 511 bp, Rattus norvegicus
  Genbank Accession No. AI172600
tttttttttttttttttagggttcctaactcaaaatttaataaagttatatggtaacaaacaataacttgtttcaaggaaagtgtccaactctcccaattaggtctcactgtacatggacagagctctgtctgacatacggaaccttcctttcagcgcatataacatctaacgattactagggagatcaggcatgaatacaactctgaccctttgaccaagccatctacagtttatcttctggttctttctctggtgaaatggattcttttccatcttagatggcaaaccctctctttcgccgcctgggaacggccatggcaagagcagactcattttgagcagggaacaagcaagcagcagggagcacaagtcctttgggaaggttaaacacagacagaccccagaacacatcggccagcagagatttgcccaagtaagaggctgggatagagtaactgtagtgggaaaatacactttacagtggtcaatttacaaagagaaagcgcccc

SEQ ID NO: 2152 - DNA, 535 bp, Rattus norvegicus
  Genbank Accession No. AI172618
  misc_feature (1)..(535): n = a or c or g or t
tttttttttttttttttaattttancaagtttatttgtgcttcaaaatacaaagcccaatccttactcaggaaatctatcagatggttttctaagctcagcagggcctccccagctgtcaaaggcttccagggtgaccacagtcactccattttgctagctcctcttgcagaacaaagtccaaggtcttttgatggctctttgggaaattaaaggcaggagcagcagcaggctgtgtggttctctctggcaccacagggcaataaccaggacgcagccatcctgaaggccctgatgtgccacgcctttcgatgatgcccctggagccgtcctggaatctgccacttagcgcagaagcacggatgctctgacgagctgtgtgtggaagctcctctgctcgcaggcagaagtccaggcgcaggagggctgcccccgtggctgcagcaacaccccttgaaggcccagaaactatggttcagcctcccccatgcagactggtcacgaaggcccttcctcaccgcgcaacacctcaatca

SEQ ID NO: 2153 - DNA, 625 bp, Rattus norvegicus
  Genbank Accession No. AI175008
tcaaatacatttgggcacagtagatatttgacatgaaaaacagttgtatcagaatggtcatcagaaaaatagtaacattttacacataataactagaaaatatttttctgtatgatcacttgagttagaaatcctgagaatgttactcactgaacaattagaatttacctcataactgaaatctgctcagaaagaagccgtttaaaaaaacactctgaaggctggccagtggtggctcacacctttaatcccagctttcagaagacagagccaggtggatctctgagttcaaggccagtctggtcaacagaacaagttccaggacagccaggactatacagaaaaaccttgtcttgaaaaaacaaaaaacaaaaaaaaaggtctgaggtacaaatcacctatatagtcgacatgtgtcctctacatttttcaaaggatttaaacaagcagatcaaatgcttccaggccactggctcttaggaaggcgtcagtccggctcgaggacgcactgttccacaatctcccgaaagttggggttctccattgcagctgccactcgctctttgtcatttatctgcttgttgatgtcttcttctgtcgagtgagtttctttcagaaatgtaaa

SEQ ID NO: 2154 - DNA, 588 bp, Rattus norvegicus
  Genbank Accession No. AI175019
gtgggggggtggaagtaattacccttttattagcacaaaattaaaccaacccaggagtccagggcccagggataagttaaggcacacatcagataagggcaatatccccaggctggcatgtcccaaacttcctgagcaaatccaaagaggcctggtggtggtgagggtctcagagggcctctgtcttccaggtgaaagggacagaaccgggtgtaggttggaggaataccctgtggacacgtggaggtgacctgaggccttggatcactgggaagccactggcagctcacttatcaaagtagggcaggtagaagaactggaagccccggcggcccttgacagcacagtagatgaagatcacatggtagactcctgggactagcagtaggatgcctggcacaaagaagatggcgctggaaacacctggtgagggggccacctacagtcccacgccgaccaggataagcactagtcccaacagcagaagcaggaaggaggccagcactacccggcggtttttctggatcaaaggatgttgggtccagctgcagcaagcattgtaggaacgctgggtgctactgctgatgg

SEQ ID NO: 2155 - DNA, 649 bp, Rattus norvegicus
  Genbank Accession No. AI175033
cattggcattaaaagtgtttattgggaatatcatccaatctatacaagttatatacaaggcatgaaaatggcaaacagcacaaaatacgattgaggtataagctaagagcacagtatgtcatgtttcaataaatataatccaaaatttgtaaactaagtaaccagatagatgagtcattttttctagtaaaaccatataaaatatttatttcatgtgaggtagaggacagttttgtgtgtcgtgtaatgcaaccaaccacagcaattttaatcataaaactatatgcactggcaaaattatcaatcgagttatgctcaatgtacctaatgtgtttccgtagttgcagaagggaccattcacatactgccttcccaggttagaaactgcggggtaattgaactattacactgccttaaaattactacgggaagtccttccagcagaaaagctaatggtgactacatgtatcacaaactcacaactcaaaaggtgtcctagatttagcaattattctaatggggtgttctcatgagaattactttaatgtgctgtgctttctttattttcaagtgaggtatcttatattgaagaaaaaatcttataaatttcttttatactaaactaactttaaacactatttcggtttct

SEQ ID NO: 2156 - DNA, 649 bp, Rattus norvegicus
  Genbank Accession No. AI175045
tttttttttattattataataaaaatatttattataaaataatcacatttctttgcatataaactaaaaacataaatgtaattcacacattaataagttaagtgggcctaggcatttagcatccatctactagagtttaaagtctcctgtgggttcataaataatagggaaggtattttgatttaatttacacagttgatgctattgagatcttaaagcttttctctattactttacacatagctcgtggtatttgggctaattaaccaaatgccttagatctttggtaaacacaagtattcatgtgcacaaacgtgtagctgaaatttcagtgaaaacatcaataacaaaacaatgatacgagagataacccaaatgccgagagtttgtgtgatcaatcaaagttattgtccacaacttttatggatcacatctgaaatgcaaaacaaatagttgtggctcctgttgtcacaaccagaagcacctcagctctaagtcaccaggaaactaaatacacatttcaaactcaactgatacacaggactgataacattacaatgcagaaaagactttcaacgttaatttgacacaaattaattaattatttcaccttatcttgtaagagtgagacccactgaagaagccacac

SEQ ID NO: 2157 - DNA, 587 bp, Rattus norvegicus
  Genbank Accession No. AI175063
catttctaggcacaaagccatcgtgtttattcagtaatgattatccgcataggttgctataaacaagagaactgtgctaaggtaaatgcttggctgagatgttttgtcttaatcatctttatccagagtgtttcactcaatgttatgatttaccagtttacatttcaaatcaatacactcagagagagggaaagaaggaatttttctataattaaaaaggaactataattacaaacatatttaaacactttaaactgctaatttacaacagaataccctgtaataagtcacaagatgggaaattaggaatacatactggcaaaggctgctacttggtgatgtatttggcaagtaggaagaataggagcaagatggcagtagggaaacggtggtctagaaacaagaaatcacacaggtttttaaatacctggcttttagagcaaaacgagttttaaaaaacaaccatccacgcaaactgagatctgtcgacatagaggggaaagacagaacatttctcttacggtatagaaaagatgcaaatccctgtaaaggaaaagtcaatgcatattttgagcctgttcacgttc

SEQ ID NO: 2158 - DNA, 434 bp, Rattus norvegicus
  Genbank Accession No. AI175087
gaagagaaaaatgtttattaagcaaacctactgtggtaaatggatattgcaaaccagtggcaagggagatttgcagacgatgaaattcagactatatcatattaacacagaggcagaggatgttatttgattgaaagcactagacaaccatttcaatgagcttagggaaggagagagaaggaatcctgacaagaacctcccgggacgcatgagaaagcaccggggacgtgcctgctggcccctctgaagctgagtgttctcgccacgttctagcttctgtctggtctaacctgatttctttgaaaagccacttctatctaccagtcacctaggtggccacccaacccacttcacatgtaaacatggtcacagctccccaaaaggtgcaccccgcatccagacatctaacccttaccccttcagttctaaaccaa

SEQ ID NO: 2159 - DNA, 517 bp, Rattus norvegicus
  Genbank Accession No. AI175095
aacttttcaaataagtttatttgaagcaaaataaactactgccaaaaaactttatgaaagttccatctcaaaagggtcaaaaaggggaattaactgctatgaattctttgcattcagggcgtcaaagacgcagcctgtgcagcgtgatgacgaattcttggatgagaaagcatgtagacagaagtattcctatggcagaatatttacagcactactttcaatgaagtgcttcttccataaacatttgaaatgagatgaactgcagagattaaatgaaggcttcatattgtactttcatgcacgctgattcctttaatgatcaagtcctctccacaaagagactgggcaaccttatcatctgcaaaggtaacaaaggcaaaagctctgaatggtttgggaatgaagacatctaccacttctccatactgacagaagaactgctgaagctcttcagcagtcatgtcctctgtacaacgttcaacaaacacctttctgcttctcaaaagctcgtctgggc

SEQ ID NO: 2160 - DNA, 479 bp, Rattus norvegicus
  Genbank Accession No. AI175101
aatggtttttgatttttcttcctcttaaataaacatgaatatatatatatgtgagatatatatatatatatatatatatatatatatatatatatatatatatatatatatatatatatatatatacttttctcttataaacttttgtggagtggggtgggggccttctagcctcccagcatcactcatcatcaaagttctgactcaggaggaagttggcagccaagttctcatttttctcacacgctaagtaggcctggatcaccaggctctccgggaagcccagtgccttcagcctttctatagcttccttctcctgcggtgtcacctgtatatagctcatctgtggggcctcctcacctagggcaccaacctccccctctacatcagagatgtccgccagctccccggggggctcattcaacatctggatgaactgctcctggtgacggctaatttgctgcaagagctgacggttc

SEQ ID NO: 2161 - DNA, 502 bp, Rattus norvegicus
  Genbank Accession No. AI175203
acaggtgacacacttgagtttaatttatggttgattcacaaggaagcatagttgtgggtttaaagctgatgaagtcgctcagctgctgttactgctcttcgtttttctttcaggatcaaggtgggtgctttcatataaaatcttgttttttattccttctctggcaattctttcctggatcctctgcttagcaaaattatacctacagtggaacctttttctccggctcgtggggctccgaggcggcagccatgggtgcaagtagtcgctaccgccccgcccaggcccgcgacggaagcagtacgggctccgcccaccctccctcacggcggcggccatcttagggagcgatcctggggccgtcccgaagcccgccgtggccccctcttttgttccttggaaccaaccacactgtttttccaaccccgcaacagaccatcaggaatggaacacaagaggagacaacctagagaagctccaccggttcctgtctcgcaggcgg

SEQ ID NO: 2162 - DNA, 510 bp, Rattus norvegicus
  Genbank Accession No. AI175221
gaactttaattagagccaatcgggtgacacagtgtttcagaagtcacttactcatgtgcttagttaagatccaagaaccaccaaagaccctaaggacagtaagggtgcagattctcaatgagtctgagccatgttcctgtgttttcactacacgcgcttgggcatgtagaatttgccccaatatcgccctttctgagtcaggtcatatgggctcaggaatttccgtatgccaaacatgttcgcagtggctatgcgctcaaaggtccagggattctggttattaagttctctttctttttgattttggtgcatcttttctagagtcttacggctcacggcctttgctggaaagggcaacttgtgggcaacctggttcaggacacgctttacctcttcaaattcacagcgtccacccatctctactatgaggcatccagtcttcacaggtgtcacatagtgatcaatggcacctttacctccccccatgcgctgcccaacacctttttgagt

SEQ ID NO: 2163 - DNA, 437 bp, Rattus norvegicus
  Genbank Accession No. AI175294
actttgaaacacctatttatatccattttaatgagaattaaaagatacaatgggtcaacaacattaaaaaaaaacctattggggtaagacaggagaatcagatcttgtttatagcgtacgctttacaagagactttgacattgtagtgttagttcatcgctgcccactgaacgatccccgtgtgcatcgtctttgtctttggtgtcactggtaccaataaacacagttcacggctttaaaacctaatcacactaactaggaaaaagtaaatcaacgtcacctttttcaaaattaaatacaaggactaatttttgtctcatggtccacaatacctggaacatcatgccaaaatattaagggttaaagggaacattattcttctctaattgcaccaaaatgtggctactgtatgctggtgtgatgacaaccagtgggca

SEQ ID NO: 2164 - DNA, 507 bp, Rattus norvegicus
  Genbank Accession No. AI175346
gtcagccaaggcttctttattgaataatttaaatcattaacaaagataaataagaacaaagaaaataagatagttcttaaacataatacacatatatgatttacactgcactttcataaggcaaaaaagtacatccaaatgttcctattacattcagaaataaaaatgtacacgacaatcactacacaatccaatttttattctgatctgcatgaatgaacctcttcagaaggacacactgacatctgtcagctagggtgacggcaaaattcacacatgtccaacttctccacacagaggttagggatctgctcttcttttgaacgtacttaagccttccatatataaagatcacttatggaaacacacctcaccagaatggggcaagaagatatgtacagcacttctagtctgagaaactgcagacttcaggttgcacaaggacatggtgtgaaccttgaaccatgtaccacccatcgactttcttgtgtcactgaaggcactcag

SEQ ID NO: 2165 - DNA, 611 bp, Rattus norvegicus
  Genbank Accession No. AI175454
  misc_feature (1)..(611): n = a or c or g or t
aaggcttctggcaggaacattttattttgttttgttttgttttattttattttttggttaaagccacaacaaatagaaatgtcatagaaaacaaacatgtaaacagcgtcagaactttggtttcactgaaacatcgtccacctgaaatatctgaggtacgaaggcaccgtgctgggtgctacagtctggctctactacagccatgacaagactaccctgggagccagggcaggcataggctggccagagcctgcggcccaggtcacccaggactcggctcaggacacactctctcaattcagacaaacactggctcccccaatggcctgcttgacaggagctgggacatacaaaggaagctgtcacactgaacttgaagatgatttggactgtgggacagggaggggcggagcagaaaaggacgtcaatcgacttccgttgtcccacaaggcctcaagaactcctgtcctcgctcatggaaccacttattggagacccacttgcagcccacaagcacagggcangctgcgtgcctcgttcgataatcgccttccccgctccgaagaaggttataccagaatacagccgtgcccttcttgggccaaatcgca

SEQ ID NO: 2166 - DNA, 382 bp, Rattus norvegicus
  Genbank Accession No. AI175466
tttttttttgttggcagtgatatttattatactgacagatgggagttatatacagcagtgacaagatgcccctcaccctaccagggtcttgtgggggaaaggaggaggtattgacagaaggcacatggtggtagccccaggaggccagaagtaaaggtaagagggtgtagtgtgtcctggggaacccagaggttgaaacagaggctcagtcagagagagccttgggccacacagcaagtgtgaggcagctggtcccgagagcttgtgctggtcacttgaggctacagcaggacacaggggcacctcccatccttcttcctaggggcactgggtgggctaggagggagttcttgctcctggtatttccggacagtccgcacca

SEQ ID NO: 2167 - DNA, 665 bp, Rattus norvegicus
  Genbank Accession No. AI175475
catttaaaacgaaatatcaacatatttattaggctgctcgacagtgaacatgtaatcactttcttcatggagggagaatacacccgaccttgttgtgggaggaggaggatgagggctccacaagaactccccatttaccaaggagaggctgtttcctgctagcactgtctctgctgtacgctccagccaaacagccatgatttccccagaatccctttgagctgttattgcctcagatatgggagaatataaggttacacacgtcaaaaacacataggacattaataaatggcacctggacaataggcctaacattatcaaatttttttcaaatgataaggggtgggagggactgctacccaaagaaagttcctcagtcacagtagcatttagagagatcttacatcaaaagcacaagggaccagtaaatatctactatccctggcgtaagtttctcctggttcttcttgttgctaaatggtgacgttctgcctttcacctgtcttagctatcatttcaattaaaaagggaaactaaaaaatggtagaagaggacgaggagatggtgaaaaacaaccctgttcagacaaagataaaaatacaaaatcagatgtagcacaatataatagaaactggctgaaaacagtacacgctaacagacatgat

SEQ ID NO: 2168 - DNA, 658 bp, Rattus norvegicus
  Genbank Accession No. AI175477
  misc_feature (1)..(658): n = a or c or g or t
aaatctgcattggcaatttttaatgtctcacttgtgcagaactgaaatgtgtttttaaaggcacagaaggaaggaaaggcagttgtctgagcatgaagtcacgggaaagggtgctggagagaaaccgtgggctgctctgcgtagctgtaggaaatgaacaatgcggtgccgaatgagagctggcgctactgtggtccaagtgcaggcatcgctcacacgtcagtcggcagagcgcagataccacagtgcacagtcgatcactgtggagtgaatgcccaggaggtgctcgatgccagtgaccaggagctgcaggcgcagtgtggtcctcattcaggacgtggacagacattcgaagcagtcaagcacataccttttcctaccagaaatcactttctctgcaagtaaacaactgtctgcctaccgagaattataattttaaaaaatggagttgggtctaattataatttgtgaataaaaaaattacaaaaataaaagcagagacttctgtccttgaaaaaagagatagaaaactagatnttcctgtaataagaaaatcatgaatatttcacctttatgtcttttcaaacgtcatctcttcttttttttatattctgccataattcacattgggagatgtatacactatggcaacttctgt

SEQ ID NO: 2169 - DNA, 597 bp, Rattus norvegicus
  Genbank Accession No. AI175508
agaaacaaagcatcaggctttattttgttattacttgtaatacaggtattgtactgtagacatctgttagtcttgcaattcattcggccaatacacagaaatgaaaaggagcaggaactcatcacaagccctggctggcaccctccaacccaacacaccttgtccctttcaccctcacagcctctccccgagacaagcaaacctaagtcctttcccaagcacaacacccaagtgttcctttcccagtggacagtgggatagaaaagccagcccaatccacagcaaggaggcagtgtgggctggcaaggagccaaatcctggtcaggaaaaaacaaatgatgtaaaaatatgtgaatattttctatcatagaatgaaaaactgatctgcatctaaaagtgcaagaggcgaggtgactgagcccttcaccagacgccgcggaagtgcacaggccgtggtttaacttgttgaaggaggctagggtgtgtttacgctgacatagaaaattataaattacactgaattagtatccataatcactatatacacacaaaccagttctaaaatccactggtttacaagtgaaaaccttacaaggt

SEQ ID NO: 2170 - DNA, 641 bp, Rattus norvegicus
  Genbank Accession No. AI175551
atctttcaagcttttatttaagtgcacagacttaaggatgatttagattttgttaaaagcagccacatccatggactgtacatagtcctcaaaagcagtaatctgctcttccagcatatctgttccaaccttatcatcttcaactacacactgtatttgaagctttttaattccgtatcccactggaaccaatttagaggagccccacaccaagccgtccgcttgaatgcttcggacacactcctcaagtttcgtcatgtctgtctcatcgtcccaaggcttcacatctaacaagatggaagacttcgcaacaactgcaggctttttagctttctttgactcatactgagcaaggcgttcttctcgtagcctctttgcgtcttcactttcctcctcatcatcagatccgaagagatcaatgtcatcatcgtctttagcatctgctgctccacttcctgtggtatctgccacactgacagggccatacttgcccaaagatttcttcactcccggcaagctggccttttctttttcgtaagatttgatatgattataccaacgcagagcatgacacaggtcagcgggtggtggaccagagattgcttcaaatactgccacatcggcttgtgatggcacgtacc

SEQ ID NO: 2171 - DNA, 624 bp, Rattus norvegicus
  Genbank Accession No. AI175558
aaacgaacaagcttttaatacagctcagttatgtaaaatactgtacactgtaaaagatctagaaaactagagcttcgagtcatgttttaaaaaagccataagctcaattgaaaaaccaagtggagtacaaaactgcaacaagagcccactgactccatgacttcttgctcttccagtcctgcagagctggagccatagccaggagtcatcacattggtctgctgtgtagataagcctgtccagccttggggtaggtaggagctgcattgggtcctgatgtcatttgggtattaaactggaccaggcagcagagtatggagaaacagccagcatggagggaaggtgcaacactgccacccctattctaccccgagcttcactgggtattggtacttcctaggagctgtgctgagttctcgcacgtttgcttgttaacacatccacaggaaggccccacagcatggtctaatggcgacttcggcttgctcaagtactacagcctcttatttcaccatgtgctgcagatgaaccatttagctggccttctcttgccatccctgatctgcctcttgtggagatctcacatgtcagtcgcttgaagtattctggaagatcagcatagtc

SEQ ID NO: 2172 - DNA, 605 bp, Rattus norvegicus
  Genbank Accession No. AI175590
tttttttttttttttttcattttttctttgaatttaatgagtttacatcaaaaaaaattaagtagtcattttacatctaaggaataaaaaccattttaaaaaaatacaaagagtgaaaggatttttaagcaagtttacatttcttttggctatggttctgaacaattcatctcatgatatcttatcacaatgtgcaaatgcatttcacagcacctgtgacaatcatcaagttaactcttaagcgtatccactgtcagtatctcctcagaggaaaccgatctgccttctatgaaaagctccatggtacatctcagcatcgcacaaggccaccagtcacccgccctcacaggaatcgaaaaagttagttggaaataagtccacataagaatttaatatctaaaaggtgaaatgctccttgtattaatgttagcaagatctttactttttcatcactaagaaacactttaatagttttagagcaaaagctgttaaagagtctagggagctaaaaccgtacccctgaggtcaagcttacagataaatcttttgtaagtacttctcaaaatatcctccctcccatccccaaattctgtattgtttcttac

SEQ ID NO: 2173 - DNA, 466 bp, Rattus norvegicus
  Genbank Accession No. AI175619
gggaaagaattgtactttaatgaaaaccaagttacatgttatcttcaagcagattcttgagctaagggaagtgcagttctaccctatctttaacaggatctgaagtcttttactccattccccaccagtataggttccatttcttatgcaataatcctctagctgtactgagtggcactgtataaaacatttgttttccagggctgggatccaatagaggatggcttcttttcacacatgttgttacacagttgtgtgtagtcttgcttctcagactttcggagctcagtcagtctgacctccaattcacagcaatcttcttgctgtggtttcctgattgctgggattacattacactcaaaaccaccagatgtctaagactcacatgaacagaatgaaataaagtctgttttgacccccatctatgactggctgagtgacatgtacttggaagactggtcacttt

SEQ ID NO: 2174 - DNA, 487 bp, Rattus norvegicus
  Genbank Accession No. AI175778
caacctgcaataaggagtctacacattagcaactttacgacttttgaattttcaagttaaaagattcatcagatgattatctttaaggaaatctttgagaacattatttacacaaacattttcacagttttaaaaaaatgcaagttattgctgatgacagtccttcctactggaacatctccctggcatgtgctctacatacaagaaacccccactgtaccttctggttaattagagatggaggctttatttgtacattctcaagagacattcttgtgagaggctcctcataagaatacagataaccatttatcagttataactatgtaaataggaaggtttcaggataggcctattatgaaacatttccttagagattcctgaacatgttaacaatcaaaagtttctgcttatatctgaaaaataaaaccattgattttactatcccctttttgttatgaaattatttatattgctaaaaagggct

SEQ ID NO: 2175 - DNA, 506 bp, Rattus norvegicus
  Genbank Accession No. AI175790
caaaaagagaatcttttaataaaaattatccataaaaatcctaataaatttcaaagaacaagatattccttagtacatttataaaagaacgtctggtccttttacaaaaatctctcatttaatttaaattcagttcatatttacagattaaacatgaaatatctatggtcgccaagcatattgcacatcacagagagagagagaaacatttgtgcatctcagtaagtttgcccagagtgtccaactctagactttttattttgtagaaacacatttactttttgtgcgtgtaataaataaaaacgcagcttgtgggatgctacttaacactaaaacaaaatatcctgaaaaatattatttgtttccctctcagagagagagaagcagtgaaacagtttcacaggtacttgatatctgttggttattcgcatccaaattcaagggggaccttaacctgagccccactgagtcacagccacaaggcccacacccattattggctccaa

SEQ ID NO: 2176 - DNA, 382 bp, Rattus norvegicus
  Genbank Accession No. AI175833
gaagagaagcagggacaggctcctctgcctgttgaggctgggcctggcagacaccacacagggactggggatagggaggggaggcacaggagacagctcccaactgcgtgaacttggtcccacgtttgtcctggttgggtccagggagggcctgcccagggatggtggcaccaagaaccagggcagaggcatcagcagcacaccccaggcctcctttgggtgggtcaccaggatggggatggcagacaaggcaaggacggggagaccacatgctcatgcagacagggagttaagagttagcgacggcccccagtacacgttccacatgttaaggcatcatggttagacagtgactgacagtgatggatgacctgcccatgga

SEQ ID NO: 2177 - DNA, 395 bp, Rattus norvegicus
  Genbank Accession No. AI175875
atacacagcaaagcttacaggtttattagcggtctgtgtggcaacttctctttcaacgtttcagtggcagttctggcaacaaattcataaaaagcttaatttttatacaaatagttttattacaaatttgaattcttaagaaataacacatttaaagaaattacacagaaggccttagtagtcttaaaaactttttttttaaaaagggggtggggtaagggggacttttagtgtaacgccacttcaagcatagtgatcttcccctcctgcgcctgacctgtcggctccctgcaagatgaaaggccttggctgtcatactggaagtcagtcattcagtctgcggatagtgtggcaaaccctgaaaatactccgcgcaaagcggtaagcaggaagcg

SEQ ID NO: 2178 - DNA, 448 bp, Rattus norvegicus
  Genbank Accession No. AI175935
gaaagaagaagacattgcactgactccgttacatttattgaggaggtaggggaggacggcagaggggtgacaggagatttacctacatggagagggtcagggggtctgaggggctgtgcaggaatgcagtgactgtctctctaggcaaagaggagagggggcgtctgtaagtacctggtgcaaatcctgtaataaaacctaccttcacgaatgggtacagtggaatactacctgcggcattcatacgtgcttctaaacttttctatatacagtatatggtcacttttttataaatgtacagcttgggtggggggggagatctttcttcttataagcacaacattaaacataaaaccaacatgggccagccacattacaagcaaagaccaagggaaagcaagaccatcagtcagcccagcacccaacttcctccccaccagcagtctta

SEQ ID NO: 2179 - DNA, 355 bp, Rattus norvegicus
  Genbank Accession No. AI175948
caaaaaataataataatttataaaatgccttgttcttctgtcttttccacaggcttctcgtctctcaaggacaccagagctgaggctccttcaacaagatgctagaacaagcagtggggagttggggaccagggtggcgaggcttgtgggctgcgggggcgggggtgcagtgaagtcccaaggcctctaggttgtttggggagctagaaatgtttaggaccaaagatttgcagtcaggcccggagagcccctggggtggaggctaagtgtcaaggccttaatgcttcgctcctctgaggatgagtccaagggcacgaccatgatcttgagacgaggagttgaactccctcgtgcc

SEQ ID NO: 2180 - DNA, 574 bp, Rattus norvegicus
  Genbank Accession No. AI176002
aggaatcaatcaaaagttttgtcatttatttaaaaaaaataaaaaataaaagggtttaaaagcttcaattagttccagcaacacccagtccccaaatgcccaggcaagggccctgtctttggccagaaggcattgggaggaagaaggaagtctctggtctaaccctcagcacggccaggggaccttctggctgtagcacagtgaaggcagggacaccaggcttaaagatgccccctttctgccatgctattttctccactgtatctcctagcagactggtgtggtcaatgccaagagaggagactccacacaccactggctttctgatgatgttggtgcagtcaaaagccccaccaatgcccacttccaccacggccaggtccaccttctcttggaggaagacatggaaagccatgagtgtgaggaagcggaagtaagagggcatggaaatgtggctgtcatccttgaattcctccagctgctgatagaagtgccagaagtacttggtaaagagttcggggctgatgggcttcccgttgattcgaatccgctcacgcacctgcaccaggtgggg

SEQ ID NO: 2181 - DNA, 537 bp, Rattus norvegicus
  Genbank Accession No. AI176003
caggttcacgctgggtatttcccacatgactttatttccactgcggtgaagcttgttgaaatgtggaagctgggtcagagttaacatggtctggagaatggataagacgcacagggtgtgagttcgcacatgcgcccgtgtgtacacacgcacatgcctgtgtataaatgctaaaggcactgattgaataaacttgtgtctaaacctcgaggtaaccagcactgtctgtacgtttcctgtaaagccagcttaactcttgtccctccagctgacagatgcagagagcaggggaggaagctggcatggtccagggtggataatgggatgccaatggtgggatgctagttcaggtttgcaggatcagtgcccacccccccatccctagcggccacaggagctgtgatccccgtgggcctcctgagagggccagaggttgcaggttatcgtgggtgcagagggggcttgtccaggccgtagcaccaggttgctttcagccataataatgcattgactttaagcaggagccttggagaaacc

SEQ ID NO: 2182 - DNA, 653 bp, Rattus norvegicus
  Genbank Accession No. AI176007
attgttacaaccaatgtttatttacagaatataaatctcttcaaaaagatacattccttcatttaatcaatggtagaaagccttattaaacagaaataaagcctaagccgcactttatctcagaagaagattgcggcttcattgcaagttcatgaacacagaacacaaatgtacttcactcagcagctacgtcaatgaggctgttgattctcactggcaatgccattttatacatggaacaaatcttacttaaattaacagtagtaaaaattaaacttcaaacataaaaatatgtaacaacgaaggaaagagcaggaagtacgtctgctagcaaacaggatacgcaagttctccgcactcagacactcggtgaggcgtagggaaacctagctctgagtctctggccaggaagcctgtagttccaatcggatgggctttcctgctccactttcacaaacggctcaagagacaatgtggtgttttcagttctataactacctagtgttttattaaaacttactgaagggatctaaaggacctccatgggtaagacaaccaaaagatgaaattataactattttaaagggtatttttgcaagtacatacgccatataatgcacaacggacaaagatgtgttggtggtaccatcatg

SEQ ID NO: 2183 - DNA, 628 bp, Rattus norvegicus
  Genbank Accession No. AI176016
ctgtagaagtaaatttttaatggctggttaattatatcactacatttttattgcaatatagtactcatttaagcacttaaaaatggaaggtgtacaaagattaaattaagacacggtaaatttgactaaatatttggtttttatataaataaaggtcataaccacactgttgacatgtaatactgttataatacaacagttaaacttgtgagtctacaacagaagtcatctgtagttaaacaggaaacaaagttgagaaagaccatgttaaaacagaactactgggactaacaggttgggattgtaagtagcaacaaacatactcactcagctcctgagtatttcaagttttacagtacacattaaaaatgatttcttccatcaacactattaaattcaaactgtcggatgtttatgcattttgcaagttacactgattgaatgcttacacaggagcgggggtcggaacagctcccaatttgtagtttacatcacccacatgctaacacaaacacaacttgttccatttccttcccccttctccccccaacaaagaaggcaggatttttggtttcttttaggtaattgttttaaaggatttctgatgatcaatttgaacgtctgaaat

SEQ ID NO: 2184 - DNA, 470 bp, Rattus norvegicus
  Genbank Accession No. AI176018
cgtgtgcatttatttcttattttaaattcaggctcttccacggtgtgggcttacagtgccactgccagcgacagctgcagccacagtgtgacaacaaggactgtcgagcaatgtgtggggtgtcctgaagaaagacagtgaagagatctgaaccatgggggtgacacaggaagtggaagaggctggggcagctcgacagcattgtagtctccccccattcgtaagacatcttcggtgcaatagtagaactcagagaagccatagaattcactgttctggaagtggattggaggctggtagactccattgagagaagtctgtgtctcattggttttgttcatgaaaggctggagggtctctcgacacaggtcgaagtctcctgtcccccgaaggtacagggtttgcccattttgctggatctcatctttcctcgtgccgaattcttggcctcgagggccaaattccctata

SEQ ID NO: 2185 - DNA, 609 bp, Rattus norvegicus
  Genbank Accession No. AI176041
acatagcaattatttttaataggcacttaataatttccatcaaatgaacattgtctttttttttaaagcaacaattaaacttatttgcatgtgtcaggaaatatcttacatatatcactaccattttttattgtttatacatttccttttaaaattagttaccctgttctttgacaatttcatacatgtatataatgtattctgaagactcactacaaaaaagtcctttcattctaatgtgaaattctatttttttatttttgcattttcaagacaaggtttctctgtgtagcccagctgtcctagaactgagtccgtagatagatgggcttcgaaatcagagatcccgatgtctgacccctggagtgctgggactaaaggaatgtgtcactatgtccatctcaatgtagaattctttagacgtttcagctaaatcagctttgaaaattgaatataaggttggtgtgcgagtgtaaaccttcgactttattcccaaggcttctcctgaaatgacagcgactgtcacaccatctttgctgggtttcgggatctcttcacttttcagttcctggtactgaggctccaccatcttttctgagcgtttcaaat

SEQ ID NO: 2186 - DNA, 450 bp, Rattus norvegicus
  Genbank Accession No. AI176061
ggaaaggaacagttttattagcctggagttgaaagtctttgggaggccatatggtgggtaccgccacggctgtacaggaagtaagatgaaaccctgtccagggcttatttggattgtagagccctggagaaggcaaactgcccagggaagaagtagatgcgggagtcctcgccggcctgtgctatcttactgcactgggattcctgaggctcctgaggcccttgcttcagtattgggcagtggaactcctccagagccacctgcaggcctctgcgctgtgtctcgctgagctcaagctctgtcccgtgtatgtccgctgtgcccagccatagggccagggagatcagcaggcacttcatggctttgctttagtcctatggtccttgaaaaatatcaggttcgttgctttagagaggcccttttctgtgtggttcctcgaaccctcgtgcc

SEQ ID NO: 2187 - DNA, 348 bp, Rattus norvegicus
  Genbank Accession No. AI176117
catgtactttaaaaagccaatacaattaagactttcagttatctttcagctctgcccctgaagtcacccacaagcagctgcagaagcacacaggacttgttcccatggtgggcacatgtgaagggcattgggtatctagaaatgggaatgcaagcctgtgtaactgatcagcagcctatgccctgaaaagcttaacctgtagggtacggagtacaaaaattctactcattagcacatttaaacttgttatcactacagagacacttgctgccacatcagcattaactgctgactagtaagtctcccagtacacgtcaggggaagtcccaacacgtattttaaataaat

SEQ ID NO: 2188 - DNA, 386 bp, Rattus norvegicus
  Genbank Accession No. AI176121
gtgttctagtgctctttattaatttaaacaaggacatggggctggcgttcccagaggcatcagtacccagttggttcaggcagttcccctattggctgactaggtcttgatacctagtgatagtcacacgtgtctaccatcaggtgatcctgtccccggagactccagacacatcacagacatggagcatatatgacccgacggcctcactggacatcatcatcatcaaagagatcttcaaaatcgttaaaaaagtccgcatgaactgccttttcattggctgccaagtccatcaggagcccggtgctacctccagcctcatccaagtctacatagggccccgcgccctcgggaaacatctcatccacagctggtttcctcgtgcc

SEQ ID NO: 2189 - DNA, 382 bp, Rattus norvegicus
  Genbank Accession No. AI176130
cacttcgatcctttatctgattcacaggccttgctctcacactctattgctggttgagtgtagagggtggggcatggacacacaaacaggacaaaataaaaatgccacagctgtatggttcaggagcaaatcagagtgggccttggcccaaggttacattcacagctcaaggtaagtgcaaaagaatggaatgtgaggacagtgcgtgagggctgctcccttttgagcgcaggcctcagagaggacccagagccatggctaccctctcttcagtgcatcctgctgaccccagggagcccttgtcccttccagggagaggaactttgttccaggagccagtgctccactgcagaccaggagtcttttctcctgccctcgtgcc

SEQ ID NO: 2190 - DNA, 444 bp, Rattus norvegicus
  Genbank Accession No. AI176136
gtagaattctctttaatcactgaatttatgtttacaaccttaggggagttcaggtaactaaggtttggtgggaacagttcttgcacatgaaggacaattacatgctccattctttttcctgtaactatatataaagacacattgccacagacacaaaaacttaaagccatagatcactgcacttctatttacaaagaaccacgagcacacatgcagctctcccggggccggagggcttaaacagggcttgagcgttaaggcagcgacaattccaacacaacagaaaatctaagttaaggctttatgtctcttctgaaactcacattcacagacgactgtgaccaaaaccacggtttagctcctgggttgcactcctctgccgggtgtgttattagcccattaccaagtcctttgcatcgggtgaatgggacaggacggcagcaa

SEQ ID NO: 2191 - DNA, 463 bp, Rattus norvegicus
  Genbank Accession No. AI176160
tttgttttcttttttttctttctcaaatttatttaaaaaggattagagctgatatagtaagacatttatgacagggtcaacataaaaatgatagctttggttatactcagcacatgcaacttactacagcgctaacacgggcaagcttcccatgtgaagctgcatgggtgggtggggcagagttgagagaacagggctcacgtggagtacaggagagcaaaggcataaggggccacagggaatgcctactgtcacactagcagcaaggtgcactgtatattacacaaacacctgtgtagcatccccttgttctgatacgtcccatgtttctagttacgtaacagcatttgcagtctgtggttaccagactaagctggtgatcacaggactaagaatctctacccaaccagtctggtgcgttttcatgctgaccccctcactggtgttgacaactaattaaaac

SEQ ID NO: 2192 - DNA, 580 bp, Rattus norvegicus
  Genbank Accession No. AI176169
gaagtagcaatgaaataattttatggttgggggtcaccacaacatgaggaactgttttaaagaggtgtggcattaggaaggttgagaatcactgcttgggggataaagaagagctatttaccctaaccttcaaagtcctgacctttggcttctctgcagagatagcactggtctgggctctgggcatggtttatctttcacagtgcagtttgtggaaagagctgctatcaggagtgtttgtagcctggtgtttgctatgttgctcaaggtttgttagcattgacttgctcgtgtctcctttaattttcagttccaagaaaatgtctctcataactgactcccgccgtctgccaatcgaacagagaacggctgagattgcctttcttacctacaatgttcactctagaccctcgctcagtcatctgtaacatttttcatctgcttgggagacaggctttacttcgactgttactctttcagatgttgacgattaaggattaccgcggagctatttttcattctaaatctctctgagaatggtttttcttttgaggcagggtgtcaccatgtaaccctggct

SEQ ID NO: 2193 - DNA, 469 bp, Rattus norvegicus
  Genbank Accession No. AI176170
gaaaaaagccagcataaagcacttttattgcaataataaaacttgaaccgcatatgtagtgcaaaggcaggggacaaaagctttctctcaccaaatcactacacgggacagcagagggtgaaaaggaactgaaggaggaaaagccaggaagctgggatcagcagagagccaagcatcaaaacctgggagatgctgaagctgtgatgaccagcatcattttcttagagaacactcaaggatttgttgtggtggctgggcatccactgggtggtgagtctacaaacagcaccttcagtttaaactttccaccgaagttctagaatttagtaagtggagcgtgatagttacaagattacaaaagtccagaaaatccattagaaaaaccataggatgaaaaacaaattaagccaggtcacaaagaaggcttcaaaggtccctgccgacccagggacagatattgtagtgttca

SEQ ID NO: 2194 - DNA, 579 bp, Rattus norvegicus
  Genbank Accession No. AI176212
gttatgaagacattttcctttaatttatccaaacatttgactttcatgaagtcatttatttcagaagaaatataagcgtataatattaaacttacaacattatagtatttacaagatgatagctgacaagagaaccttgcctgtatgaaaatacaaatactctatttatctcagctatttgcatagaaaaacagcagggagaagctcacccctctttagatcctgttaattctggagcataacgaagactgctgacacggaaataaaacttatgaatgtcccacatctacagttttagaccttcaacgtttttcttcaagttcagcagctccttttcttgccttcttttctccagtttgaatgctagcttgttagctttcttttcaactcttcgttccttccgctcctcctttatggcctgctttctggcttttttatcctctttggctctcagttttgagacggggctgggtggacaccttgggcagatcactgctgttgatcatctgcatccgttcgacctgctttgctgtgaggcctttcttaggtaggacatggagaagttttccccgtccttgg

SEQ ID NO: 2195 - DNA, 550 bp, Rattus norvegicus
  Genbank Accession No. AI176247
aagtacatccatttaatgacagggcctaggcagtacacagttcagggcagtatgctatggaaggcagctatgtgccggcgtacactctctacgatctgctctgctgacctgctacgaccatagtaatcagtgaagagaccatctgggttgagcaagtagatggcaatggaatggtccacaatatagtcctggtcctcgtccttgggaccagcgctgtagtatacacggtagttgcgactagcatgggccacttgttctgtagaaccagtcagacccagcagccttgggtggaattcttgcacatatcgggccatggctgccacgtcatctcgttctgggtccacagtgacgaagacaggctgcaccaggggcagctcaggctctgcctcgagcttctgcactacctgcaccagcttttccagctcatcggggcaaatatcagggcagtgagtaaaaccaaagtacatcagcacccactggcctcggaagtcggctttgcatcgaggctggcctttgtggtccagtaggctgaagtcaccctggcccacaa

SEQ ID NO: 2196 - DNA, 672 bp, Rattus norvegicus
  Genbank Accession No. AI176298
aaacaggtaccagttttgattttatttcatcgtattaacatacatgacacttcaaaatgagaaatgcacaagtgaaccattcaacagcttgccttactccaagaacactatattcatattaaacatttatacagtctttcctctctaactttataactggtctaaacagtttccagcatttctcacagagtctagttttgctcattaaaatcaccattttgcattgtcccaggagacttcaggcttccctgtgcttacatgaggaaacctaaccaccacactacccacaatgtgcctaggggcagccctttcaacatggtagttgtgattccaagaactgataggacattagtgatggtggactgacagctgtagtgtatgactacgctacacggaaggaaccacagcccagagagcacctccctacatgacgtatggcattaggcaatgtactgcccaaagacactgaagccaaatccccagtcttcccagaacagacgtactgttggagctgctgcttcattctggaactgtctcactggtgtgaccagattttaagaaggtgggttcttacgtactgagtgtgtgtacacaatggatcaaatttactgtgaggctctgagaatctaatcacaggctgctgaccagtgtccttggaatggcccgtgctct

SEQ ID NO: 2197 - DNA, 407 bp, Rattus norvegicus
  Genbank Accession No. AI176302
ctgggcaaagtggctttattagtgtggcaggatcacaacaggacttaggaattagcattggggcccttcttcttgccaaaggtgggcacaacattgacaaagcgtcggttgtactgcattcgcctcttggcccgaccagtcttcttcttcttcttttcctgtttggccaccttgggagtctgacctctcactttcccagcacgagccagactgccactagtggaggacagggtgctgtcggagcccagagaggtgttggactgtgtgagcgaggacttgcggagtttgttgcggaggaagaagcctttggctttgcccatcttgcccaggctgcctaactcggggtcctccagggcactgctaggaaggatggctgaggcagattcgaggtcatacttcttcttgcc

SEQ ID NO: 2198 - DNA, 596 bp, Rattus norvegicus
  Genbank Accession No. AI176320
ggcatttaatgagttagatggtcttatctttaaaaacacaagaaaatgtcagaaagctaatactagctacagatgttgccaaggaactaaactgacctaaaattacaaaagtataaaacacacaaaatataacatgctaggagggcaaattagtacataagtacatttaaaaaatttacaataaataaagattgcactgtaattggcatttaaagtactgtatgcagaatatagtataaataaacccaaaacacaataatgttggtttccccatgactttggtatgggaatattataagctagtacagggtacttactgcatcatagacaacacagaccaagcacaaaacagctatgatcaagaaaaaccaaggagcaaaaatatacagaacaccaggaagaggggctcggctgtgtctgctgcacccttttggaatacagttgcacctccaactctttaagtgtccctgaggtacttgaacactgtggacttggttgggggatccaatgactttgggttagaactgattacctcatgactctaagtgaatacatgagagtggttctccgcactcacacagcaccggtgggtccaa

SEQ ID NO: 2199 - DNA, 428 bp, Rattus norvegicus
  Genbank Accession No. AI176358
ctggaggcttctccacctgccatttatttaaaagaaaacaaaaacaaaaacaaaaaacaacctctaagtattctcaatccagtaatttaaaaagcaatcaacacttgtgtcaaggatgtgaacagtcaagttcacactcagattcttattctcagtgtagtagtgaggagctgcagttcaaagcaccactgagtgacaggatgcagctgtccccagcccccaaccccaggctggaccagcaaggttgaatgtggaagggaaggaaggcagtgcagggacagggtcctgaagtgcagggcgggctgggctccacagttcttcacacagaagccatagaatcacaggaaacttcagacactggtgtctaaagagaactgagggctctggatgtcacaggagagacctgaacacatcgtctgcctcgtgcc

SEQ ID NO: 2200 - DNA, 556 bp, Rattus norvegicus
  Genbank Accession No. AI176362
tttttttttttgttgtaggaaaaacatttattgcaattcagtgtcaaaaatgtttacaaaaatatgccaccgtcttatacaaacaactataaaaatgtcagttcctcatgcaagaaaggtgtgcaaataagttatacaggattcagattactctttattaaacaatcatctttgcatgtaatctgtccaaccttttgcatttagttaaaatgttcaacccactccaatagatttctttaaaacatacacttaaagctcctaagcttagacacagactataatatactctctttagccaatgtgattggcatttggtagtgtaaggaaggttccgaaagctcccaagtctgaagcagggcttggagccatgtgttaaacagccttgtgcatagctaataaacatcgtctatactaaaagacagagtcagactctgtaatgctgaagcaaatgacacatccagaaatttggagtttggatgtggccatccattatttttcagccaaatggagagagactaagttcagagagctttctcaagaaggtttgcttgatgga

SEQ ID NO: 2201 - DNA, 646 bp, Rattus norvegicus
  Genbank Accession No. AI176363
gttggaatctggactttaattatatacataaatagtgatataagaatgaggagttctaaggcttgtacattatttccacgtgaaagattgcagattagttggcctgtaatatggcatcacccaaaccagcaaaaaggcttaatgtttttcctgatgaaagccagtttactatatccaatactgattctgccatttgtctgtagaaatactgagttactgtctggagtttccaatgtttacctataactgattataatgggtagagcgtagagttttctatttatttccaggtgaactcttcacatttcctggcttctgaaaatgttgcttccacaaatcttctacaactatgtaccctcgtaatccccagtcatataacttctccccagtgatctgggcaatagtgatggcttgttgtgggtaatagacagaggcacctaaccccatgaagaaaggaggatacaccagcttctttatttttgaacctctagcaaaaaggagtccaacaaaaccagcaaaaccaataactccgagtcttgggtaaaatccaggaggtgcattttgaagatagttatagttgtctacttcccactggacaaagtgttccaccttgggtttagtatgggagtatatttcctgacacaaa

SEQ ID NO: 2202 - DNA, 639 bp, Rattus norvegicus
  Genbank Accession No. AI176365
aattacacaataccaatttatttcaggaatcaatgaattatctaacagaattctagaaggcattaatataattaaatactgaaagaggtgaaatacaaaacagtatacattttatgatgtgttttagttctctaatattgtttggtataaagcaaatatgacttggctttgacgaagacaacttactactctaaactgtggcctgttccaaaacgccaacactgagtaaacacagactcacaactatctctgaatccagacattacaagtgaatttaatatgcagtttaagacccagaaatgaaaagtgaaaacaaacaaaaacaccacacacaacttgccaacttgatttgtttaaaactaaacttggatatgtcagggagggttcaatagccaccaaagtcaggatcagagtccccaggaaaacatacttcagagacaccaaagttaaaacctactaaactttgaattgtggtgggtactatttgtccacaatcagcatgtcctgttctaatccatgcagagagcaaaggtatttataaactaggaaaacaggctggacgccatatctcagagaaagaatagcagcctagcttgcattcttgaagccttaagttctatcccaagcacaagaaccaaa

SEQ ID NO: 2203 - DNA, 512 bp, Rattus norvegicus
  Genbank Accession No. AI176396
aaaatgagtagtactttaatcatttccaaagaaagatggtacatgaatttagattagaaaaaatgacattaaaggtgtatgttcctagaaatgaaaaatgaaacaatcttaatacaatttttttttgatcttcctcatacatggaaagctgtctgtctttctactattacagttctgtaagcttctctactgtgcccccaggggatcggaagcacatgacatctaaacaaatcaggagaaccttggtggctggagggaggagtgacaaacaggaatagagatcagtgtgatgatgcacaggacggatgtgggaatcccagctcttcatatggctgccagtcctgcagaggacagcactgcaagaaccaagaccgtcactccagacaactggacctgggaaatcgacaggcctttccctaggtcccacatcaagtgtcggaccccattcaatgagtggtacatgagaggaaagacaagcacgaacttggctgcatggatcagcgctggcccct

SEQ ID NO: 2204 - DNA, 545 bp, Rattus norvegicus
  Genbank Accession No. AI176420
aattatataacctttttatttaattttcatgaaacaatgcagagattttcttataacaaagactgtaagaagttgtgggctagcaactgcagtctcgaaagaagcaagcaattggaattagtcagaactagcacaaaggtacagaccacaaacccacctcagcataggaggcagaggaaaccacaggagtctaacactagcacaaaaactaaatggctggaaaatagcctaggaatgaaaactctgtacactcaaaaatgctcaaactttgcaagggaaaacaaccttgggtcagctccctccctaaggctgctcatccctctgtaggtgggtatttatttttccacagaggaatgccacttggtcaagtgggagcttgtgcttgtttctgctcattatctaaatatgacaccgtgtccaggtgccacattgattgaaaatgatacagtagctctaaaagaaatggattaagttccacattgcttattctcaaacacacttcatgggaactacgttatgaccaaagagcttttgtgagttgtgag

SEQ ID NO: 2205 - DNA, 430 bp, Rattus norvegicus
  Genbank Accession No. AI176422
ataaagttttattaatgacaaatatttcatgattttatgggacgttagatacaaagttttttacttcagtgtttgaaggacacttgttcagaagttatccaaacatatgggaggttagtttggcatacatttacagtattctagaaactggctgtcaagtgtgccagtaagtggaggcacttgggctttacatgccattgtaagcaggtcctcctccaccttctgggaccacccagttaatattttgacttgggtctttgatatcacatgttttacaatgcacacagttctgagcatttatctgtaaccgtaagtctgggcatcacagctggccctcaaatcaaactttttataaagctgcttggctaggtgtccatggcagccttctgcaaagattgtgactttggcatgcaactccaggcctcgtgcc

SEQ ID NO: 2206 - DNA, 370 bp, Rattus norvegicus
  Genbank Accession No. AI176456
caagtcaagtttttttattttattgtcagttacatgctttatagaaaaaagtgtggagaaccggtcagggttgtacaaaaaaaggctaggttcctacgttgttttatttacaccattgtgaggacgcccccacttcaggcgcagcagctgcacttgtccgaagcctctttgcagatgcagccctgggagcacttcgcacagcccacggggcagcaggaacagcagcttttcttgcaggaggtgcatttgcattgtttgcatttgcaggagccagcgcaggagcaggatccatctgtggcacaggagcagttggggtccatggcgaatggaggcggcagttggagatcaacgagagatcgctcctcgtgcc

SEQ ID NO: 2207 - DNA, 281 bp, Rattus norvegicus
  Genbank Accession No. AI176460
acgccggacgccgcccacgtctgaacttcgggagacggagggccccggggagcggggccctgcgagcagactcccagccgcgcgacgcgatcccccccgcggcggcgaaaccgcaagggggggcggcgattgatcgtcaagcgacgctcagacaggcgtagccccgggaggaacccggggccgcaagtgcgttcgaagtgtcgatgatcaatgtgtcctgcaattcacattaattctcgcagctagctgcgttcttcatcgacgcacgagcccctcgtgcc

SEQ ID NO: 2208 - DNA, 624 bp, Rattus norvegicus
  Genbank Accession No. AI176477
cattgtgtagctttattgaggtttgctccaagggcagaatcaatagtggggatcacaaacattatttagagtggctcacaagcctgatcagtaaaacctaaaaaacaggaagtgttacacaagttgcaaataaagtctcctggagttcattggcatgatagcagtgtaaggacggtaaatgcaacaggtgttaacatctcacacaggacttggaacctgctcacttatggacaattctgggacccttgttgcaaaccctgcagataccaatgctgattttctttgatatgaaatatgacattacacaactcttcctaggccttactcttgctgcacttgagtggttcctattcctacggcgctggcgtatgtagtcaggatctccactatctgcttagtttctaaggtcattcgggcctacttcagccagtcctgtgccactcttctggactccccttttagctgattgacaaactttgcggccagttccaggtcaccatgctcaatacaataggaggcatatgagagcaatttaaatgtatttatatcttcagggtagagctctgccggaggcttcagttgcttaagcgggaacaaaagtagggactgtaagtaggaaaggaa

SEQ ID NO: 2209 - DNA, 650 bp, Rattus norvegicus
  Genbank Accession No. AI176488
ttcaagcacatgatttgtcttgatttaatgcctttttaagtgccctcaaaaactgaggggaaaataaattcactcaaaattattttaaattctttttaatcccctcaatttagagtccaagggctgaaggacttataatcatgattcccctttagatataaatttataaattgcacttgcctctgttaagtgtttcttttgtggggaaaatattatattaatttttactgttgcatgcagaggtaaccctttacccacatagaggcatttcttccatagagcctttgagttcaaaccattttttccctagttttcttttattttcctttttaagattttcaaactgggttacacactggaaaaggctgggttaagggccaaaatttaataaatctgtacggataactaaaggctacagagatttttatatatatatatatataattttttttaacttttagaaatcagagtgcttataaaatggctggctcatggctctgtccccagcccctctgacgccgcctcctagccttcgttgttgagataaccaggaatagtgactccatgcgtaaacaacaagaatactaaccaagaaaactagcttatcatgcaaatattaaggcatctagaaagtcagttaaaatttattg

SEQ ID NO: 2210 - DNA, 525 bp, Rattus norvegicus
  Genbank Accession No. AI176490
ggttctttaaaatgtcgttagagcacaaaattaagaaaaatacaaaaccattaaaaatgcttgtcacttgagaggggggagatacaaagctaaatttttcccagtgacctaattgcaagctcggaaaatgatgttacccccagaaaagcgaaaagtcctcgactatgtaggctgcagcgtggagcgggtggcgctgctcccggactcagggaactgtgctcaggtcccaagaatttaaagtgagccagctcgctactccgggactaccgcgcctccacctcgggcggattgcacgccggcgagtagtctcgtgcctcgccaggccccagcgccaggggcgtcgtcctgggacgggcgggaggcgtgggaaccccgcccgccgtcaccagtggaggaggcgcaccgagcgcggcggcggccggcggggtgcgggccaggagcgcaccgtgcagcgccccaggagccaggcgcgggtagtgcattgcaggcagcagcgcggcgtctgagtcgggggcgcgcgcgcgc

SEQ ID NO: 2211 - DNA, 575 bp, Rattus norvegicus
  Genbank Accession No. AI176491
tttttttgaagagcacaagtatttttatttctttctttttttttctttttttttcctttttttcggagctggggaccaaacccagggccttgcgcttgctaggcaagcgctctaccactgagctaaatccccaaccccttttttatttctttaacaatgcaaaatatacacgttgacttgactaggacatattcacatgtaaattttttctcatatccacaactctggatagatcagaggaatgacaaagatcatcacaggaagcagacaaattatgtcgccttgctccgagcactacgaacacaatgcctaaaggactgtagtatctccaaagtttattccagtccatttcttcttttatactccaaaacatcttcgttgtgttggtggatgagataaatccacatgaaaatcgaggtgcccaaggtcagcccaactttcacccagttaggtttggcattgactggctcccggacatagaactttgaccgtgttgaagagcagctcggcagcctggcgggggccagcagccgcgaaaacgagcgcagtactacgggcggcgccatcctcgtgcc

SEQ ID NO: 2212 - DNA, 655 bp, Rattus norvegicus
  Genbank Accession No. AI176505
tttctttacaaaaaaaattgcacataatatttgaccactcttaggttctgatgcactggcatttgcaatggtttctttatcttcaagttaaacagtctcagcaaggagtccagcacgcagaaagggcagtcaacaaccctgctagaacattcaagtgcaactagcagacttgtggccatggcagctacactctccttaagatggactgcttacgtctaaaccctgaaatgaagaatctcagagacttaaaggggaggaactaaaagggactgcctgcttttttactgtaaacatggccctggaaactaaatcccaaacaagaatctctcaggcatcagagagtgtcaagtggaccaggaatagcacaacataaaggtagggaaagtaaaaaatgaaaccaaaaacaaagtaaaattaaaataaacgtcagtcgcttcgaggagctatacttacgtacatgatgttagagagtctggcagggcccagaagcaggccaacagggagttcatttatccgttccaagagtgtcactcatgttcattgcttccggttttacggatagggcattgtaggaaacttgatatgatcaataatgcttgtctgccttacacagaccttagccagggatcagcctaatcttgaagaatcattcaaa

SEQ ID NO: 2213 - DNA, 498 bp, Rattus norvegicus
  Genbank Accession No. AI176540
cctttgagcttgttttattgatattcgttagtgaatgaaatcttgtcaccggtctgatgcattacaacaggcttttaggtagtgtggctcaatgttgatcaccggtttgctaactacactatcacgacctttgaagtgccggttctcacactggtgtttccagtgcggacaggaggcccctttgaacatgtgacacggtccatccacgccaaggtggtcaccctcctttgccgtcctacctactgctttaaaaatacattcaaataaaagggtacgttacttggagtgactgcacacgtacacggcagccaggagagctgagaacatgatgaaccagctccgtctggagaataaatagtttgaaatagtgggactgaagtttgctgcttggggaccttctcgagcatccttggtggacataaggtgaccctcgctcgattcaaggacacatcttttgctgggggaggggttgttcgtgtgataatttctagtacacag

SEQ ID NO: 2214 - DNA, 678 bp, Rattus norvegicus
  Genbank Accession No. AI176546
atctcatctgtatttacctttttaaagcagaatgtgattgggcactgttattttcacattcacaagccttgctgagttacaagacctaggggaacttagggttttgttctcagtactttggaaaacaagccacttggggaattcctgtcaagttgttttagcttgtgtttacttctaagactagtacatgcagaattaactacagggaatgaaaaaaatttaagatgaaacttaagtcatcttaatttggtctactaaaggaatccagctcaacagctaaacacttcagaccacatagttaacagtaacagtaggttacattacgtcttacaacaaacgttctatcaacctcttgagtcaaacctatagtatcacagtatcacatgtagaaatttttaccttcccctagttttcatgccacacagatgttttaaatgttaacaaaaataaacaaaaatcatggaaaatatattatcagaaggaatgaaggtaagcatcaaacacatagttctggtgaagcctagtctacttcttccatgcgtgatgtgtcatcatctccttccaggggtggcatttcttcagttacagcagcactggtatcatccacagtaggatcatcctcatcaatacctagaccaagcttgatcatcctgtagatcctgttagcatcctcgtgcc

SEQ ID NO: 2215 - DNA, 642 bp, Rattus norvegicus
  Genbank Accession No. AI176548
tttttttttttttttttttggtttttattttcttttgtatttaatattttaaaaatagttcttactaaggaactcaaaaagtctgcagcattttttgatcattgaaaagtttggtttggggtggtgtggagagctactcaagcttcttgtgttcttcggtgtgagaaaggacctttcttctctgctgtatcatgtggaagtacaactgggggaaaagtggaatgtaggagatcatgaccagaatcaggaatgcatggtagtcaaaggagaagttgtatttgttaggtaggctgatggagtacaggccggcctgccggacatagggcagagctgcgtatattgtgagtaactctcccgtcactcccattgggtacagcacgatgaaaagtgtgtacctggcccacttgatgatgtaaggcaaatggtttaatagactgaatgtgtaaaaggagtaacggataatttccgtgattgtccaggcaatgacaaacagaagtacactgtcttcactctgcacctctttgacactatgggtcactgcccatattaggaaaactcttgacatcacctggaaagaagtcaggacaacagaagatggcacaatccctatagcacaatgtaaaatctccagtaaggctcctg

SEQ ID NO: 2216 - DNA, 590 bp, Rattus norvegicus
  Genbank Accession No. AI176590
aaagatttataaatgcatttattggaagcagttaaatgaacaatgttgagcacatgatgcacagaaaccagggctgggcaggaagcaaggatcttagaggcagagtattacatcacacagtctgatttacagaggggaagcgaattccacagcactcattctgaacacactttgaacttgaattctagtgttctccgtgcaaaagcaaaagactgtttcccccttgcattcaccaaacatgattagttaaaagcaagacactgcaggcggattctgaagcagccagtaaggagctgtaaacagttccttcagacagggtaaagccgcatgaaagaaaagagtgtcagtactgggtatctggaagcagaggagaaaatgtcagtgagcgagaggcttgtagaaggacagtcagctaggggtacctttgctatagaaaagagaactgttagctcttcactgcaagtttcagattttactcaattattaagcctccatgctctgtaatataaaaacaaacacaaacaaaaattacgtgatttctataccacaggaccaaagagggctttcagacactgcagggacctcgtgcc

SEQ ID NO: 2217 - DNA, 758 bp, Rattus norvegicus
  Genbank Accession No. AI176592
  misc_feature (1)..(758): n = a or c or g or t
attagaaaacaggttcggtttattgatccgtcataggcactgtacataaattatgtggtttgtgattacataatatttggcatctgttgcagaactataaaatcaagttcttcaataataaaaaaaacacccttcattattgaccagtataaatatatattatttttaaaaagtcactaaaaatggctcaatactttctctatcataaagtaaaattcaaaaggcaggagagagaaaaatataaattctgctaaaccagttttaaacactggcaattaatacacggttgcatgtgcaaacttctgcaacacttggcctttttaaaaaaaacaccaccagaaagtacggtgaaatctaagtattgggcaaagcgtgatcctcagctgacaccagacacttctggggtggacggggagaagtctcagaaagtttcctctgcccttacgtgatgtctcatcctcttagatggcccctgggaaccagcaatgaccctactttcttgttgaggggctttctcgggacagattctatttccccctcagtgtcacaagatctgtggctctctgttcttcctctcccccttatactttctggccaagtttccattaacactcattcacacataatagacatgcacgccaatacattttctgggtgacagacaaaaacattatcagcaagcttaaacctttaaaacatcatgagtcaagatatcacctcggtccatcagacttctggctgcantgtggggcaacctt

SEQ ID NO: 2218 - DNA, 632 bp, Rattus norvegicus
  Genbank Accession No. AI176595
tccagaatcagaattaagcattaagtgtccaatattataaagctgtttataacaggagttttaagtagtggtaacatttaacccatgtaaaaatgtcaacagaatttaaatcgtgacttggatcctgaacgattcaagtaccatggtctcactcagagacgggtttggtcagttttaagatgaactccttcggatgtagtgtccgtaagtccttattatcgctgtccatcaattcacgataggatagctggctgcggtggcaagtccgcagtggttgttccggtctttggctattttgatgtagccatccataccccattctttaccccagctgtttttgacaagccagtatttatccttatttgaatctgttccttcataaccatagccaaccaccagaaccccatggtcgaggtccttgctgctacagttgggttcatagtagatacctgaactatagaactggagagacggatggcttgcatccatggcaacagaaataggccccaccgtcgctacagccttcatgagggctttctcttgctgagggatatccacaaaccctgtgtcgttagccagtccacagtctccttgtgccgaattcttggcctcgagggccaaattccctatag

SEQ ID NO: 2219 - DNA, 667 bp, Rattus norvegicus
  Genbank Accession No. AI176616
ttttttttgactaactccagagttctttatttaattggaacatccgacggcaaccacattcacacacacaactgttacaaacagggagcacctctcagtgactgcggaatatgcttgcctctcctggtctcctagccagagtagcaaatctgaacttctattcaggtcaggactgctatggcctgtgtgtccctgcccaggacactcatgctcagcctcaagattggccacttctgccctagatcctagggaaaggtgaacatgagggagtcctggtagcactacaggagtctcccttctttctgtagtgtcctcccccacccccaccctggcccccatccagagctctagggtccatgaaattgattccctcacaaaatagtgctagggacctgcaggggctggtcatcagggttaccatacaagccatccattcattggacagtggggaaggcatatctgggggttatcctgggctatctccacctcatctgatagccaagaaggaagcaaacttaaggatggcagcccacccaccattcacaggtccctggtaagtgttggtcaccaaggtctccacacactctgggcccggcgagctgtggtcaggatgcctaaggatgtgggcaccaaatctggcccctcggcaggcacccggtttagttca

SEQ ID NO: 2220 - DNA, 592 bp, Rattus norvegicus
  Genbank Accession No. AI176638
gttaataaaaatgtttattatttttcattttatacagaacaacctgactttaacagttacccaggggtttacaatgtgttcctctcaacagtgtggtgctggagttgggttccacacaaacacaggcagggataaggagggggcacaacaggagtgtatcttaaccttttctcaagaaaaggcagtagagcattctgagtcactgaaaatctgtgcaaatgaggctgctaaaataaatgccgtgctatgagctcttacttaagggaagaacaaaagacacttataaataaaggaccatttccttgacacgggatgaatgcccccagccctaggtccatctaatactcaatgggaacggtgtgtaattgctgttcaaaaagaaaggctagaacccctgggaccagaccccaaagaggctggtcattcctgagcccttgttctgtgccagagcatattaagtaacaggagaaaccaaggtcagaagatagtggcttatgttccgtggaagtaaaagacctagttcacattaaggactgataaagtcttaatttatattttaacttcaaatgtattttcagtgcctcagatacag

SEQ ID NO: 2221 - DNA, 567 bp, Rattus norvegicus
  Genbank Accession No. AI176675
cactggagcctagaacactttattagaaacgaaatatatcacaggcaaataaaaatagttcttagctccattgatacaacataaggggttttacattcggcctagatacagggagaggcagattccctcgcctacagacctctggcttgcaagcatctcccaccacaagattactctgtatagtacatagcccttgtttagtagagggatccaaatattcgttttcaggcttacaaagtccgatacattcactctctctttccttcacaagtctaatagcaaaaactactttttccatgccccaaagccattatcagtagaagaaaactcaggcaaaacagagatggcagttaaggaatggacagagtattattggcacatgcccagctagtgacaaacaaatgcagtgcaccatgacttgaaaataagtcacattacaaggagaatgaaaacaactgtaccaactaagctagggagtgcgaagtggaaaggggattgattgagagttactggttttactggtacaacttaaaagcagtggagggcaagcacttaaatcctcgtgcc

SEQ ID NO: 2222 - DNA, 583 bp, Rattus norvegicus
  Genbank Accession No. AI176680
attttgcatttcatttatgatccagtttcacattctcacagggtcaccaattacaagagccacctccagacgtcattgtcggaagtagccagacatccaagctgaggttaaaggtgaagcagacatgctcgtcaactaaaacaaaattgcacaatttatccttcatctcattcttaaaccaacacccgacacaaaggctgacggctgaagaacggaaaccccttttcttcttcatgcttcaaactaaacattaaacttatctgacaggctgaacaaggtctcttcaataattaatggtaaacacatgaaaaaccctttatgatccataaatattttgttacacagggtacaaaaatacttttcacgttttggttggtttcgaagttcaggaagaatgaggggcagtggcagagtggggtacatgggggaggcaatcgcaaggaaggcttcttagacttgtcggcctggagaaggagacgatgcaggactctgattggacatggaactcagaggctgtggatctactgctggatgagaatggagtctgcatgtgtgtgcgtgcgtgcgtgtgcgtgtgcatctg

SEQ ID NO: 2223 - DNA, 628 bp, Rattus norvegicus
  Genbank Accession No. AI176718
aaaataaaaatatttcaagctgtatttaacaggttaatttaaaaaaagaaaaagataagacacacaaggcattgtgaacatggccgcctgtttaccgaatcacagagaaagaatgcatagataaccgaagtatcacaaagacctcaggtaaaacatcggcctcctctcacagacggatacaaacacacttccatacatacttttttggccatggcagaaaggatctgaacatattgtttaacataattttacaaaaaaaaaaatcaacctgcacttagaacacaaagctattcccaaaacagaaaatgtgcagtaaaagcatttcacttgcaaaaggctatcattcatcttaactgcatcttaaaattgcatatataaatcggtttgctctttaaagctagctcagtcttcttgatactgaaaacaaacagacatttcttaaaaaaaaaaaccaaaggggtttgggtgagaccgcctatagaaacgtggactcttcagagttttgaagctgcgtgctctaaaaccttctgctgtggagaagaaacagatcaaagtaagagaccacgaggacggattctaaacggtttttctctggcacagtaaggtttccggtatgcagaaagtctca

SEQ ID NO: 2224 - DNA, 601 bp, Rattus norvegicus
  Genbank Accession No. AI176734
ggcggcaccaacaggggctttattggtgggactcaaaactgtggctagccctggcatgcagactgtgagggcttggtacaggtgctgggaaagcagagctagaagcctccatgggaactgctgctcagggagctctgtctctgttcttataggcaggtgtgcaggcagagagttcagcacttcacaaactgatgggtgacttcaaagatccccacagactcctgagtcttctcatcatagtctgtccagtccttttcttgcagattgatgtcactgaagactgtccctgactccacaccttcagcagcaaacccagcctggggctggaagtcaactggttcaaggccccggcactcaaactctactattgtcttgaacttctcgttgtcttctgcattgtaagacttgatggtgctgctcagaatttcaatagagttctcccgtgcacacagcttgcacttctggaccatggaggcactgcctcggcctcctttcagcgccacactgtccatcagccggatatattgccacttctctgaaatctcaccacagttgccacatttcatcttgaggtaccaccggaagtcttcgcccactggcc

SEQ ID NO: 2225 - DNA, 479 bp, Rattus norvegicus
  Genbank Accession No. AI176739
tttttttttttttcaggtttttgctttttttatatttataaacaaaaccaacctcccccccaagtaactccccaaacaaacaaaaaaccagattaaataaaatttacagtgaacccagcaaacatctgtatgtgcaattaaatactgtgtctgttactgtggtggcacaaacctcaaacaaacaatatacaagtgttctggggttggatcaggggtcgggggagtcccaagttttaactctgtggggtttggggagacaaggtgggggaattgaacgaatggggaaatcaatttatttttcttaattctgtccatataaatatattcatgaagaccaaaagagggaagggcagttgggctggtgatgaagtgggagaaggggagggcatatccctcttaactctactcagccaaaaatttgaaacaaattaatttcatggtgggagaagagatttaaaaaatgatagaagatgggacct

SEQ ID NO: 2226 - DNA, 609 bp, Rattus norvegicus
  Genbank Accession No. AI176767
gccataacaaacaaacaacatgaggtttaatcaagcacaggagaaaaaacgatacattcaacagatgtggtatacagaagatgaggctgctgctggcttgttgttgaaacaccatgtgagtatactctcctatgaaaggtaagtaggaaaatgacttggaatattctgatctgtcttcataaaagggcaagtttgctcatagtccctgagagcaggcacttagtcttgaacatgacgctctcttcctaaattttctccacgactgaactgttttacaggaatattgatggagagcaaaagagcataatcaaaggcagcagtcaactctgaatggacctgctgtcctctggctgtaggccagcaagtagcactgccatcttctagcttaagaacaaagctcagcagtctacgggaaataggcacttacacaaaagtttttaaaacaggagtttttgacacttgaaggatttcattccaaactctcaattatataattacaaaaaaatccatgtttcacgaaaatatcctaaccctaacataaaattcagatcacttaccacaaagttagacaaatgtataaggaaacagaacagaaagcatatttacaaa

SEQ ID NO: 2227 - DNA, 556 bp, Rattus norvegicus
  Genbank Accession No. AI176781
agagaacagatccttcttattgtaacaatggctggataaggatgggcctctgagaaaagcagcacactcaatgcggaagaaaccaagtggatacatgggagatgctgtaaattaggtcaagagcaggctagggaggtcttggtagtagagggcttttccagggcccaagacagacccgtggctcagtgcccagcaacaaaatgagaaaaaggtaggtgtgtcagacatagacggtttgtataatgtccaactaaatgtagagtggcttcagaaatgcaccatgttaaatatttggatacaaacaacactatctgaaattcaagtggagcgtggtgtcttgttttgccaagggaaagaagttagtttccagaaaggatgaacattaagacctttgtgcttctgtaacagaagttaaagaaccatggaacattactttggtttcaacaggatggtgtttgttcaaggctgagagcctcaagtgagcaatttagcagagtctgtatacaaacagatttaccactggggcacagagacttccctcgtgccgcctcgtgcc

SEQ ID NO: 2228 - DNA, 571 bp, Rattus norvegicus
  Genbank Accession No. AI176792
ttattagaacattgcttgttacattaatattcttttttttacattaatattcttaaaaaatataaaatgattttaaacacttcttgagtgattatcaagcacttatatagacatgcctgtagtatctgaacccatttttaatctttacacaaatctatgagataataattactatgtatttttttgtttttaaatgctgggagcaatctagaaggatgtaaagaaaacggttttcaaagcaaagagcaaaggtggaggtaattggagaaggcatttatcacaagtaaaggcgggatggtgtaaagagagctttctagtgtttcccaacaagtacaattttctctcttctggcccttcacttttaaccacagcagactttataacccttaggcagaaatcaggtagctggtgggaaaaaccaccggtgcagtatactacccatttcaatttcatgagacactaaaaagaaacaatattggcatgtttcttcagtaggtattctaggtttctactatccagggttttgtttgtttttgagacaggctctttcttgttatgtagctgggattcg

SEQ ID NO: 2229 - DNA, 599 bp, Rattus norvegicus
  Genbank Accession No. AI176810
tttttttttttccaattacagaacatagctttatttatagaatcttacaaataaacatttacagttcacatgacataagttattttgttttctaattcttctaatgacacctgagttatttaaaaatatactgtgatggaactgtaaagggaactctgactaaaatcctttctttttgcaaaactcaccctgcttatctgcatgtctttggaagaagggttgctaaaactggatcctaggtggtccaggcagagagaagtcctttaaaacccagatgaaaggtactggagaatgctcccccagctgacactaaatactggagggcagccatggaggactgaaggtgaggtcagagatgaggtgcttagtgacagaacccaaggcctggctaagggctcctccatgtgacaagcgctttccttgctagtgttaacaggggacagaagctaagggcactaaggccagaggagaaatgtctgctaagcaactcactgcccctgagacctctaatatgtacagatgcttaaaacagcaagtccgacatttaaaagtcaaaaaaaggtcaatggctgcatttccgactcatgggcgaatctgtc

SEQ ID NO: 2230 - DNA, 434 bp, Rattus norvegicus
  Genbank Accession No. AI176820
tttgaaataaacttccattttattttaccaaatataatttatcagttaagtcgacatttgtcaattcagttatagtaactataaataattctcttaagacacagttctgtagcttttgagggatgtgaaagtaaaccaattttgtttcttccagtcaggccaaaagtacatgcgacaggtgcaacccggcgggaagaaatgaatcttctcctgaagtcactctcctgtcactccaggcccctctactcaacacacgctgagcctgggtgcgcctacctttctgttttctgggcaaaggaagaaggatgcttcagtctccaggcaacctgagatttgctgaatgagtgaatggttgatgcgtgtctgtgggcagaagccaagggaaagggcgtagggagccctggagtgatagaatgagtgtgttcagaagtgac

SEQ ID NO: 2231 - DNA, 445 bp, Rattus norvegicus
  Genbank Accession No. AI176828
aaagcgaacaaatccatttatcttcctttccatcccctggccagcagaggtgggggttaaacagttcattttaaaaaagacaacgactcataaaatgaaaacagaagaaagaatccagagctggagagctgaaatgtggccctggggagaatgtgtatgtttccagtcttgatgttgggggtcatcccagagtaaggaactgacaggcttgagactgaggtgctccaagcttcctgaggctctgaaagggggactgactacgctcacaccataagctggccactggacctagagttcccacctctgtgaccttgttgttgctactgctgggcacaatggaaaacagtcaagccccctgggtgaatcgccagcccaagcttgtcttaccagctccttccgaaacaactccttagcctcgtgccgaattcttggcctcgagggccaa

SEQ ID NO: 2232 - DNA, 574 bp, Rattus norvegicus
  Genbank Accession No. AI176836
ccagtctcctcggggcaacccgggtgtgggcccgctggcatccccgggcgctcccggtccccgggagacctggagaattatttatccgggaatatgccaagaaggcagtcagcaagggtggcaagggtggcgtggccgctgaggccctgaaggaccccgaggtgtgcacagacccctctcagctcaccacacacgccatgggggtcaacatctacaaggaaggccaggaggtggccctgaagccagactctgagtacccgacatggctgttccaggtggacctgggtccccccaaaaagctagaggacctagaaccggagtcccgagagtactggcgactgcttcgcaaacagaacatctggcgtcacaacaggctgagcaagaacaagaagctgtaatgtgagtgtgggcacttcctcccaggagccagcctggtgccagccagaacggggagaaccgagtccttcattcgctcaccgtgatgtgcaggccttacacacactaaataaacaaagatgaaaatgaagggcaaaataaagggacctgcggcagtcaaaaaaaaaaacctcgtgcc

SEQ ID NO: 2233 - DNA, 478 bp, Rattus norvegicus
  Genbank Accession No. AI176839
aaaaacatcaccaagtcagatttttatttctacagacagaaggccaaaagtttctatttcagtagcagtgtacaccaaaccactcctccccagccaaagctgactcttctttgcatcctgcatgcctttgaaccatgcccagccttgtgggggtggcagcaggactagactgctattctgtgttccaaggggtacctgaaagcaagaatagaccaacactggcatccgtgggttcctcaggccaacgcgctcccctctgagttcaccattcattcaaagcctggtcttggccgtcagcaaaccttgagacttaaggtgctcggcgatttctcatctccctggaggaccttctctccctccgacctccattctgtactgcttgatcagtccagccatctgcaaatgaatatcacagggaagagacctatcgtaaccacgagaacacctcacggagactcacctcgtgccgactggtgcc

SEQ ID NO: 2234 - DNA, 662 bp, Rattus norvegicus
  Genbank Accession No. AI176841
ggagttattaaatttttattaaatatactctgttggcacaaatcttcaaaatatataaacatatataaacaaagtatcttcatggcatcaaaatagaactccagactggacagtgaccatggagaagggcagccacagaggcagagagcccctaagccagagctactgggggtatatggggaagcaagaagatcagggacccatgacaccctagcgtctcctgcccagccggttgcctgatgcagggcttgagccatctacatggtgcaacctgttggggtggcccaggagcttccgtcacctccagcctcctggcatggggtgcccagcctctccatcccaatatggggccaggcagggaacagagtgggcagtacactcacaagagcacagtccctctagccaccagaggttgccaggatactgggggacatggtggggacgcccatcaccatacgaggaggcagagagatggccgagcatcacaagcacaaggtaagaaatacagaacgagctaggaccacagcaagaactgcacatgcctggaggtcaagccaccctgctcaggtcctgcatgtgagacggctgccgtctgtccatctggctgtgggaatcaacacccaggtcaccgcactgcacaggatagggggtttgtatgtgca

SEQ ID NO: 2235 - DNA, 719 bp, Rattus norvegicus
  Genbank Accession No. AI176858
atgtgagagacactttatttacaaaacaaggtgcatcaaaaactcagtgtctgagcagggcggtggtggtgcatgcctttaatcccagcacatgggaggcagaggcaagtggatctctgtgagtacaaggccagcctggtctacagagttccaggacagtcagagcaacaaacagtgatactctggcttgaaaaaaatcagtgtctgaagaagagctctgcattctaagggctaaattctccccctcaaactcacccaacccttgtcaagctagctgcacaatctcaagtcttcaaagatctctccttccccggctctagccaaagactctaagtgctcagggcagtgggacacaccaccacaagtcaccaagtgtaaagtggttcatctgaggagcctatgtaaaatctctcccaggatgccaactgtaaagcacattacaggtaagcaagggctgcctgccttggggacagttgtgcagatatgtcaccttcctggagaggagcaagcaacttctcaacactaccaaggatctcactagggcctcctttcctctcatctaacccaggatgcttagactgagacagtctacttcctcttttgttcctcaagcagagaacttacaaaacccactggaacgtgatggggatcgtcactgggagcatgggactctgagcaggaatttggcttctacctgagagtaggttacaggaggtggg

SEQ ID NO: 2236 - DNA, 514 bp, Rattus norvegicus
  Genbank Accession No. AI176863
ttttttaagtggaaggtggggcgggcacatttgtttcttgttttttttctgcacttgctggccatatgacaagggacagcaaacctaaagctaaaatcgaataaaacggagggagttgggaaagaatgccatctgtcaagaggggaggacaggtgaccatcaggaaggagactaagaaaatgtgcaaatattagttaaaaacaaggaatgctttcaattcactaatgtttcccgtttatgaattgccgtggtttaccaaatgtcagtgacaaggagggccccttgttgcagagagggtggagtcctcactccagaaggtgatgggggtcattggcatttttgtgtgtggccactcttctaccttgctatcgatcaagtcttcgtttccaaccctggcagccagcaccgagtgaaggctggcgtgtacggtacgctccctcaagttcccctctagtatggattccttaaatgtgaactggaggacttgggttgaagcccttacgaggagaaaaga

SEQ ID NO: 2237 - DNA, 557 bp, Rattus norvegicus
  Genbank Accession No. AI176883
acaataaaataaccatttaagcctctatccctgtacaacagagtatacatcaactcaacatgggtgtttccatacagttttgtttttttacagtttattcagagtacttgaattgctttagatatacagctttttgaaagaatattacatttatatcaggatatttagtacattgagatgtttaaaaatatttataaatttgcttttgatttgcaaaagcatttgacaatacttttacagcatttgaatttatagaaattaaaatttcatacagtactcatcttgatgtttaaaaaaaattcacagaaaaaatataaattacacagcctgactgcatgatactgctatttccagtttcaagttatggtaattaaaaccttcattaagtctgttaacaaatcattacctgtacagttatgaaggcaacttacatgatttgtaaacaaaaccttcaggttttatgttatttaccaaggagtgcagttcagcaagataagaaaacccagtttgcaaatttacagagtagtttacaaatttaccagttcctgtgacacaaa

SEQ ID NO: 2238 - DNA, 575 bp, Rattus norvegicus
  Genbank Accession No. AI176942
caaggtggatgaaacattttattggagctacagggactcagatgagggattactgatgggggcatgggtcgtgcaggcagtattaccattgcagaggtaatgtctcacacaatctacaacactggggttcctaagaggcttctctctgcctgggtgactttagagaggggccctcccctgggtctgctgatccttagtcatccctcaacatgaagatgcttcagttcagaccaaacagatacaggagactacacccactccagatcttatatctgtaatgcatccccttctatacctcttctaagtcttggagcaagtgatacatgtacacatctattttcatttacaattcaacatcaggctatatcacagatcactcgctgattctcagcaattggacaaggtctgagtctctggagtaactaccacccactgtgaaaggctccctttaccactgaggctggcacagcagtcatagggcataaaaacaaatgttttgaaggcaagaccacacactatacctgtttaataaaaaataaaacaatactagtagtagtctacttactatggcctat

SEQ ID NO: 2239 - DNA, 485 bp, Rattus norvegicus
  Genbank Accession No. AI176944
ggccgttcattgtatttgtgaatttgcagtgtagcactttttgctcattctaactcagccagtaagatgttctcatcttgggaagtaactatttttaccattaaagagttctatacaaaatttcaatccgaaacagttttccccccagtttctctcttccactgtcagcgttcccagacctcagagaaccaggcagaaatactgtttggaatgaaacttcaactgtgaagccaaatttcttgctgttaaccaggttaaaactattacgccctcctagacaacatacatactcaaaccaaacatttagatctgtttattttgttccaaaccccttgaggatttaaatgtcccaggtctcaagctctgaaattttgatcgttctcttagtttttaactgtggtgcctaagaggctgcttcctactctaaatattaatactgtgctgttttggccaaacaacattctctcggaaagcacacaagccca

SEQ ID NO: 2240 - DNA, 411 bp, Rattus norvegicus
  Genbank Accession No. AI176951
ctctttgccttttatttatttaataaacaaacaattccttcttgcttttctcacagacttctgcttacagagcttatttttaaattttcaaaacatcttcaatgagtcattatcaaaaataagtttcctcttgacttgttacaattctggttctttgtaggtaactgtgaatgtccctgtatgactagaggaaaggtcaatagacataaaaatggtttggggggaggggggagtgattcaggttaaatgtccgagcataaattttagtggctttcaagttaacaaaaggttgctcaaggaaacctttccccctctgcagtagatgagtttagagggtggctcaaggtgactctagagggtcctttcagggactgcagtctgatcatatcaaaccattagtcacaaggattg

SEQ ID NO: 2241 - DNA, 542 bp, Rattus norvegicus
  Genbank Accession No. AI176961
cacacccggcctgaatagtatattttctcagtagccaccagagggtgtcttcacttgagttcccaaggcaatctcttgagagttctgcaaaggttgtcactgccccaccccatcacagtaggtccatgttgtctatctctcaggagacctccgtcactagcgtcagtagctgttgctcacactgtaccgcaccgcctgggagtgaagcggggtgagcagcttggcctggatcccagggactctagtccataagtccttggagcagtgctgtcactccagaaccacagtgccacccactgcctccaaggctgccttgatcttctctgcctcagctttggcgacgttagctttgatttcctggggcagggactccaccagcttcttggcctgcacaaggtttatgccctgaacgtagttcttgatctccttgatcagcttcactttgtccacaggcttcgcttccgtcaggcgcaccgtgaagtgtgtctgctctttctgcttaaggaggtcttcttcctcggccgcctcaagggctggtgctg

SEQ ID NO: 2242 - DNA, 595 bp, Rattus norvegicus
  Genbank Accession No. AI176963
atttcttaactttttattgacattggcaaattaaaatagaataaattaacaagtattttttcaaaaaaatgttttgtacaaaaatactgtcaaaatttcctaaaaagctttcaacacagtagtatcttttcatgtactgaatataactattagcacagtgtcaaaaatgttgaagacagaaacaaaataaaaatctgtgaaatgtttgccactgacgacattccacaccctatttattgtctgtacatatgggggagggggagacagccaacttgaaagtgaacggtatgacttttcctgatccagaacggtttggcccacatctgttttaatcttccagtttagcatatttgaaaacttaagtctgtactcgaatgcatagtttaaaaaaaaaatgaagcgagacggcagtttgtgcagtaatatctgcccttcaaagttcatgcagccaagaaatgcaatttttcctttcactcataaatctgaatgcagtgcgcagtcatttgaaaccatctacaaaatccacaagattaagcagtttgccaagcttaatatctaacagttgagcacgggagaaagtgaggaaacaaggagt

SEQ ID NO: 2243 - DNA, 536 bp, Rattus norvegicus
  Genbank Accession No. AI176969
aaaaaaagtaagaataacaaaaacaaattttaacaaaagtcagggacagttttttcaagcaacaaaatcctggggtgaggaaagcttactctgaaggtgatcggaaactggtaacaatgtaataaaaatcgagaattgcatagcgctgcacgttcagcctttagcaaaacaaaaacagaagctatttggtattgatacaaatccatctatttgatagttagtcactcgttattatgtacatgttttatatactgaatgtcatttttaagtccccttgtccacactctttttctctgttggcaggttgttggtttgacaagcttgaacaaaaaggttttctggtgtttttgtttttcctccgaacgcactgcatcgatgttctctctctgagcagacgcggttctctgctacatgtcatccgttcatttaaaaaggaaacaatccacagtgcgatgtgtctgggatcaccacacccattgacacccaggctaaaccaggctggaccgatcggccccaggtgcaggctccttggccct

SEQ ID NO: 2244 - DNA, 550 bp, Rattus norvegicus
  Genbank Accession No. AI176970
gattttcaatgttatcttttattattttacaatatatttcaaaaactgccattatagttgccttcggttctctgagagtcctagaagaacacctagatagacacaaatatcagtccgaaattatcaactgacctggaccatcactaccaaaagggctatagtttttaaataaatgtgtgacaatgcaaaataaaataaaaacctgttaaacacagagtaaactttgctttaatggatatagaaaggaggtgatttgttttgttttcaacacatctggttctggcagcaaataataatataggttagcaatgtgccctgaaaatttctgctttctgcttgtacttatcacttgaatcagaggccagacatgcggaaaatgctctaaatcctttaacaccctccttccagaaagccacaacgttaatgaacataatggtctcacggcccatagtatgtacgattatttttccccagtaacaccggatggcttcaatgatctctaaaagagaaacaaagatgcaagggaaccttccagggtccaacttcactt

SEQ ID NO: 2245 - DNA, 610 bp, Rattus norvegicus
  Genbank Accession No. AI176993
atattaatcaatcatgtttatttaaagtattcttaacatcaaatctttaatgggaatttaaaaaaaaatcagtaaacaaccaattcgattttcctattctagccatataagccagctggactttgtaaggaaaatgttctgaagcgtcaccgtcaaggactacagaaaactgccacccacagataaactgccacagtaagtgactacagcgtggctctgtcactcataccagacaaccccaaataaatactttatgaaaagaattaaagtctatcaaaaccacttaaaatagaatcttaaatgcagaaatcttaattttccttcagttgggccagaaaccaccacagaccctacggtcagggttccagggagaatgaatggaatgtttaagctcaggccaaccaacacagccctcaacttttcaataaaatcatttactcaggtatactgtaaataagaactgtggcaacacaggaagcaaaaggcagttggcaagtgaaatttctacaagctcatgaaaacaataccatccaaacggcagatggaaaaggagagacagttagtgcctggtcatcttcagtcgttcggtcgtgcagggtgtcaatcactg

SEQ ID NO: 2246 - DNA, 595 bp, Rattus norvegicus
  Genbank Accession No. AI177029
cagctaaagagataaactcatgttacttataaatatataactttatatattatatgcatttacaatatatacagtatacaaatttttaaacgtactactaagaacaggtttggaaagagatgttttcaaaacaaaggattactacttgtcgaggtgggttcctgctttacctagaactcggcggtagacaacaccccaggcccattttattagaagccaaagggcacagaagaatgttggggcatggctccttctcatctcgaacaccctggctttctactagcgccagctagcacagacccatgctcatctcccgaggcctgggcacagtgcctggtgcatggctggtgctcaaactcttgaagggatgagcaaaatgagtgcttcaagtccccagctctaagagaccatctgtgcatcctgcaaagcagccacgtagctgaggctggatcaggagcggacgctttccagcttccacactgtgagcagagcagtctctattcccaagcaccaagggagtctcgttccaatggcacgccgtttcttcctcttgccttggaaactggggccgccgtttatcttccaaaagtttctt

SEQ ID NO: 2247 - DNA, 557 bp, Rattus norvegicus
  Genbank Accession No. AI177031
cagtcatgttatgagcttttattttaaaaagcacatttaatacatgtttagtttctcagatccacatttttcactttgtatgccacagaagtgtttgaatattattctttttacaaaacggaaccttacaaaaatactgacaatttaatgtttttatacagttctttttccctctagtcgcagttatttcattgtaaaacaatggctaccacagaactatgatatctttagttgagattaaaaaaaaaaaaaaccaaaccaaaaaaactcaaggctcctttaagcagctaaagtaaataacacaggtcaagacacagtttataatcatagggggtgtgactaacattgtttcaaaaataatatcttacatagttaacttttactgtttaatacattattaatataattttatatataaaatcatagctggctatatgttgaaatgaaaggacggagtctgggaggatatgcatgtggttgatccatatggttacatgtagccctttgaaagatttgaaaagcactttttcttctccttcttcttttccttggaggtt

SEQ ID NO: 2248 - DNA, 629 bp, Rattus norvegicus
  Genbank Accession No. AI177055
ttttttttttgcactgtggtatcctttatttaaaaattgtgagttaactacagccatagagttcttgttcaccatttagatggcataataaactgagagaacaataacacaatcccaagaaggcattaccctataaacacacgtatgaccacccatgcacacatacacacaacatacacacaaagattataatataaacaccaagtgatgaaaaaaacactttgaatgctctaaatcaaattaaaacccctttattataataaaccgtggcaatattgtgactataatgaaagatattgtaactgcttaagaagaaaaacaggggaatactggcaatttagcagcagcaaacagccaaggaagggtggaagctaagcagacgaagcagcatctctctctaatgttggcactgtgtaggactgcacggaagtagtttaagttcagtttttaaggaactattaaaacatcctttgaaatactaatttgctgcactttacaaacagtggaaaagaaaaaaaaagtatttggaatgttagacacgcacgcacacgcacacacagaggaaacatactaagatattggtttatggtctttgtttatgacctccaaaaagttttataaggaaaaat

SEQ ID NO: 2249 - DNA, 601 bp, Rattus norvegicus
  Genbank Accession No. AI177056
agagcgcttgtttattagagtgcacacaagggaaaagctactcaccatcttttaacacaaaggaccacattctgcgtcacacacacaagatggccgtttcgaggtgggctttcgactcaccaggttagctgagctacagctgcaacatgagaggtcacgggtgacctgtttaaaagccacttgcactaactatgttcaccatatgaagatggaacggagtaaaaatttactgttatgatactttgttagaaaagtatttgtaaagtttttttaaaccgagctgtttcacataagccctatttcttggctggactttgaaaggaggggccatttcaacctcgtttggtataccatttccaatctagacaaaccacaggttacacacgtcctgacctatattctggcatctgctggaatgtctacagtgggctgcaatggctccttcatgacaaatgtctgaaaatatcagagttcatttgttaactgttaaagggtatttgacctcaaaggttcttaaaagaatcctcagagcagcccccagtgcaaagcaaatatttccaatttctgtttgagaaatctttttgctggcacaaagaaaaaa

SEQ ID NO: 2250 - DNA, 404 bp, Rattus norvegicus
  Genbank Accession No. AI177091
acaatttacatatatatttatatacagtatataaatctctttcttcttggtcccacccctcccctgataacctacaagttgtcagtagcagatccaaaaacttaacaataaaagagagaataaacagcttttcttccctttcctgatcccactgcggtattagataactggtgtttacaaatggaaccagaaacagaacacacacataagagttattaaaagtgcaaacatggagggcaccacttatgttacatgggctgtggctgggccacgggcagcgctgaaggttaggtgtctgatggtcagtcctgtcttctcagactctccattggcctttcgatttttctgctctttagacgagacgtccaatgaatggatttgtgcctgctcgttttccctgaggg

SEQ ID NO: 2251 - DNA, 597 bp, Rattus norvegicus
  Genbank Accession No. AI177096
gcgtgtatatcaaagcagtttattgacctccagtagcacagctctgctttactcgagggtgtggcaagcgtacaaaatgcaaggttccaggtgatccataggcatggctatctgctgaccaatggaatgccctcattcacgaaagggcagccggtagcttacaaaggtcacttaggtgccctgggcccagccactgtgtacttaattatcaaggggtgtgtccaccttgccagctcctcactcatactgcaggagagagaagaatggcacaggtcccagcttctccctgcccttcagggaggtcagctccaccaggctcacacactccaccacctcagcccgcagctggctcagcagctcacaggctgcacacatggttcctccagtggccaggagatcatccacaatgaccactttctgccccggttctaaggcatctttctggatttccagctcagccttcccatactctagagaataggaggctgatacagtggggcctggtagcttcccgcgcttacggatgagcacacagcccacccccagctcctgagcaagggaagggccaaacaggaagcccctggagtccagacctgc

SEQ ID NO: 2252 - DNA, 560 bp, Rattus norvegicus
  Genbank Accession No. AI177105
gagtgaaaacttaaacgacttttatttctggtacaaatgataaatattttgtattaaaaatctggaattcaagttttccttgtacttcatgctccctccctgcctcaaaaccttgccaaagttcttcagcccagaggcaggaagaatcggtgcctgctgaagtatccaagttgggtctcagaaaaggcacacaaattgggtcttgggggcggcatccctgctccccgttgcccccagggtagaaagaaggcactgtaactggacacaagagctggggcatgagtccccagctgtccctctctggttcccttgctggtgaaaaggttcccttgctgcagggccacgcctccagaacaagttccacaaaagcagcctaggctggtacattttgattccacatatgtgggcacttcaggggaaaggagaggcaagggtaccagtctggagaactgctttaaccccctctgcctcaagatgggcgcagttaggcttcagggctgcctcagggttgcccacactgcaaccctctctcaattcatgcagatgaggccgtggcttca

SEQ ID NO: 2253 - DNA, 417 bp, Rattus norvegicus
  Genbank Accession No. AI177117
cgtctttgccaaatttttatgttactatatgttgttcttatttacctttttttctttttttgagacagggtctctgtactcctgacagtgctagaactcactatgtagacaagtactcacagtgatcttcttggctgtatcttctaagtgctgcaattaaaggcatgcaccatcttacctggcattattaggaatggttagatgttaaataagataactgtttttgttatagcttttccctgggatgggagagaaaaactcactggttaagagcactggttgcaatcccagaaaaacatacttggtatgcattcgttgataagtggatattagcccaaaagttcgaattacccaaaatgcaaacagaccacaggaagctcaagaaggatgacaaaaatgtggatgctcccactcctt

SEQ ID NO: 2254 - DNA, 313 bp, Rattus norvegicus
  Genbank Accession No. AI177120
tttttttttttgtatactatctaatgttcatgatatcaaagctagactgttaattttatttagtaaactttcctttttttcccctccactgaagaagtatgtatatttagtctagccaaactatttaaaatacctctttagctgggtgggttagcacatatgtttggtcccagcacttgggaggcagaggcaggtagatcatctctgtgagtttgaggccagcttggtctacagagtaaattccaggatggccagggctacacagagaaactgtcttaaaaaaaaaaaaaaaaaagtgagcggccctcgtgcc

SEQ ID NO: 2255 - DNA, 590 bp, Rattus norvegicus
  Genbank Accession No. AI177125
gcatcaatcgacctttaatgtccaaaagaggcgtggatgcagagcatagatgtggcagggtctcagtccctgcacagaaatgagagatgaacaaaaacgagacacttccacctggccagagtctgggagggcagggaggaacacagacctggacattcgtaagaaaaataaaacctaaatcaaacattcaatcttgtacccaataaaggtttgaacagggaactcagtcaccaccagttcccaccctcccctgccagcactgaagaaaaacaaaagttcaacacacactaagggcttaggaggaaggggcattctcctgccttcccccaacccccaagaatgggctggggaaaaaacggctatatttccccaccccttacagtgtcaaccctacacgagttctgaatgtgatccgtaagaatcagcagctcaattggcaaggacaacccccacccaccccaatcacttcaccaacagacaagatttcccttgcacttctctccggaatctcctcattcccagcccttttccacctcctcactcccagaggtcattacacacttcagacctgttccaaggagcccctcccc

SEQ ID NO: 2256 - DNA, 583 bp, Rattus norvegicus
  Genbank Accession No. AI177145
ttcaggtttgatttttaacaaatgtgtcagggagaaagcccacaggaaagggtaaagcccatgggggcaaggccttcccagatgcctgaggagggatcgtgtcccctccccccctcctcttcttgtcacccctatagaggggtttgggaagagacacaggcagggaagggggctggtccccagtctgtcagtggtgcttgggggtgaaggactatggagaacaggggaccagatgggtttgagtgggataaaggacacaagaccatttgccagaatccacagctttctgattccaaattgaattaaaaagaaaaagggagaggggaacctaaaccacaggcagtacccactccctttcccccatcagggctgcgagagaagaggcaggtagcttcaccaaggccatggctccctcatgcctggccaagggagctaggtgaagggcagggtctccccgacagtttgaaggggtgaggaaaaccaaaataaaacgtcaaataaattggataggagtccagccaagggcccagccagagctgggggaggggcctctgtaggctcatggatcactgctgccaccacc

SEQ ID NO: 2257 - DNA, 624 bp, Rattus norvegicus
  Genbank Accession No. AI177155
gggggtgaatggaagtactttatggaaaaacaatggagacaaacactgcaaccatctttgaaagagaccttgagagtatacgagggagcaaggaacaagcagtggatttagccttagggaccagggattgggaatacactcatcagtacttctaactattgtactgtgatcttataaaatgtatgtctgaagtcttactgtctttacaatttctgattttcttcaatttttaagaccttaaacaaagctttcactttagtattatctttctgataatgaacccaggagacagaagtagggggaggagagagaaagaccaaaacagtagactgtgagtctgcctgagaagtccaatgctattctgggagaaatgtctcctgttgttgtcacctccaatatcatagagggagtcaagtatgctgtcatctaaccagcaaggggcatgcagctcagaagaaactcacttagggatattggttctttagaacagagaggagaaagttactggtgagggcactggggagcttcacttgtccttccgcaggtggtggaaactctgcacagtcctttccacagcatcatccatggtgaccagtggccggtacccaatgagctttttggctt

SEQ ID NO: 2258 - DNA, 616 bp, Rattus norvegicus
  Genbank Accession No. AI177161
aagtcatgatattcctttattagtgctagctccttttaatttttatcagagctaaacaatttaatataaaaatgtcatttcttgttcatacagtatataaaaaagtatagtggtttggttagttttcaatagtttgcttttagccagatgtcatataagtctatgactgtaacaaatgagaacagtataaataagttctgtagtatttacacttacacagaaactagcccaaatggtgcccaagaaattaacttgagagttaaaatgaaactgattcaacattgagactttaatgctttgtaaagtttcatattatttctacactagctttggctataattctgcatagttacttataaagtgtttctgcatttcacatcacagtaggaagttttagccgtacaaaacaaacactagctcagaaaaggctccatcctcccgaacctagtttttctttgtatctggcttcttgctcttgggaacaaggaacacgttgccatctctggtctgctgcagagagtactcactgggagagtaaggtttcccatcctcatcacgtaacatgctgaagacttccagatacaaagtgctgagttttcttttcagaagatggagg

SEQ ID NO: 2259 - DNA, 630 bp, Rattus norvegicus
  Genbank Accession No. AI177166
ggtttagttatagtttatgaaaggcaaacaaaatacagaaatctgaagtctcatttcaggaaccaccacggagtttgctttttactttatgtaacggttattttacatacagcgttcaacttgtaattgtatcaattttgtcaaatgcaaaggacaaacacgactcatacaaatatattttaaataagccttagagtcagaatttaattgctaaatgattcatctattgaaaaagcactgtttcacattccaaataattttctcaaactaaaaagagtacaagtgtatcaaatctttgccaatatttttaaaaaccacgtccagttacaaattagtttaaaacttcttgaaaattaataatcaaatgactttcccccattatgtaactattattacttcaacaacctttgaagaaacactactcatgaattttggagagtaaaactacaaagcgagattgttgccagaacagacaatggactgtaagttagaaaatgcgcaaacggacatttattcaggaggtacaattactagagtccttatatatcaataatcattccacagtataatcacatgtactcttttaagtctataccaagtcatgctgatgctttccagtaagccataacc

SEQ ID NO: 2260 - DNA, 563 bp, Rattus norvegicus
  Genbank Accession No. AI177181
atacaaattactgtacagtcattttaataaagtgaatagtaagtcaaggtagaaaacacgaaactctgatgccttccttagagacacagcaaagggactgtccatggccccggttagtgacagagtgaacagagtctagaaacaggctaaggcattgtgaatgggctattgagaacggaagtgcccagtgctaaaccagggcctgagtgatcaccacccaatctgtttctgtgggaacagggccaaaaatctctaaggaacctggaaatgtacagaaacgtggttacactaaacctggtctagcagtgctgtcctgcagcttctcccaaccctactgaagtacccatgatgcactgcgacagaagctctttaaagcattaatcagcggtgtacacactaggcgagtgaacactctgcttccagacacgtgaactggatttccaagtacacacagggcagaaccccgagtgcacaggcagggccagctgcgtgggctctgtaacccgatgtgcccgagctcaattcccgtgtacttactggttgttggaaagacgacaaaccat

SEQ ID NO: 2261 - DNA, 542 bp, Rattus norvegicus
  Genbank Accession No. AI177189
gattctctctctctatattaataaaaagtgcaaagaatagaccttcatgtttaaattatattctaaaataaaatatatatatatttatattttcattaactgcaggagacaactgttaagggcctgagagttcagtcccctctcggtcactaggataaacgtacattttaaggaagcacctatgaaaaacggtagagttcacaacatgtggggacacagagcttctgggcattcttgaaagcagtttgtgtgcatttcagtcttacatgaaatgaagagcaaagtaaaattcagacaggaattacagtacatacagcgacagagcattctgggtcaccttctacttgccgggcctaagctgcagtgggagagccacactcctgtgtgtcaggaaaagctattggtgcaaggctcctgtggtgatcaatactgcataaccaagtgccctctgctcccagcatggctgtgggggggacatggctaagaatcccaggtggaattgcatttgctcttccttcccttaagtggctcttttctctggg

SEQ ID NO: 2262 - DNA, 455 bp, Rattus norvegicus
  Genbank Accession No. AI177256
tattttatggcttttattattaaaaaaaaaacaagcttgaatcaaatatgacagtgagtccacacttctaaatgttaggtactaaaaaaatctattatgttgtatagttttcgaattcccccattcactatccactatcaatatccactatgattatgaaatgtttatccaggatacaggttgataagaactgagaaagtcatttacaaattcataagtgaaaaacacatgcaaagcaaaactccgtcaagtaccacatggtagagaacctagagtcgcaaagagcaaaagctgttgttctccctcgtcgccgatttcccctttccagagtcaaatactgctgccagtttttaaggtttactttcaaaaatcccgaatgcatccgcgagcatgtgtgccaactctagaggcacaggatggactttgttcgcaatacagaatgcatacctcgtgcc

SEQ ID NO: 2263 - DNA, 306 bp, Rattus norvegicus
  Genbank Accession No. AI177280
cacagtagagacagcatttatgtcagagatggaggatgggagccaggcaggacctgcccatcagggccacaggggcgggtattcctgtccgtgatgtcaattggtcccagcggaggcgggattccctgtgagagctgtcaatcattgtgggatggtgagatttcctgtctgacataactgagccaacgacgtcacggggagcggtgggcgtggtctagggccgcagcaggtccttcctcagcgtctccgagttgacacgctcgtcatcagatacgcggtcccggatcccggggatgggggggagga

SEQ ID NO: 2264 - DNA, 537 bp, Rattus norvegicus
  Genbank Accession No. AI177341
aatcaaaggtttttattactacacagaggagtcaccgagatgctgtccctcatttcactcggtaacaatccattctaaataaagtactttaatgctggtcatacatttatataattatcttgacagagtaagaattagaaatacccaatacatttttgttagactgttgttttaaaattaacactggctttgacaaaagcagttggggcttaagggggacacgaaggtaaatagcagccggctcgtattaatactgctatttccctcccttatcacactccacagttcaatttatttatgctcctctctgggataccacgctctgtccagtaataaagcagtaaccttattgcacacacagttggggaagcctcaggagccagtcaggagctgggcagcggcacaagccctccatgtgtggtggcgagcagctagcatggagtgactcagtgcttggggttttgaagtgtgtactgcaaagagccagagaggccccagaagaaacttgggctgtgccaggtaagaaccctacagaat

SEQ ID NO: 2265 - DNA, 556 bp, Rattus norvegicus
  Genbank Accession No. AI177363
ggcggtgtcctcatggagtggtttattacgattccatctcacaaggcagtgtgggtgagcggccacagcacatgaaatccaagcccctgacagatgcctgccttgggcacatgcaaacagcgcacatggtcaagcgcaaacataggcgaccgaggcaacactggacatggaacacaggatgggggacaggctggggctcagttcaagttcaggcccagcaagcagcagggcaccaaatctgtatcttctaggccccatccctgcaaggccatggcctaggtggaggcagaggtcacaggtgcagctcatgggttctgatgtgctcgagctgctccaccagctgcatgaggttctcgaagtacacctcctcatcaatgctcagcttgctcgcgtgatacatgatgcggtagtgctccaccttgccttcacagctcacacacagtgtgtagtccccagggtagttggtgctttcccgcaccaggaacaggcctgtctctggtgggtagagaagccgctccgcctgctcccgtgtgatcttgccgtggaaccaaggcat

SEQ ID NO: 2266 - DNA, 618 bp, Rattus norvegicus
  Genbank Accession No. AI177366
gtattttaggccttttattttaataaataacttcagttaacagcactgtcaaaattaaaaggcacttaaaacaaggtggtgactagcttgagtcagggcgagcacagcagggaaggcacgtgcaggaggtgcacagtggtcgaattgctgctgaggggccctgcccaggccctacagtcctgcaagcagcaggacggcttacagtatttgtgaaaaaggcaaatgtacagccacagaaaagaaaaggttataatagagtctgacccccaaattgcaaacagacacattagagattagaggtgataaaggagcaccaggaattaaagaaaaacaaagcagaacaggcccctgctccacaatgctactaaagttatggccttatgtaaatagtgctaagtcagggactttttagcagagaagttcccagtacttttatccaagcttggatttataaagagaaagcgttgggagttacaggatcaagtaactcacaatggcacacaggttttaaagctaagttttcctttccacatctcagaatttttccaatggacttgtaaatcaactgtgtcaaatttattttaattggaaactgtcaacacacttgtcttccgcacg

SEQ ID NO: 2267 - DNA, 610 bp, Rattus norvegicus
  Genbank Accession No. AI177374
cataaaaataaacctttaatggctttatagttggcacagatggtataattcaagctcacatttgtatttaacaagctgaaataccacgctagctttgatggaaacagaacaagaatcacagtggcttaggtttggaaattaaatccagcagcagcgcgtcctgaagttgtttgttaaatgaagaatgagggctggagtaaacaagagaaaaagctgtcaggatataagcactggagctctgtggggattactgcagaattgtgctttctggcttattattatttttagatagctcagttagcctttgtctatccttgaactcctgatcttcttgcctgcaccccgcggatgccggagttatggacaagtgctcctgggcccagctgtttcctcacttctgaagctcttacggcatcgtgaacaaccagggcccgcaacattctggcttgtagatacagtgtgtactggggtagctgtaaatatgcctgggacacagccccagaagaggaaaagcaagtgaggccttgttgaaaccttgggctagaactggaagcttttgtctcccaatggggcagtctttgctaggaaccaggaaagaattatggtgggg

SEQ ID NO: 2268 - DNA, 501 bp, Rattus norvegicus
  Genbank Accession No. AI177377
acaaagatttttatttggttcacagacgaagccattcacttggtctgcttaaaaaagtagagacccaatgatttacatcttaaaatagtttccttgctccagttctacttaaagatagcacaggagcagatccgctctgcttgtcttgctggtttatagggggcaactcatcctcctgggttctggctgctgggtacagggctgagagtggggttaggtttggaaaaaacatggctgtgggtagcacgagttggcttttgttgggtttctttaactcagttcctcatgttgtggtgaccccgcccccaaccataaagttattttcatttccatctcacagttgattttgccactgttctgaattgagatagagtcttggcaaaggagttgcaacccacaacttgagaacgggtgccactcatgaactggtggtcctgggttctttaaggaagcaggctgagcaagccaataagcgggaccctccatggcctcggtgtcagc

SEQ ID NO: 2269 - DNA, 520 bp, Rattus norvegicus
  Genbank Accession No. AI177386
aggtcggacgaatctttctttaatacaaacttggtttatctacatacagggctgtcacccgctgcttctgcccaaaaaacaagcggggacgagtgctgacccactctcctacaaagagagacctcacttgctctagggggctgcgtgtcccccaagtgtcccgtagtcccgggggtcctccatgcggggcatggaggtcaggagaggacaaagaccctctctggtgcgccagggactggggcagtgaggccagccactgtgtcctggtggccatgtccctgcagcctggcccaggtgctcccagcacctcacccttcacatctgatatgtctgaagattgatttaaaaaaaaagtaaaaagggtaaaaagaaaacctacgtgagccattcacacggggacatgtgggaagaatgcacacagaagccatcaaagttgttgcacagagccgtcacacgacacacttactatgaaaaagttggcctcccacagaggcacaaacagtgatctcgtttgtttttc

SEQ ID NO: 2270 - DNA, 684 bp, Rattus norvegicus
  Genbank Accession No. AI177404
ttcaaaacaatttattgcatcatatttggtaccttatgtttgacaacaaaaaagaaattacatttgtaactgcaggaaaaagaagctggtctgttattgaaaagaaaaatcttgggccctttaaaaattacaaagtcttgggcttgcctgaaacaactgagcaagaaatatattcttagaaatgaagggcttcaagtattacaaacctgtgacactgtggaaaagttccagaggtatctaaactgcagcactttttctgcatatcgtgaacaaggcctgctgaggtttttagctattagtctcttgatcagaatggtagtcaggagttctgctctttaacttcaagccatggtagagtttccttttttcactctcaggtgaaaaagtcatgcttgctaattagttggtgccacatcacagtgcatttggttcttgcattacagttttaacaagtttggccaaaacaatgctaaagctttgcattgttattttagttcttcaagttttagttaaattgagattgttccaactggttccttcggttaaaaactgtggtacaagaacaccaaactgatcatgtacagtgaattttggaaacacaacacacgtactgaacaccttctaggtttcatttaatctgcttggtagctatgtgtccaagttatctacaacgtcaagcatctg

SEQ ID NO: 2271 - DNA, 454 bp, Rattus norvegicus
  Genbank Accession No. AI177482
ggacgtggaaaccaggtatttaatattttcattaaattgtttcaatacaattcccaacaaatgccaactgcaagacaatgtccaaaaactctgaagaagcaagctcccagacaaggaacaaggccatcatcttccactctagccacaatacttctctccatactcgtgccagtcagccagcctcatccagattatcgagtatttaccacatcatcaattttcagaatgctccgcacagtttcagttgctagggtcaacgcactgactgacaccaacagaggctggacaaccatttcctccagaatgttggagatcccaccctttcggacattaatgcctgtagttttttctccttgggcatggcggtttcttagctctgttacagtagagatgggattcaggccagcattttcagccagtgtagatggaatgacttccatggcatctgcaaaaa

SEQ ID NO: 2272 - DNA, 595 bp, Rattus norvegicus
  Genbank Accession No. AI177501
aaaatatggcataatggattaaacagctccacgtggtgttttgaaattcatcccaaccgtaggctgagtgacctggaggttggagagactgccaaagtcctgcaaaagaacagacacccgtgagtggatacttctcacccccaggaacttttcaacacacacacaccgactgatgacacaccctctaaatgtaattctcttcatccagcctccaggcttcttcagacagatgtccctagcaggacactggatggactggcctacacacagctaaaccccataacccacgcctgccccccatctccaaggacccaacactcttgccactactaccaaccaaagcctaaaagcctgcaagcattttcttagctcaggcaagctacaaaaacagtaccagtcacaatgcacagaggggcttagaggttgtgcccctaaaacactccccagcctcagtcaacatctgagggaaacaaacgtacaagacaccaaggagtggaggatcaggctggtccccaagcacacctagcacctgggagcccactgtgccctgaagctagctaaatggtttcagaaggcttgtgttgatacagcttta

SEQ ID NO: 2273 - DNA, 529 bp, Rattus norvegicus
  Genbank Accession No. AI177590
gtgtctttattctgatgtttatttgtgaacatcatagccttgcctttaggtcaccaggagcctccaagctctctatgctgtcagcatgtgtgctgtagtgtgtctgtgtgagtgactgctcatgggatagatggctgggttgtgtgctccctgctagtccccacctctctgtagggaaagctatcgtaaagtagccctctctgcctccagccttcactgctcctgggaagaactttgcagtgagtgagtgtactccttgcttcctggtttccgtgcagtggtaaggtaagcaatgagtgaccggagttccttgtcaaactgcagaccacctagcctgttgaaggtggatttcagaaccactttttccagttcaacagcaacaaggctggtcatgaggccagttaggctgtcatagatgaccggggacaggctggccttgaactctgccatctgctgttctaggctgatgatgaactgctgtacccaggggtcatttggcctcatagtcgttgaattctttcttcttgat

SEQ ID NO: 2274 - DNA, 525 bp, Rattus norvegicus
  Genbank Accession No. AI177645
aataaaatatttatttattaaaaaaaacctgaaacacgcaaaaagaaagtccagcttcaaaccaggatttcctgttccttatccatatttggcattcatcatgtgcttagagactacatataggtcaagggtgtgagcttgtgccaatagggcaagaggaggggcttcgtgtggctcagggcccatcgtccctaggctgggtggtggtagcatctaccccagtgagggccctggcctacctgaggacaagtgagggtgcccagcagggtgcatgctgggagagttcaggtgggcgtggccatgggagagtccctggagggtgtgggtagagcaggggctgtctttagaaggcctcatgccctccagtaagctgtaggaacagatcctcgtccagctcctcccctcgggcccgctctcgagtggacaggaaaatgtagcccccgatgtactcgtgcacgatgcggcagcttgcagacacacagctgaaggccacattgatatgttcatcgaactcaatggccacct

SEQ ID NO: 2275 - DNA, 369 bp, Rattus norvegicus
  Genbank Accession No. AI177742
gtggggtgaggctttatttaaatcactgtggggaagcctggacagagggtgcaggcgggcaggaaggaatggtagtgctgcccccaggcctactgagggaaaactgaggctgccccagctgaggcctgaccccagaggacaacagggttgtgggagagagacaactgggtctggaggaacagggcccctccctctgggctgtaccccatgccccctttcagggtctcagtctttcctgcttgttggggtgtgcgacccttaatccttgctcccccaacccataggaggtgtttcggccagggagggcagtggacagggagcctgggggagttggggagcacaggttggggtccaggtttgcagggggac

SEQ ID NO: 2276 - DNA, 454 bp, Rattus norvegicus
  Genbank Accession No. AI177748
gtggtagtctttattattattttagctattgataacatagcatggcagcaagattacatgagtaatgtaatataacacaatcttttaaattgaagccttacaccttactatgcttaagggtatttggagctcccaactgtgatgcctctcctgtctctcccaatagaaaaatattgcactacatcaaaggtatattttacaaacataatcagcagcactgttgagctttccatgattgtggttccacggagataaataccttaaagcatgagtagattctcagaacgaaagctttgcattacttctatagctctttcaaacgcatcagtgcaggagcatgcttgggcaccactaaaacttccatggcgtgatccgtgaacacaccagccacttacagccgtgcgccttcagggtagcaatgcctcgtgccgaattcttggcctcgagggccaaa

SEQ ID NO: 2277 - DNA, 590 bp, Rattus norvegicus
  Genbank Accession No. AI177755
acagtttaatatccaatttaatttttaaaaaacttaatgaaaatataacagaatcaaaacatttaaaataagtacactcactacccactccagcagttcatttaagtcataccaactatagaatatgaaaaataaattcagaagtgtaattactttaaaatacactgcttccacttttaatattttacatttatgtatatattctatagtggaagcagaaattctctctaaaaacattatcttcttaaaatcttgaggtgcatattagagccacaggcaatatccgacatataaaatcgcagaacaggccttcgggatttggcatcactggtacaatacaatgaccaggctacagaactgtacaatgcctaaacatcgcggaagaaccatgattctcttcagtggacaatgattactgcatattctacaagggcagtgatgttagtaattctgttgggtatatgtcctgacataatttccaaatgtacaacaacacaaacaactctgttaaggccatgttttatttgctgattaatggacaaaaggcaatgtaatttatttcaagtattttcttgaaagtctgtgctcat

SEQ ID NO: 2278 - DNA, 429 bp, Rattus norvegicus
  Genbank Accession No. AI177790
taaaaagacaaatcccataaaacaccatatttcccaccagatccaatcaggggcaaacatatatcctgatttatttcccgcccgtgtacctccccactacctgtgaacgagcacacccagtgtggtgtgtcaaacaaagttgtttaggggagcaggccacatggcttgttgtctcccaccaacagcagcctccagcctttcaggaacgtggcccacaatagaggtatttttgtttagtgggtctcttaggcaccgtaattgaaacttaaaatagtatagcattgtctctcacatcctttcctcgagttgtatcccgagtcgaatccctggctctgcgatgggtacctgtttacactgggatctaacagccatcagcctaacagtacccaggcaggaattattatctacttaagtcactaatgagcaaga

SEQ ID NO: 2279 - DNA, 480 bp, Rattus norvegicus
  Genbank Accession No. AI177797
tttcccttatggtcaataacgtctctgcattgaattgtaaagcaaagtaagataaaatcccccaaatgacaaggtatcagaaatccagatttagttacaatttatttgtgaaaatgttcagctttttttttttttttcttaatattggtctgtaaaagaaccatcatctggatcaagaatgaattctataaatcaaagaatattctacaccttggaaaaggaagtcagcagtaacattctcacggagcgttgtaaattacggtttcttcataaaaggtacatactgttctgtactttcccaccaaagcagtggtgtggtgtgtaaaaagttctcctgtggcaggaaacctctctctcactttactaaacaactggataaagttttcaagtctgtataaagttgcctataagctggaaaatgaacaggttcaatctccatttatattttagtgcatcttttgacaattgtcacatttgtaa

SEQ ID NO: 2280 - DNA, 630 bp, Rattus norvegicus
  Genbank Accession No. AI177871
aatgaaaataagctttattacatcaagtaataaatacaaagatgcaacgtttcagtcgttttcttccagatgttgtgatcggctcacagtaaacacggaactgagatctagtctcaggacggacatttgcagggtgcttggtaggttgggtggattgctctttcttctgtatttataacctgtgcattttaaagattgacttcaaagcactcagtcatgcaaacgcttaagcagagaagctccgtgaagcagggtctacactgtacacaggcaggccagctactaagcaaacgtgctgtggtctgcactcaactcctcagaggcaggtgagctcatggaaaggaagtcaactggggtgatgcaaatggaaaatgtatccaaagggaggttaaaggggacactggtatttggggacaaacaatagcttgctgtgaagtggcttgacaaacatctttcaaatgcttgaaaagaaaaaagagctgggtcattcctaactacttaaaatgcacatcgtcagttactgcaaaatgtcttcccaatcttttgagtgtgggttcagagcttaatgactgtggtagaaaaattactgccattttgaacaaagcctctcatctccatggggtagagatg

SEQ ID NO: 2281 - DNA, 421 bp, Rattus norvegicus
  Genbank Accession No. AI177875
aggtgttttctcaactttattatggggatagaggaaataaaccagcagatttctggttttaatgcagaaatgattggtcctgtgtatggtatgcaagggttacatgttcttcaagcctaaacatacacaacacttccaggtgagactccctggtgcctaaaaagggtttctagtccatggctgcttgtgggtcaacgtcttgcaggcttgggcattatgtagactttcacaggcttactgaaggggatggtgccctcgatgctggtttccacctgtggtgacatctcactaccctccagccatggagattttggaattcgtgcaccagagttgtaggccagcaacagcctcacttccacttggcatggttctgtccaggcagtgtgggagagatacacctgcgtgaggagacggtgccgcc

SEQ ID NO: 2282 - DNA, 443 bp, Rattus norvegicus
  Genbank Accession No. AI177898
  misc_feature (1)..(443): n = a or c or g or t
tttttttttctttatatttgtgttaaacagctttaatctcggtcattgcggcttctcggcacagtaagaaatattgcacatgatcaacatgttttgttctgggaatggggacaatggtaggggaatcaccttcttagaaagtacaacccaagttgggagggcagagggtgggaagaatcctccccatgcctgtggcaaagtgcaggagcccccccaccccaaactaacctgagtccagcccctctggggaaaaaggggggtgcatgaactccccactactccacaggcatcttctccctgtggcccaaggctcatactaccctccagcttgcagccctcacaggagccattctgcataaagtacaagtgaaaagctctgaaggtcacacacttcangttatatatacaagagctcagtggacggtatctgcccctgctgccct

SEQ ID NO: 2283 - DNA, 402 bp, Rattus norvegicus
  Genbank Accession No. AI177902
gccaagtgagccctggtttattgaccacattttacactccaggaaacatgtggaaactgaacacagagttttgctggaacatggtgtaagcagaatttgggcaggggccaaccttggaggagtcttatgtgggtcttccaagaaaagttaccatttttttccaaaaaaaaaaaaaaagaatcccacagtagggagaggtttaaagttctgcaccaattacgggttgaaagctgttgttcgtaggggccaaccagggccttagttggcctaccagtgaaggcctgagggtggggtcttctcgtccttattgctttccaaggagaagggtgggatccgaacattaaagtgggagccatcaggtctttcaaaacgaaatgtgccccacatgtgcccactggaagc

SEQ ID NO: 2284 - DNA, 558 bp, Rattus norvegicus
  Genbank Accession No. AI178025
aaagaaaatactttattacatcatgaaaaaggtatccaacaactagattcatacttgcttgaatctataaaaaaaaacaaacaaacaaaaaactgaaagtttattcattagactgtatgtggggtcatgttccacatgggaacagagaggcacaagggcttctaagtattgcacagtcttgaaaaaaaaaaaaaggagttgggaggagaagatcacatgatactgggaacgtctcacattatgagaaactaccaagaaacattcgaaaagaaaaccctctgtttctacagtagctttagtctgcagttcttggaatgactattccattgaagacatcttagtaacaggaagcttcgtttgagcaatcccatgtgcaaatattaataggaaaatatataaaataatgcatctcttgccatcacccccggcaattcaggaccgtattttggagaactgttttgtttgacactcggttaagctgtgagtttggcctgaagctccatctctgctgcctgcttgagcgcaacgtccaccaggagctgaaatccactaaaatcc

SEQ ID NO: 2285 - DNA, 566 bp, Rattus norvegicus
  Genbank Accession No. AI178027
ggctcctgccatcttttttattggtctgggctgtgggctgggggaggcaggtgggctcacatctttatgcaagcagcaaggagacggttcacatgctcaggagactccaggaaggccttgagcttgggtcgggctttgagacgcgctacataggcggagagcagggggaagtctttcaagtaaccagggaacaggagctctaggttcagaagtaaatccagtaggcggtagtcggcgaaggagatctggtcaccaacaatgaagcattggccacccttgttctgggccagaagagtttcaaatggcttcaggtgtcctggaagctccttcctatattggcccttgtcctccttacagatatggagatagtgccatgcaatgcgcctgaacacgtcttccagtccgtcgttcaccatgtccaccagtgctgcctcttgctggtctttgccgtagagcccgaaggagtggcccaggtgccgtaggatggcattcgattggtacagagtgagctttccatcctggaacttggggatctgcccaaacagacaggaagccttgaatgtgcc

SEQ ID NO: 2286 - DNA, 523 bp, Rattus norvegicus
  Genbank Accession No. AI178052
atgcttacaaaaatattttaatgagcatatcagaatggcagaaggaaatgggagaaaggacatattttacagtgcaaaattattatgcagaaatttaaaaacatctaattcataattttgaatgcctacttaaattacttcaaataccttttaaagctcaagagatctgtgttgaactgagttacagattgtgaaccttagtgagaatacatcataaatacatcatcattgtatgttccagatgaaaatgacagtgcttggctaggacctaataactaccaacagagccatttctatctgagtcagcatatcaggctggcctcaactcaccaggtaatgaggatggccttgaacttctgattctcctgcctccacctcccaagtgcttaggatgacaggcatgcaccactatacccagttcctgtggtactggggatggaacccattttgcatgcatgttgggtaagcattccaacaactgagctacatccctactcatgaatgcttattttctcatctcagt

SEQ ID NO: 2287 - DNA, 419 bp, Rattus norvegicus
  Genbank Accession No. AI178104
aagttctgaactgtgcccatttattacttcttcaggggacttgggagatttggaaaagatcagggtaacagttgccagcactcctctctcctgaagcagaaaccgcaggacatcatagccttggggaaagaatcctgtgatcatactctcctactatccaggttgctcatcccagctgtgctggctcatctgtcttcatgagcccgacttgggcaggaactgttacctccaggagctctgcctcatggggggaacctcaggactcaggctggacactaggatgtggctctgggggactccctggaggagctcttctctagttggaggaggaaggtcctgtgtgctagttctatccagctgtgggggcggtggcaacgcagcccctgtctgctggatgaactgttgcaggttgcattgcc

SEQ ID NO: 2288 - DNA, 580 bp, Rattus norvegicus
  Genbank Accession No. AI178151
ccttggaagaaacatttatttataatctttattgaacagtttcaacgactccagaacaggcttcacagtttgagtgtggtgcagagacactaactcatgcgggaatagctactgtccagcgtgtccctgacgtatgtgagtgtgaggatgctcaggcacaaggcagtgcgagacacatctgctcagaaaccagctggaaaacatgatttaaactctacagtaaggtttattacaacgaaagtgttcttaacaacttctaatttcaaaacaaagtaccccaggaatcaactatccttttaaataaaaaaaataatttatactcttcttaaaggaattccaacaacataaaggaagttccaactccatgtatgtatctatgcatgtatatacacacgtatgtatatgtacatataacttagatattctggcactctatgcttctgctcatgcagcagtgacgctggcgaggctctacagaggcctctcggagaacgccgtgtagcttctcactctggcgaagaacaagggggtgtacatcttgtcaatatcaaaagcactcactgcagtctcacctcgtgcc

SEQ ID NO: 2289 - DNA, 419 bp, Rattus norvegicus
  Genbank Accession No. AI178179
aataggattttttattaacatataatatatttaataaaaaataatatccactctggctctctcttccattgcaaggggaagagaaatagggaggggctggaaatgcccacccttccctggacaacccctctctccaagattcccctctacaccttgctttccaacaggctctgacctccagaccgacgatttccaaagtttcaagtgcttttgggccctcccttgaactccccgagcccaccagacgttcaacattcaggggccacctggccaagccccttccctttcctcagttttaggatccttcattcatattagaaaaaggatctgggggcagagagtagcctccattggccagggggaagggatgaaaagacagtgaccggaaagggccatgaagaaggatttcaataagggcc

SEQ ID NO: 2290 - DNA, 560 bp, Rattus norvegicus
  Genbank Accession No. AI178189
gtgatttaatgagaagtccgggcttctccagaagcctctgctagccgctctgaagtccctcccaactagtggacagtaagtaacgcagctggggcgagcatcgtggcctctgggctgctgctggactctgtgctgttaggcaaggagcagtcgggctcttgtttccccttaggagggacgtacccgctgaggcgcgaggccaagctgcgtctctcccgaggtggtctaactttgagcttcatcctcttattgtcaggatcgtgcacgacactgtgcctcatgagactttgtttcattgcaaacgtcttgccacagccagcgtgctcacacacaaatgggcgcttttcctcgtggaaggagagaatgtggctctgcaggttgaacacggtggtgtaggtccttgcacagccttcccgcgggcagcggtacacatccctctccggagcgtgagtcttcatgtgctgcttaaggtgatctttgcgcttgaacatcttctggcacactgtgcaggtcacctcctctttatgggcttctctcgtgtgcttcagaagcctcgtgcc

SEQ ID NO: 2291 - DNA, 619 bp, Rattus norvegicus
  Genbank Accession No. AI178208
aggacagatcacagttttatttttaatgacataagcaagaacaatctcacattcatactaaaaatctcagctacactaacagaaacgcagtctgtggtggaagccccagcctccctgtccctgtccagcgtgagcacggacagatgtgctcacacaccgaggctattccaggacacctcttccggcaccctggatacaggcctgctgtggagctgaggtaattagctcagactgaattggagggaggcccttccttacctgaggcacaggtagaggcttcgtgttcagacccccacccatccccatcctcacaggcatttgggacttgaggtccagctcttcttcagttccatacaacccagcctaacccctgccataaaacattcaatcccactcacaaggaaaggggaccagttacagctacatcacactgtttataaaataagagttacacttacacgacatgtctagaaggagctctgccccctcaggagagctgctggggacagctatgagcccttcctttacacaagcataactatacagctaattcctactattccatagcatttatacttaaccaccttagtgaacccaagcttgaaggaatttaaaaggc

SEQ ID NO: 2292 - DNA, 599 bp, Rattus norvegicus
  Genbank Accession No. AI178214
atcaactaacaacttcggtttttaataacagaaacaattttgccattccagacacaatttcaggggagaaaaaaaatctgccctataaaaataaaacttaaactcataaatatagctctgaactttagatctaaaacgcccctcggcagccgccttcgcctcacgccgttcctgtaccatcgtcacgttccgaagagaaatcaggatggcagcaaagcttcgctccctaaggatctgaaccaggggtttcttcttagatctttgcctctggagcctttttcttccttcaggctttaaacctgctgctgtagtgaccagtgtttgggagagaacatcagtcttcaggagccacgagctgacagagtgccatccagtgacctttccgagacacaaggtgtggggcacacgccatggagcgaggttcggatgaggacagaggagggtgctgcttcatacagtctacttcaagtaaaaaaaaaaaaaattcacagatacccatcagctgctactttatgggctaacagtgtcttaatcggagaaacgaatgctttgcagacgctaagcacgcttggaggagtaattaggggaccaggtggctg

SEQ ID NO: 2293 - DNA, 468 bp, Rattus norvegicus
  Genbank Accession No. AI178219
gaagagggcatctgatcccattacagatggttgtgagccaccatgtggttgctgttcccaggacctctggaagagcagtcagtgctcttaaccactgagccatctctccagcccttccatcaacttcttatatatttctaaacacacttctgccattttatactgtgtctatggaaataggcagtcactacttagccagaattttaattctttatgtaaaataaccatgtccatctcagcatgcagagtcagcattcagtaagtggtaaaattctatatataccaaggaattattttaaaagatttccttatgatttattattagtaaatgctggatttctatactcatttacatacctgtatatctgaggatgtgtaaaactttctcaggtgaagtgtggccatggagactgtgtgaacagccctgccccacagaaggagctcatgaagagaaatcaccctcgtgcc

SEQ ID NO: 2294 - DNA, 660 bp, Rattus norvegicus
  Genbank Accession No. AI178231
catttggaaattttatttattaaaatatcaatgatgaattgttccgtttctgttcagaacacactaatacaagctgttcctaatacattttctcatttcttatgatcaatgcttttagggccttgtttaacaagaacaaaatactttctaatagaggaaattaagaggtattatagaagagttgtagaaaacatgaataaatcagaggtaaatattgtgatttttcaagcaaagaaactgatataacaagtcacctacaaagcaacacaatgacttgttacttagtgccatcgagtccaaggttcctgttgtttcttagaccagagtctcctaaccagacagcacacatccaacactctaacgtgactacaaccacgagacaagctctcacgttgtagttcaggcttgtctcaaactcactgtgcagctcaaactggtttcaaacccatgatcctctgcttctgcctcaacatctcaggtgcaggctatcagacgagcttgactaataaaaggaaacagttctgtcaccacagttactgctaacaatatgcaagcagttaagtttcccacatagatgataggcacatgccaactccaacatactaaatcagaaaaggcaggcatgggcagacagtgattggtaagagaactgttacttcc

SEQ ID NO: 2295 - DNA, 572 bp, Rattus norvegicus
  Genbank Accession No. AI178239
ccttgcaaaaacccttggcttattcaagggccagtggaaatttattttttcatccttttccatcttctcccaagtggcttttccttgcaaaatgcctgacatgacaccagaggggaacctgggaaaagaggctccctcccagaggggcagcccagggacttaaatacacactggaggggaggacaggttgtagggcgagactggcaagagacagcacaaaggacatggcttcttaggtaaagaccaaaggctttctacaggaagctgtgccaaagggtggggccaggattctgagttgggaggggggaagagccccacaaccccaaattgcacccacattccccagagaagtaggtttggccctgtcaggctctgaggaatggaggaagaacaagccagatgtgctgcctgggaaaagggaggtggtgctggcagagtgagggttaaggctggtgcccggcctttggcaaggtgggccttccgcctccgctttcctcagggacaaaggggctcggtgggcaggcagcactcgggcctggctctggcagggcagggggaggcaggagcaggct

SEQ ID NO: 2296 - DNA, 522 bp, Rattus norvegicus
  Genbank Accession No. AI178246
aactgttcgtaagtaatttatttttaaattataagatttacaatgccttgattatgcaaaatatcataatagaaattaaactaaatcaataaaccaagagaaagaaaactttttccttaaatatcagtatttaagccatccttgtcccaacctcatcttataaagtatgctaatttcaaaggtttcacttgcaggtttaattgtcattttcagcgttttatggaactgtaatcttttccattgctatcatagctagcgtttatgctgcaacagcagcagaatctcacaagtgcgatcaaatgtgggaatcctccatattcctccaaggacacaggaatgactccagggacccgaaccaggagagctgaatcttcatgctcccaggatcagcatggctcaccagccactcgggcagctggcacactcctgtagcatccttgttggagatccagaagggtcttgttgtggctgaaaacattccatgaatgtaaacttcttgtgctccctcttcagcctcgtgcc

SEQ ID NO: 2297 - DNA, 430 bp, Rattus norvegicus
  Genbank Accession No. AI178259
caagtctttatatatttatttatttatttatttatttattttatttattaagatttatttgttatgtatacagcgttccacctgcatgtatgcgtgcaggccagaagagggcaccagatctcattatagatggttgtgagccaccatgtggttgctgggaattgaactcatgacctctggaagagcagacagtgctcttaacctctgagccatttctccattttttttaaagacttatttatttattatatatgagtgcattgtagctgtcttcagacacaccagatgaaagcatcagatctcattacagatggttgtgagccaccatgtggttgctggggtttgaacttgggacctctggaagagcagtcagtgttcttaaccactgagccatctctccagtccaactcaagtctttatgcttgcatgg

SEQ ID NO: 2298 - DNA, 532 bp, Rattus norvegicus
  Genbank Accession No. AI178272
ctgagcagtaggtacctgtgatctttaattaactctaaatagataacgtatctctataattataatatagaaatgataatgaacaaaaaatagatactcggggagtgaggcagggatttttctaaaatattgctgtgagcaaagtacgctcaaggttttcagcatgagcagtcgcgcagccagggagcttggtcagcacttggggactgaggtaaatatccggaggccgtgcatgcccttgatctcttctttcagtgcctgattgaccatctggtgctgctggaccatcctcttcgctttaaattcttctgactcgattttaatttcatacatcgccccgcagcctcctgagatgtctgtgacttggatagccgtggctcgaggaaacttttctttgagaacctgggtcactttgagctccccctccgtctgggaggcgaacatccgatgtgcacagtgccacagagggagcccgcggctcccgcggagcaaaggcatagcggccacggggccccatgccgcccctcgtgcc

SEQ ID NO: 2299 - DNA, 530 bp, Rattus norvegicus
  Genbank Accession No. AI178278
ggctatagagtctttattgcaaataaaatctgaggtacgagaagctgaccagaagctgggagtgtggtagtccctgctgatcccttccaggtcaccaggccgggcccacctgtgcactgaggtagctccagtccaagctcccacaagtacaaactgagggcgccccttttccaggcagaccccagctcagacaggatggtggcaaagagacaagaagaagcccaaactttagggaggtgcaaccccagtgggctacacaaacccaacaaatactcttgcctctcaacaaaggcgcaccttcctgcccagccgccaggggctttggagtggtccacagaggcaggcctgaagctgtcactgctgctccaggcagtcttcggtcactccctgggcagcaagctcagccagcacgttctgcaggtagttggggtctggatagccgtggcctgtcacgtttcggtccatctcagtcttgtggtggatctcgttccacactacggcctcgtgccgaattcttggcctcgagggcc

SEQ ID NO: 2300 - DNA, 600 bp, Rattus norvegicus
  Genbank Accession No. AI178283
gattcttaaaatttttcctaaattaatgattttattgattatcacttatcaggtatagaaaaggcttaaacatgtgcaacatgtgttctacttgatgagctgtttccttctgtgcaggagtcataagtaactgacactctgaaggccaagcgaagcttgcacttccaggactcaccctgcccgtccagggcacctctccccagtgtggtacatacagaagcacacggctcttccacaagctggcctactgccgctgcgcaaggagccagagagcacatttcactttattaaacattaacgcacaaatggatgtgccctgtaaaagggggctgaaggataccacaggagcagaaagggacacctacagacagaaccacacagcagagaccaacttcacagaaagggctcaatattgatttccagagaggaacagggcatggtcagctcaaatttggtaataacatcgggatgaaggacgcctagcttcccgatactttgacccccgacaaagatctcggcacaccgtccagggaagaatgcagaacctgcggaggctttgatacgtagcccccactttcctcaccgggaggcacatcgagc

SEQ ID NO: 2301 - DNA, 366 bp, Rattus norvegicus
  Genbank Accession No. AI178503
acccaaatgataattttcaaaacaagaaaatttgacaatcaaaaaaaaaaaagttcatggcttctaagtgactttttttgttgttttaattcttttttaaatcaaaacgttgatgtactaagataaattaaagcgatactaccacagacaaaaatttgacaatagtcaattattatacaattgttcaaatgaaaggaaaagaagtcaaaggattggaaggtgattctgtctaatctacggtggactgatttctacaagtgttcaaagggtttgtgtagtgcaactgtctgtacttttggtgcatttaaaaaggctagggtgagaagaaactgtcctgcacagcgctggaggaagagaacgcagccc

SEQ ID NO: 2302 - DNA, 616 bp, Rattus norvegicus
  Genbank Accession No. AI178504
cactgcaaagttacaaatttattggtctggaaataaatacaaacatctcattaagaaactgtcctggaaagacataatacaatgatttcttgtcagcattcagtcactctagcctggatccctgatctttctacacaaggtcagtggaaggctccatagtaggagttggcaggtaaactgattccttttctctcatgccacctacatggtgtgactacattcctctagcaactccaagatcctgggactcaccaagccttgagggctgactcccaacagtcaagtgtctctgatctgatcacatttcctataggaaaattccaaggttagccacagtaagaatcgaaagacagtagtatagggcatgggcattaggctggcattgcttagagaggccaatgctgcaaacccagtcagcaggaggggcaggaaagggaagcaagttcccacggaatgtacagaatccaaaaaccagtcattcccccagcagtacacatggttctctctgaagaaccagcaaggggccaggtgagagacattcagttatcaagtttaaagtcaatgctacatatcaataatgggagacaaggtgtgactcattctcacaagattcccc

SEQ ID NO: 2303 - DNA, 586 bp, Rattus norvegicus
  Genbank Accession No. AI178507
acaataataaaacttttaatgcacagtcaaccaaaagatgcatataagcatgatggaatctttgctcacaggcagcaaagagggttagaatttaacttcaaacaaaagttcgggttgtgcatttaaaaatcacaaaccattggagttgaagggaacaaaagaaaggaaaaacaacaatggaagtgtcagtgaccataacaatgtgatgggataattaaagaaaggattcaagtattgtaaagttcttcagacatgtcttggaggtttgtgcatttcccatctttgcatagtaaaaaaaaaagaaagaaaggaaggaagaaagaaaggaagaaagaaagaaagagaaataagaaaaggaaaaaaagaaaacacatcacttggcaaaactccagcactctatgtgactcctgttgaaacatgcacctatggtactgctcacttagctggtagaagtaggtctaattcagtgggttcatgcactatcccgggtgagcaatgaggtcagcgcacacctcctcgtcagtgtcgcagtaaaagtagagcaggtgaagtgggaacttgggcatcacttgacactctcgttggg

SEQ ID NO: 2304 - DNA, 552 bp, Rattus norvegicus
  Genbank Accession No. AI178527
aaagcattagtatctttattatggcataatgcagtactttatacagtaattcattttaatgtaaaaacattttatgtacaatttcagagaaacaactatatagacagctggaacataaaaacaggtaattcaaaagtccagagttacttgataaactggaaaatattttctctgtagaaaatagtaaaaatgataacatttcccactaagcccatttaagccaaataagagctgaattatacataaatattggatagattgtgtgacccaaaagaaacttctcttgctttatttgaaaagccatattttatttaaattgtgtcaattgaaattctttccttctttcccttcactgtttggttttccgcagatcattttttctatagggtaacccattaattcaaaattcaaaaggttttagttttaggctgtcctcttggaagtagagccagcatgtccttctaccatcttgaaatggcgaattcttacccaatagtgaaatgtttcattaaatcatgcccatatttattacaagccagagagtcgtcaaca

SEQ ID NO: 2305 - DNA, 591 bp, Rattus norvegicus
  Genbank Accession No. AI178556
  misc_feature (1)..(591): n = a or c or g or t
gacatctgcagtatttaatttgtttgggtaatagttacagataaacaggtacacaccatatacaatgaccaatactttttatacagttcatatttcagtacatcaacactatcttatttacactctatgtacattaatgtcttcctaaagtcagtgcattgtcaacaagttttatacagaaatttacaaggtaaatgtagttaatagttaatttaataaattttctgctagttcttgaattaaaaaattaattacaaccaatataacaaacacagatcaaacaacattagtagattgtgctacctgctcaactaaaacatctgtaaggaaattattgaaaatctactttttcatgggacttgtctaggtaggaatggagatttcatacactgaaaaccttgaatctatgaaatatgtatcactcctttaggccactccttccttttaagtgtactcactcttctggaaaggggggnggggtcaacccaggcagttgtttaagacaactctttcaactgtgctgaggactgggtagttactagcctcagccgtcacaacttcaacactaactgcactggcatttactaccat

SEQ ID NO: 2306 - DNA, 635 bp, Rattus norvegicus
  Genbank Accession No. AI178602
aactttttatagctttattgattattacccaaatttcaatatatttcaaataattaaatactgcgaagggacattaaaaatacaaactaatttaccaaaataattgtattctgagtattatgtacaatataatacattttacattacatatggggcttttatacataaagatgagatatgatttatggttactggaaatccaaacaaaatttgaacagaacatttctatgcatacaaacacaattgctcagctgtgaaaatcaaaaccatacataagtgtggttattaaaaactaaaactacattcacctgataataacagaaaatgaaattgcttttattattttgaaagtaccacacacagattaactgtggcccatttcgatgtgttaacaatatcgacgatctaaactaaaatatgtgctcatttcggggaaaagtttccaatttgcgttttcttgtaaaggatggatattattattatttatagccattagaatgccttgttcataggccaaggcaggtcaattctgggtaaatagtaaagccactaagggtggggtgcctatcatagtgctatagatattttaccatatactcttaaaaataatcatattaaactgtagctttgcatgc

SEQ ID NO: 2307 - DNA, 423 bp, Rattus norvegicus
  Genbank Accession No. AI178605
ggcggtgtcctcatggagtggtttattacgattccatctcacaaggcagtgtgggtgagcggccacagcacatgaaatccaagcccctgacagatgcctgccttgggcacatgcaaacagcgcacatggtcaagcgcaaacataggcgaccgaggcaacactggacatggaacacaggatgggggacaggctggggtgatgggtccctagagagaggctgattcctccccacccccaggggcaggacaggaaaaataagattcgtacttcttgtaaaatgcccatttgctgggtactttctttctccttatgttgaaaaataataaaaaataaacacacggaaaaaaatctcaaaaaaggaaaggaataaaactctaagaaggcgaatgatggggccgagagaaggccgaccacaggagcact

SEQ ID NO: 2308 - DNA, 501 bp, Rattus norvegicus
  Genbank Accession No. AI178635
aaaggagtgaatgttttattctttagtgtttaatagaatacataacaagtcacacaatcaatgattcatttcttcacacacagcagggaaaccggcagagtgtttccatgacacaactggttgtgagtagaaggaacggaacagcatttggatggatgaagacaatttcaaaagtgtgagcacctctgaaaagatttcacccatgtgtttttgtttccttgctgatatggaggggcttttattcttgggtctatgtttcactagaaaagtgggatattaggatatttttccacgtccccttagatttctaagaaagagctcaaagatatgtatcacctagcaagtgacgtttttcaacatgtcggaatccaaataattactacaaagagcaagttttcaaatacccagaaaatttaatttacatgttcaaaatgtatgcccgtgatggatgtttcaatcctgtgtcatcaaatggatactaaactggtcgtaatgaaagac

SEQ ID NO: 2309 - DNA, 604 bp, Rattus norvegicus
  Genbank Accession No. AI178652
  misc_feature (1)..(604): n = a or c or g or t
cacgggtgggcacatgtttattgaccagacacgtgtgaactaaaaaagtttaaaaatcagcaagggaatcaactcccttccctacaagcagacagaatgtcctcttctgcatccagaggctcttgaggttccagttaggatcagagatccctgtcgccctcgtgctgacccctctgttggggcatcgacctcttgaggcagccacctcaccaggaacacctgggatccagcccaggctgctgggttgaggtatgtggcaaaggattggatgcaggataagtagtccaaggtccaggctgtgaaggctgataggcttgctgagggttcacgggattaaactgagatacccagccagaatgctgctgtgtctgtcgagctgcaccactaggagttgtgatgtaaggcctaatgtagatagaattcccctgtgggctgttgagtacaggtggaggcacaccatgtatgtgcaaagacgtaggggtgcttcggccagtctgtatgtttggggctaaagttaccataataggattaaacctggngagttgttgagaagaggtttgatgtccctttgctgcctaggtgaaatccagatgtggtgttgaat

SEQ ID NO: 2310 - DNA, 559 bp, Rattus norvegicus
  Genbank Accession No. AI178699
agaggaaaggggaaagagcgagtttaaaaaaactacctttatttatttctttttcagttacatacttttaaacagggctgtgtttcagtattcagacattcaggcaatgttgatttcattagtgttgactgaaaagaagcataaaaatgcaaaacatcgttggcttaacctgaacatacctgcattacctattactgaccagtctgtgccaaagacttattctctggcactaaaatggagcacttaaaaatattgctaaaaagcaaatgtctacacactggcctttgcagcaaataagggtattcatactttaaaatatttaagtccataattggattaatatacacaccttcttatgtataaggagttcagatcatataaacactgtacagtccaaaaaaccctactgagaataaaactaaataggtttatgataagaaatacagatatcgcatgtatttacaaatatcatagacacacaaatttggtcaaatactgtaaagaagtggtttcacattataaatggccagaatatccatctaccttgctcaaagcaaac

SEQ ID NO: 2311 - DNA, 487 bp, Rattus norvegicus
  Genbank Accession No. AI178734
caagtgaagtaaattcaatttttattcttctttacaatacatggatatgtggataaatttttcttttaagagcttgcaaccctgaggcaatgctgtgggcacataatggataaagcaacagtgaatggaatctgaatgtggtaaggacatggacttggaaaacataattgaacatcgtgaaattgcagtctatgctttctctggtctcttaacccagctatctctcagccatctcgcacactagacatcctgactctacgtacacttttgtcatatataatggcttccttctgactgaaatgtaataagttaacaggatttgtatctaaggggtctttatctggggtgtgtattgccagaagtgtgcccaattttggaccacataaaaactttggccccaaaggaagctggctgccatctggctgtggtaaccgtgaggtttccgagggtcccctgggagcccccacaggataatttttcatccggg

SEQ ID NO: 2312 - DNA, 587 bp, Rattus norvegicus
  Genbank Accession No. AI178736
ggccatttcataatttcattcttttttacagttatctcaaaatgtaagaattagatctgattgaaatgctacatttagtaagaaaatcagcaaggaagtgtaaccccaacatgacattatttgccaatcagaccagtggaggtcctccgggttagggcaggagactgactggatagaccattagaggaaggagccatgcctgagaaccagagccagcccagagtccaccctggtcacggtcagctgagggagctgttttagagtatctatgaccatgaacacagtacaatttgaatatcccaaaaaaacattattgcaggagccatggcagggcaggcaaaagcccacccagtcccaagggaaacaggccaccactacagaaggggaccacaagttgatgatgttcaaggcaagtcaacatcagggtcttgggtccatctcattggaaaagggccttcgtgttcgtgttgggacggagcatgtgatgctctgacgcaatgccgtggctgaagctccagcacagcttacaagtcaggaagtagtttgtgcagatttccttacacgtttcaattattagtgacccctat

SEQ ID NO: 2313 - DNA, 658 bp, Rattus norvegicus
  Genbank Accession No. AI178752
gatgattaaatatatttataagattaaactctgtgtctgtgtatgacaatctgacacgttcgagggactgacgtccatccacagactgcctggggcatttgagaacaaggctcacccttttattgactgcacatgcctgtcagggaggagctacaggctgctatgacccatcaccaaagaggatttggggctgtgaccatacccgtaagtggtaccttctggcgggtaccatgtgtggcttgcctggctgtcctggaacacagcagtccacacacttcaggtcctaggcaaccaagtgaagtctttccccttaggcggctggtccagtggggacaactcagcttcccgtaggccctgcagggagtcgccagggtgctttggagtgacagggctgcactgccccaatccagggcacacctactctggggcttgtcccttcccactggagtcattggtgggtggcaggtgtctcttggcctgccagctgctggcccccagctctggccccggtttcatctcagggcgaaactgtagacgtgatagatctcatctggcaggttctcctggcgctcctcagccaggaggctgaggcctgcactgcggatgatccggcggaccacctcgaggtcacggcacacactgctgtccacatcgtcca

SEQ ID NO: 2314 - DNA, 708 bp, Rattus norvegicus
  Genbank Accession No. AI178763
attgtgggaataccaccttatttattcagggtacgatactttgatagggcttgaaagcgttcaacatagaaggaatgcaagattaatattgaaaattcaaatgcgtaagagtttccctcttaaccatttcacatgtgtttaaaaaaagtgtcaaaactgatggctggcataacttcaaaagggagctctttttctactgaaaatgacatccagctcgcacgatcgaaggtcctgcaggagacatggcgcgtctggttttcctctaggctcctgggtcatcagcttccccaagttacaactgagttgctctttccaggctttttgaagcatccttaagtttccccaccaaatcctgtaactgctccatgctgcaactaaaactaatctctgggtaggattgggaatcagcgttctctacgtttaaggtcactaaatatccaggtcgacacatcttatgaagttggttggtctttatctgatattccaatcgccaggaaacatcagttatatgagggagagctctacctatacttcccagtaggatttctagagaattcttattattctgatactccgtgcaaaacagttctattcgctctcggtcaaatttacagtcttctaaataagtgcttaaagtagacttgtcaactcggtgctttcctgcctccagtatgtaagttgcagctgccccatgacaatgctttaaaa

SEQ ID NO: 2315 - DNA, 656 bp, Rattus norvegicus
  Genbank Accession No. AI178764
gagtcagactgagtgtttaatgaggacttgtggagctcgggaggctacaaagaacaaggactacccggtactcagctcacaatggggcggccaggttaaccccctcccaagagaacactgcttgaagaggataaaaataatccacacacaagagcaagccagcaagctaacagtcccatgcagcactaaggacagagttgaaaacaagaagtaggaaggggagcatgctgggatgccagaaaaacagaagggaggagttaggatgaccaggatacatcctttagtgtacaaaaccatcaaagagtaaacaaacaacattctagtaagataaatcacctaaccagccccctggagtggccctaacaaaggaagtaaaggagcactacaatcccaacctgaaaatacccaagaagaaactttattgttacaatgttgcacccctcacagtcatggactgaagaacagtctacatgagaaataaaggtgatcctgtgtattccttaagtgattcctgacacagattggaaacagtctcaagtgagtggtatagactcaacttctccggctttcttcaacacatgattgagaatgaatggctgctcaaatcttagttcactgtgagccttgtatcttaaaagtgggcccatgtccactga

SEQ ID NO: 2316 - DNA, 655 bp, Rattus norvegicus
  Genbank Accession No. AI178778
tcacttagtaaaagtactttattttcttcttgtatttgctttatatctcacttacaaagttatgaagtttacagcttttataccaaaatgtaagaaggctgtttagaaatatctttgcagtcaaatgtcatctgacatttcttctaatccacatttaacattgaaaaaccaaggttctgggtatccacctcccctaacagcctttccttctccactctgcccccactgggctactcctgggctgggctgggccatgtctttggggttagaggagataagtggtagatttagtttactcaagatttcatactatttgcatatgggaccaagcgagacccaccacagcttcctcctttcctacctatcaggccaactccctcaaatccaaggttctcaatgataggacatggatgaaaccaccacaagtatggcaagtagtctttagaataattctagaactctccttgaagcaacaggaacaaatttgctaagtaagcatttgcgaatttaagcaaacctacttcctgttcaaaccccactttacaatgaatttcaaaatcctcctcaatgaattatcttccataaaattatctcccatatcattctttaagtgtgcacctacactcagcaactcagccacatgccccctcgtgcc

SEQ ID NO: 2317 - DNA, 687 bp, Rattus norvegicus
  Genbank Accession No. AI178784
  misc_feature (1)..(687): n = a or c or g or t
ccagtttttatgaaaattaataacattaatacctcacagacatatacatacacacatccctatatacatagtcattaagttattaattagtctctgtataaaacgtttctacattagtgttccgagctaggcccagtcagtccttggcatattcacagtagcagccctagggcttggcccatgggcgggcagtgaggagtttacagaacggccagcccagcagtgagcacagatgtcctgggctgctcaccctccagtccttggtccctgtcttgacataggaagaacagctgctcagtgcaagggcaaaaagatcccatgccctaatgctacctggtgccccaggtcctttgtgcggtggcttcaggcaacccggcaagtcctagagaatgctggccagctctgtggagtctgtatccgagcagcctgagctgctggcttcatctcgtaaagcctgcagagctttcttgttctgtcgccgcttctcctcatcaatggggtacagcttgaagagcagcaggcccagcaggatgaggatgataggagccatggtcaccagcatcttcagtgtaaacttgacctcttctggctgggagcacccctgcgtctggtacttagcanagtcgagactgagggtagagacacccagtgagactccagaggcaaacttggtgaagaagacataga

SEQ ID NO: 2318 - DNA, 457 bp, Rattus norvegicus
  Genbank Accession No. AI178785
aatcagcaagaggatttggtttattgtcgggatacacaggcacaggcacctgcgggcgcttcagtcactcgggggactggcgcaccccacggaaccaaggatgggcttttttataggattttggggagcagaagcaagcatacagaagcagatgcatggttacagggatatcattggtggattctaatgtttcctagctaccttcctgaaacataacggctgactcggcccccaaagggttcagcccgggggcaagtttcctagctaccttcttgaaacataacggaggactcggccccccaagagtttagcccgggggcaagtttcctagctaccttcttgaaacataacaactgactcggccccccaagggttcagcccgggggcaagtttcttagctaccttcttggaacataacgactgactcggccccccaccagggtgtgggcctcgtgcc

SEQ ID NO: 2319 - DNA, 700 bp, Rattus norvegicus
  Genbank Accession No. AI178793
tattttattagagatcttatattacatattcccaaaaagttataaaaatcttccaagagaaaaatatcaaaacctgttgatttcaatgagcaaaataatcagaatgaaagtaaacattttcttctagacaaaggactgtgaaaacatttcagcacaagtacagcaaaagacacacgaaggtgatcacaatgtctcagaacaccatacagccttttgtttaaatcgatgattttagaatgctgatatttgaaccatgggcctccaaattaaaatttcaggaagtggggagagggtagtgagacaatcgtggtccactgaacgcctgtgaaaacagatgtgacaggcctaaccaaacagacccctgatgtcatgtctgaagtgtggctggctgtccacgagtgtccacagacactcaattgtttagttagttcgtgaccataatccaaagcaaaacacaccctctcttcatttccctgatgttggtaatgtgaaagtaactttaaaaagcagaaacttgctggttaaatagaatttctgcttcacctgtgagtaagtagctggtggcaaggacacagggtaggtccgctgtgtctgctgttttcctttttcatttctgtcagcctctggtttcctttggcttcatcaggacttctgtggtgattaagcagagccacttaaccacagagcacagtgaacatcc

SEQ ID NO: 2320 - DNA, 603 bp, Rattus norvegicus
  Genbank Accession No. AI178828
cagagagtaaacggtgtcatcatatcaacttggaaacagttcagacagggcccggctgtgggcctagggtaaatgtggcttttatttcctctcagggaaagaagtaaagggtggctttcccaggtaccccaacctaaggtaaggtgggtgtgctccagaggttggggctagaattgccagatcattccgacagactcctctgtgtccactcgctggcgcttgatgcagggagggtgtaggtgagagtcattcccctggagtagcagctcagtatcaacagaggcacaaggaggtatgtgctggtattcacaaaatggaaggcagagcaggtgccctgagtgaggagcaggactgggtggccgatccacacccagtgtctgccgggtacaaggcctgactgctgtggctctcctcccaagggccccaggggcccagaagcatcactgcgtcctatggctggtcccttaaatgtccatctcaaactgtgactcttcaccacctgcccgcttatcttccgggctgctgtgcagatggctctggctggcctgcatgggaggctcatcgctggtagggctagtgacccctggaatggttggcaagtcc

SEQ ID NO: 2321 - DNA, 340 bp, Rattus norvegicus
  Genbank Accession No. AI178872
cacttgtatgaagttcaaccttatacaattttaaggtggtatgtttggtagtgtatctagaatctttaaaaagttgagtttttggaatgtacagtatatgaggtaaaatcaagattacattaagaattgttttctcctctgcactaacattgcaatgaggctcaaatggcaagtacactattaaatgacatttactatcaaaaataggagttcatttgaattactatgaataacataagccactgtgtggcacatttcaccattttagacattcaactctatagaaatctctgggctctgacactcataactcatttgtactgccaaatgtggcacttaa

SEQ ID NO: 2322 - DNA, 633 bp, Rattus norvegicus
  Genbank Accession No. AI178944
tgtgtttttttttattttttttcttttttctttttctttttttggagacaggatctcactatgtagcccctaggtggcctgaaacttgctgggtagaccaggctagccttgaacttaaagaaattcacctgcctctgcctctggagtgctgggataaaaagtatgcaccaccatgcttggcagtcctggaatgcctaccccctggccaccatgacataggtagaaaagcagactgaatcgttcctcgctggcaggtgagggtctcacagatgaactgaaccagtagatgttctgcaccttctgtgctacaggaagagaactcagagctgcttccaaggctctgacgctgtgtgcagggctagaggccaatggtataggagcgaccagtagggttgtgaatagaagaacagactggcgctgtcaccgcccactcgtaccacaccttcttagaattgctgcatcgccagaaacgcacacagatgttctggccttcatgcaccgtgatgggctgcttgatggggaagaagatggggaaccatgagaacatgccaggagagtgggtctctgggcggatactcagagtgatgtcccggtaaagcacagtttcaaagtagcctgcaaagccatgaagca

SEQ ID NO: 2323 - DNA, 539 bp, Rattus norvegicus
  Genbank Accession No. AI178971
tttttttttttcctacttttgctttattcaaagacaggtgcaagggagtgaagaagggcctggtcagaaggcaagaccgacaggaagtggcttaacggtacttggaagtcaacacagtgctcacagaggcaaagaatttgtccagagaggcgtgcatggcgggtgtgaaatccccagggtggtggctagccaaggtcaccagcaggcagtggctcaggaacttgaagttgacaggatccacacgcagtttgtgggcatgcaggtcgctcagagtggacagggcaccaggcaggtcatcgaggtggcttgcagcattggtcagggcatcagcaaccttcttgccgtgagccttgacctggtcggagccctcacttgtattaaagtgagggaagtaggtcttggaggaggggaagacaatgaacaacctccctatggtctctgcgccaatttcagcagcatggttaccaatcttcacccaggctttcttgatgttgtttttgtcttcttcagagagcaccatgattgcttcccctcgtgcc

SEQ ID NO: 2324 - DNA, 585 bp, Rattus norvegicus
  Genbank Accession No. AI179075
tttttttttttattgagcctggtatttctaaataattacattttattttatgaaaagaattcattacagctctgaatgcactgagagggaaaaaagcattacaaaagtctagttcaacaatgggagcagaacttcaaaaggtggacactcaacactcattcttaaagacaactcggcacctcaagactttgagataagtgtcaatcttatggatgtcacttttaaagcagcggcacagattataaatggcaaaaagatgagtgtcttcatcagatgactgcaagtctttgagtccagaccaggcagggtagtcaaaattttcattttcttcaaccttagtctgagtcctgttgaatattttctgaagtccctccagaattataagatttttgtccttcatatcaacagcttttttcctcatactagcagaagctcccggaagatcagtcactgcagacacaaagtgtttgagaggttctttccaggaaactgaaatattgatgattgatctcagaaggtcttcagttttaatttcatgaacttcctctcgattctctggaacgtggatggaagcaatgtgacaca

SEQ ID NO: 2325 - DNA, 467 bp, Rattus norvegicus
  Genbank Accession No. AI179099
ggaccatttaaaagagaaatttattgcctcaatattctgggggcctggaagttcaacatgttagcaggttgctttctcctgaggcccctttccttgttgtagacggccatctttctctgtgttcacatggtcttcacttgattctcacctttgtcctgatttcttctgaggatagcagtcatatcagattaaagcccatgctaaggatgtcacttaggtatttatttcccaagacaccaagacagtcacgttctgaggttgtgggaactgggacttgaactgaagaactaaagctacaggatttgcctcttaagagaatggaaatgtatttattgagataatatacttaatagcccaaatgaacaaacttactgaaaattttaaccataaccgagtaagatgtataatagattcaaatgtcttataaatatatattatgatattttgaagtgccttttcctcgtacc

SEQ ID NO: 2326 - DNA, 429 bp, Rattus norvegicus
  Genbank Accession No. AI179100
gttatggaatttcttattaataccttaaaaaatttaaaaacataaaaaaaccccaaaatcaaaaaacaaaaaccctctcaaatgcttaagatgctgaacctagagaaggagctaaggatgcagccaaaaggaaatgatttaaggacagagggtgaataaagagagcaaaggtggaagaccatgatgtttcaaagctggcaaggttggcctcaatttcttttcttctgtctggatactggttctgcttctaggtaccggagcccaactagcatacccaggattgagaaacttgctaccatcaagggtgccagcacaccaactgtgggagccgctgttccaaatacaaacaactccgagaggaagtgtcccagggcaaggaggaatgtccacagtgtgatgtgataaagtgttttgttgtggatgtcaatg

SEQ ID NO: 2327 - DNA, 488 bp, Rattus norvegicus
  Genbank Accession No. AI179106
ttttttttttgtttgtttgtttgtttatttgagagatggcgtgtgtgtcatgtagctcagactggccttaaactccgccccctctggcctctccctcccctgcactgggattgcaggcatgggcccctatggccagcttgggtgggctttctggacagtccagagtttggggaaggggctcctgctccctgctctctggttccagatgaaggctgtcactgggaagaggttgaggagcaggtggaggggcttgcaaggtgctggcgtctcctattggctgctgcctcttctgtaggtggagcctctgctccaagatggctttttctaacaaggacagatccatccccttcacacaggtgagaagtcgggccttcaacaccaaagctccaccctctatacgctccagctccccgagaaccatgtacaggaagttcacatgcgccttaaagggctccaccaatttggtgcaaacaagcagctgacactga

SEQ ID NO: 2328 - DNA, 539 bp, Rattus norvegicus
  Genbank Accession No. AI179123
gatggtccagcctggtacacaggtaggctgaagagtgtattttatcactgacagaaggacctagctgcacacaactatcaggttggtgttgtagacagtaaatctgacaggagcttaaggtgccaagatgtcacttgtcaggtctataccactggcaggttctgtgaggcactacatctttatccagttgctttaaagttctccgtctcctttaatcagtcacggtcctgtaaatttcctgcttttctcggagcaatcgggccttatctcgctgcaagtcctccacatcacgttctaggttcaggatggtgtccaacttgcgcatgcggcagttctgtgcagccatcttgtttttgccccggcgccggatatccctgatgaggctcagctgggcctcgctcaactggtatttggacagcagctcattgaattcttctacaggcaggttgatgattttgtcattggtaaatgggatcttcatggctcgggctctgtgctcatctctgctcatctgcttgtccaagaagtcagcctgcttt

SEQ ID NO: 2329 - DNA, 635 bp, Rattus norvegicus
  Genbank Accession No. AI179139
aaaacagagaaaggtatattttattggcattttagcccagcacagttgaactgaaagaaaacagaacaaagcaactcatttaaccagttgagtataacaattgcaagttcctgctttgccacggtctgattgtgtcacgtgagtgcatcacagtcaccgccgctgcccagggagcacccctcacgtgtgcagcacttgatacacaaatttcattgtcacacttatctgtttcagcaatgtaaacatttgctacaggtaaactttaaaaggtaaaagtggacgatactaatcaataaatcaaacagaactatctccacatgacataattaaacattaatactgtctcagtaagaaccacaaattaataaattcataaagaaacagaaacaaagagtgaagtaaaaactcctaaaatagtgttaaaatactgaagaacacaatgaaaatgtatctaagaaggggaacaataaaatgatttaacaaaaacaaaatatggttagtagctatgccagtcttatactgcaaagaatttctttaatcaccataacaatatgctttgtttttctaggttccttcctttaaaaagttactcgagttagtaagtgagtcaggttctctgtgggggtttcacattt

SEQ ID NO: 2330 - DNA, 632 bp, Rattus norvegicus
  Genbank Accession No. AI179144
acaactttattggcaaaaaggggagaacttcaaacatctttcatacagggcgctgtagctgaccctgttggattgaacaagtcccagtctcatgtccacgtacaatactgaacctgcatatgcagtttcccattctcatgtccacgtacaatactgaacctgcatatgcagtttcctttatcaagtacagtgctcacttttcaggtcgtctctaaaacataaatacaaaggaaaggaagccactcattaaaaactgcatcaaacacaagtattttaagtgtgaatttgttgttcctggaaattacacatgcccaaagaaaacaaaagctggaaaagcggttacacttcctacatgagtggacagttacaacaacaatcgtcttctgtaatgagcatttttaatttatcaccaactactctgaacttactaagagctgtagtcagagtcagaagagaagacgcagggagagtattccttttggaggacagagtccctccagaatcatcacggggaaataaacatcctgttgattccgggtggcaaaacaattaacgttgtcaatctcagttcatgttgatcgtactgagccgacctaaatttcttccttgtcgtcattcttctaaatcaagtg

SEQ ID NO: 2331 - DNA, 465 bp, Rattus norvegicus
  Genbank Accession No. AI179147
cttggaaaggcacagttttattgtggcgtatcagggagggtctcagatcctccccacctccttcagcttggccaccaggtcttccgtggtctctacctttactcctgctaagcgctgagggggctcctccacactgatcacggagaccttggaggtcaggtccacacccaggtctccagccttgatcacttcaatcttcttcttcttggctttcatgatgttgggcagtgtggcatagcgaggctcattgagtcttaagtcagcagtcaccacagctggcagtttcaggcgaatcgtctccagacccccgtcaatttcccgttccacttttaccttgtccccctccagtgtcacctgagaggcgaatgtaccctgcggccagtccagaagtccggctgtcatctgacctgtctggttacagtcatcatcaatagcctgcttgcccaggaacaaaagcctcgtgcc

SEQ ID NO: 2332 - DNA, 513 bp, Rattus norvegicus
  Genbank Accession No. AI179150
attaatttcattttaacattttgtcttcaacaattccagagattggtatgagaatgaggataattgaaaagtagctgatggaggctagttggccaataatgataaatgggtgttctactggttggcctccgattcatgttaagactaggaggttggctactaggattcagtaaaggatttgggtgattgggcggaatgttaagctgcgttgttttgaagtatgcaggaatggtaggaaggctaagattaggattgataagattagggctacgactcctcctagtttgttgggaatggagcgtagaatagcgtaggcaaagagaaaatatcattctggtttgatgtggggtggggtgttgagggggttagcgggtgtataattgtctgggtctcctagtaagtctgggaagaatagtactagggttattatgaataatagtaatataaatacacctaggaagtctttaattgtataatatggatggaatgggattttgtctgcgttggagttta

SEQ ID NO: 2333 - DNA, 261 bp, Rattus norvegicus
  Genbank Accession No. AI179167
tcggtgctcgtgtaaggtttttcttttcccctcaaattttatttcaataaaaggagacttgggcgaggtggattccccatagccggattctccccctccccccgagggtggctaatgctatctggggatgtcttcacagggaagagagaactatgggtgggctcctgcctgaggtctccaccctcagcccagcggacatatcacaggcagcttaaaaaaaaatcctaaaaaaaccaaaacacacatttaaatcctcgtgcc

SEQ ID NO: 2334 - DNA, 531 bp, Rattus norvegicus
  Genbank Accession No. AI179185
tgtgttcctttgtttctcttttaagtgtggaaaatagtgtatttatgcacccaggaaggacagctgccagccctcacagaggagaccactcaaaagcaagctctagcctcagcagagcctctagcaccgttaggatcccctctccatacagaacacaaacaagaccacaaacagaagctcttgccacaactgagatccagtggaagctgggtgcctggtcatttctagagcgcagacagtggcttttattataaagctaaggcgggggtttgggggatgctgagatcttctctgggccctgtgtctttgactcgctatgttgagagccagcagcaagggagagttcatacaggaaattggaggaagtcagtaatgggttcttggggacacacacacacacacacacacacacaacacaggtacgtgcgtgtgcatgtatcacagggcacagttgtgcatttttcttgggcttggtaccttctctacccggcgttctctctgtcagcagcctagtactttgtacctacgatt

SEQ ID NO: 2335 - DNA, 566 bp, Rattus norvegicus
  Genbank Accession No. AI179218
aagtccgtggttgtacgcgcctccccccccccccccccacaggtaaacctcgggcgcaatttcgcatatacccacctatatctggccctaccacctcaagaaagcactaaattagtccgtaaaataacaatcgagcacgcgcggcatagaaagagtcggaacgaccgcggcggccaaacactacggacgaacagtccgtccctacccgctagtaattcccgcagcggtaggtccttggcgggtagataagccttctagccttacgattagacgattaaggagaacctccatactccgtacccgctcgagaaggtggcccacttggcaagcaaggcaggggctcgagaaggagaacatcggtcgtctactagaaggagcgggcaacaaaggtagaggattaggagtccccgtaggaggaggggccctcggagcagtcgttctgcgttgaacctccggttctgagggttaaacctttcacagcgagctgcaccaaacctgcaactacgctacagtcgcccttcgcgcgaaaccgccacttgtctataaccttatataatacatgagtt

SEQ ID NO: 2336 - DNA, 570 bp, Rattus norvegicus
  Genbank Accession No. AI179243
ccagttttaaacactcgtctttattgacaaaataggctcctcttcagcacactcaagtatgtaagctgaaagctgttttttttttggggggggtgataggagggatggaaaacttgctaagaacaatgcaaatgtctttcaatattcacaaccttaaacttatatccaagaagacaaaggataaataatttttttataaaaataattacttctgaaataacatttcacaatagaactactcactccttgattctgcctcatctcaactgtgtagcctttcttctaagattctggcctgggaccaaactacatgaaagaatgaccactaaactaagggacactctccaagaaccaatagaaaagtcttagaaataaattcacctataatataaaatattaaggcctctgcatgacaacggtttatcacctggggtactggacctttcctacctgacctatgaccccactcacctcaaacttcagaatgaaaggttctcaagtaaaagtcctatgaattttgccaatacatgaaattacacataacattacactgcaaagtaatatgtaact

SEQ ID NO: 2337 - DNA, 415 bp, Rattus norvegicus
  Genbank Accession No. AI179291
cgagaacaacagactttatttgaacacaggagtctccccctgtcggaagcagtaagtgctcaggtgcagggacagtccacaacacaatacttatcatcgctggaaatgctgtttttttgggggaagaattctgttataactttaaaaaattgcattaaaaaagatttacaccaacagagacaaagatgcagagtttaaaaaacataaattatatatctccaacaggactgtataaacaaaatactgttcagagccactctgcggagtcactaatgaaggcagagcgaccagaagccttaaagtgcagacttaagtatcttggctttactttgcaaattcagcacttccactggtccagttttgacacaccccaaacccagtatttaggaatgaatctcaacttcacaaattcagt

SEQ ID NO: 2338 - DNA, 493 bp, Rattus norvegicus
  Genbank Accession No. AI179300
ctagatttaattactttattaaaccgacatttctgtaatcaacaacaactacttagacagacccactgctgtctgattatgtccataggtcaggggtgttctgcttacgcatttggtgcctcataattaagttcagctaacactagggcctatagtttgctgtcagtgagaccaggtctggtcttgacagtaaagccaccatcaaaagctgcattgagaacttcatccaggcagctcgctgtgacaaaacttagatcctgtttgacgttgcttgggatctcctcgaggtccttttcgttcctctgcggaattatgatatgcttcagtcctgctcggtgtgctgccaggactttgtctttaattccacccaccggaagaacaagtcctctcagtgtaatttccccagtcatggctacatctgagcgcacaagccgcccactgaagagtgaggcgagacaagttactatggtaacaccagcacctcgtgccgaat

SEQ ID NO: 2339 - DNA, 581 bp, Rattus norvegicus
  Genbank Accession No. AI179315
caattactttatttccactttttttcccagtccccagtagcacagaggagaaccctctaaagcacaaaaaatatttcaagagagcacgttacaagagaagagtcagcgataatttggcagaactttattttctctagcagttcatacccccccgatccaaattcgataattcaaaaataatagttaactttatttaacatgttacagcttgacatttaaaacatcatgctaggtgctgtatctgggaggagacgggggaggtgtgtatgcaatcaaaaaaaaaaaacattgtatgaaattctcaaagaactaattaaaaaatgaggaaaaaataaaatcatgctctagttaaatatttcacaaacaacactgtatacaaataaaacatttcacaaaatatttttttttttaagaaaatgttttggtctttgatctaaacaataaataaaaacactggcaccttcacttagatcgggaggcgccgctacccaggagaggtttatctaaggaatgaacatgggacagagaatatggcaagaatagaacctgggagtttaagctgaccaaccacttaggaaaat

SEQ ID NO: 2340 - DNA, 550 bp, Rattus norvegicus
  Genbank Accession No. AI179357
tttttttttaacagcaagaggtagctttattaacgagatcccaggtcttagcgggatcccgggtcgacacgtatctcacacaggagacagaggaatcgaccccgagcctccagactcgggggtttatataggggaggttaggggcattcgcgaggttacacatgattggtcaattcaaatggtgcacagttactttcggcgcgaaattacatcagcaaggagtacgtgctctccagcagctcggcaggcaggtagggtgactcatctcactcaggggggtgaaggaaggggagggggtagctacggatggtcagtgtccttggggctgatagctggtttggcaagtcctatctctggctctccctcaggcacgtcccgccctgcacatctggactctgacaatgagcaacctttatgaaactctagttctgcacattcgggctctgacaatgagtaacctttatgaaactctagttctacattccccaattctttttttttgttaatagttctaatcctagaacttcatggagaactcagccctcgtgcc

SEQ ID NO: 2341 - DNA, 622 bp, Rattus norvegicus
  Genbank Accession No. AI179388
cctggacactttagtctttaattaagcacataaaactgtactacttgatatatttctccatgaactttttgtgaaattcagatcgcagcgtatcgtttacaaatcttttgtctttcttttgatcatctataccctttgcacagttcttaaaaacaacatcatcgtcccaccttcttttaaccttgaagttggcctgaggctgggacgggcccgtgagattcaggagagggtttccactcagaatgttttccatgcgaattctctcttcctctgctttttgttcttgctcctttctggcctgctcttcagctctctccttcttgatcttttctagctctgcaagaagagctgcagtgtcatcgtcatcgctttcctcttcaaaatcctcatcttcctcatctgtgagaggatcgtcagcatcaaggttggcagcaggaatctggtctaagcggggcttcttggacaccgaagaggaagttgtgtgttctcgggttggacggtccctatttttctcccttgcagcagctctctccctctcttccaactctctcctgaagtcacggttgcgaagctcttcaggggcatcctgtgtggtttgtctgtactttatctttgtatgaga

SEQ ID NO: 2342 - DNA, 357 bp, Rattus norvegicus
  Genbank Accession No. AI179407
cagattgtcaagacatttaatatttggagagaaggtgagacagcccggtgttgatctcaggacaggggtttcagagtcctcgaatcacgagagagaaacctggctctgcccagccacagatggaaaggaccatccatcccagccacccttccagactctgtctccagcgccacctcactgagacttagtaccttgggctcattttttccttggctcatctctacatttttccttgcattgatgtcccttctcttcccctgacagttcccagaacgaaagtggtgtcattacggaccagctgacccgggatgaagcatctgtcgtcctattccatggatcaaagaattgcctcgtgcc

SEQ ID NO: 2343 - DNA, 667 bp, Rattus norvegicus
  Genbank Accession No. AI179413
tttttttttatatgtccatttattaaacaagaactccttcatgacaatacagtatcattagtgattagtattgagaaaattatttccctctacatacaaaaatacagatttgaacaatatgaaaacaatcaagacaagtaccatgaaaaattggtccttcaaaggaaaagtggggaggttgagggcaatgtgaggctttgcctgctgtcaggcaaatcaacaggagcaaatgccatggctcccacatcatttgaaatgcacagggtaaaccccggagtcaggggaggcccacccatggtagcaacgtcaaatgggccaggatgggaagcttagtactgcaaacaacacaaattaaagtttgttttgttaacagccttcaccttggaattcccatgctaaactttagctgggtatggtagtacacttctgtgtactatcccagcatttatgaggaagaaacagggggattgctattgttagaggtcagacaggactacctagcaagaccctgcctcaaagaaaaccaactcaagaaacaaaatgtgctaactattgtctcccaagagtgccactagttaaatggagtggccgtggccgatcctggcagaaaactgtcattcagccacataatgacttctgttgtcacagaattacatattttgactct

SEQ ID NO: 2344 - DNA, 668 bp, Rattus norvegicus
  Genbank Accession No. AI179422
ggttattgaatatgtattttttaactgaaaaaatcattcataaattaacatacagaaatgtacaaacacatgagtgaacaatgtaatgacaaggaccatttctgtgaaaagtgtttttaaaacatctttaggcttcagtgcaaaaatgtccccctggcacctttaaaacaaagagcaagctcagaacaaagacagtaatggtggctaagccagtggcgtcagtgcctcgtcgatggtatgcacagtcagtgtgtgctctgccgctctgaggaaggaactcgatgacaggagtccccattttagcaaaattaaagttttgcaaatcccccctccccaaagaaagcctgtgcggacagagaccttgcacacacagggcagtcagtcaagggcaggtcggcttaagggtcactcgtctgtagcatggagtaatttcagctgccaaagtacaccaaggtcacacttgattctcaatgtcattttctttaagcaatgacctaatgtgtggtccagtggtgtggctctgactgtgacatttcccactcggtatgtgactgggcggacaatgactgacagtgcccacaagagtccacactaataacaaacttggacatgattgcaagggaacataagtgacccgacttgagcagtaaaaagactttctttgtccc

SEQ ID NO: 2345 - DNA, 567 bp, Rattus norvegicus
  Genbank Accession No. AI179464
aaagaattaacttttatttttgcttagttttattaaaaaaataaatatgtcataaagcttttgtttcctttagggagaaaaaaaggaacaagttccataaaatcaaacaagcaatggtaacatgtctaacttgaaaacgattggggatcactggtttacaagttataactgaatgaatgattgctacagttgcccatttcctcctgccaatggcagcaaacaacaggatcaactggagcaaaataaataactgtgtggaagccctgataagtgcttaaacagaccgattcactgagacatctgtacagctatatcttgctttaaataacaaagaagttcctgtaaagtttgggtaaatgagataaccacaaacatacaaggagagcttggtatctgaaggacttctgtggtttattttatcaacaaccacttttcactttactcaggcttttgctttgcttagaagtacttactactgctctgaattgaggcaacagaacattcacccaacagtgcttttgctgggccagtggcacaatttccaagtctgtgtttctattaaagtaa

SEQ ID NO: 2346 - DNA, 419 bp, Rattus norvegicus
  Genbank Accession No. AI179478
ggcggaggaagacttcattgagtccaggatcagccctgtgcaccttacaggagcagcaaacaaggccgtaagtccagaacttttaataatacagcagacgtggccgcttaaggcaaaaggcaagctgtagatgtgtgaccacttctggctcccagggacacaccctggtgtcttgtctttagaggcagcacagggagctaacggagaccacctgtccccgaccctgtgagcaggtgcagcggcagcaacctcaggagtcagtgaggacagatcttgggggtagatcggatgctctgtggggaaggggtgtcttcccggaggctgacagcacagaagctcggtgctttcctaatcggggcaggggctgacgggctaggagggcacataaggcttaaactactctagtcacctctggcact

SEQ ID NO: 2347 - DNA, 607 bp, Rattus norvegicus
  Genbank Accession No. AI179481
taaatttttgctaaaacacagaagtaagaactgtttttgagggttttttttcttttttaaccccttgggcagtgatggtggggacttggggatcagtgtgggacccagtgatgtttgcacaaccacaggaaagtgctgattgatctgatgggggctcagcgtacttccggatgcttggcgtgaagtccgtgattagaattcaccaggggaagtcacagagagttctagcaaagacaaaaggcgtggtcatcacaagaagccgtggatgtccgcttctaatcctctctcgtctcctcccagggaagccccccgaatcctgaaagtttccgagaattccctgaagtaaagaggctgctcttggggaaaaactgtggcacccacccttgcccaccagcagcttctacttagtcccatcgtattatgtactagaaacatagctcagaagaaaaaggctccaacgtagtgtcttcagcttgcaatcagaagagtagactttcctttatcgcgtgcttcctgcgttgtaatcaagttaataatgtggaatggatttctccttcagaaaggactgactgggacagcgactgaccccgccccagaagactgctac

SEQ ID NO: 2348 - DNA, 490 bp, Rattus norvegicus
  Genbank Accession No. AI179498
  misc_feature (1)..(490): n = a or c or g or t
ggccaaagccatcctcatccagatttatttcctttatgatcattaagactgtcacttaaacaagtagtcaaaaatacataaactctgattttatagactctaaaacattaaggtacaaaaagtaagtaacatctacaattagcagaacatttatgacatataatttcatgtataggaaaacaggtagagaggactacaaataaattataacctgaagacatactataacctgaagacatacatataaaaaaagccttgggttatttattagaatctcccagaaaggtgaatgatgctaggacactatcaacaatgtgagcacaatctgacagcattttcttccacttctaggctgtgctactagcttaagaggcactggacacagccagcttcttcaaatgatccatgaacacctgcaggctgacatcgtctgtcaggatgggcgctccagtttcctgtncccaagcatacaggttattgtgtgtctgag

SEQ ID NO: 2349 - DNA, 353 bp, Rattus norvegicus
  Genbank Accession No. AI179510
atgtagggggaaaaagccctaaaaggttggttgagccaataaatataattagggaaacaattattagggctcaggttcgcccttttggagtgtggattaacattatttgtttgatgataagtttgattacccagtgttgaaatgagtgtagccggttgctgattaggcgttttgatgatgggaatagaattgatgggaacataataatggttacaacaattggcagacctattattgtgggggtaatgaaagaggcaaatagattttcgttcattttgattcccaagggtaattcgttttttctgtagctatagttttgggtgagggaggtgcaggaaaggtttgggaaaaaa

SEQ ID NO: 2350 - DNA, 368 bp, Rattus norvegicus
  Genbank Accession No. AI179519
aaacccctcaattttagcagcttttaattttttaagaaactgaacctatatcctgtaatgttaagatattttatatatagttttcagcaggataaaaaaacgtaagactatttgaaggcaagaacatttactcctctcattctgtgtaaggagagcaatgcagcaggtgcgtgacaaaaatattatacactagatatggtccaaagtcattccgtttgcttgtttaatgatgttcaaatttcattggccagttcttccgtttctgcagaactatctccgttaactgtgatcttcatatcctcttcatatccaggaggcatgaaagccagagcataagggaaaagcttatgacaactcaccctcgtgcc

SEQ ID NO: 2351 - DNA, 490 bp, Rattus norvegicus
  Genbank Accession No. AI179560
cagtgacgtttacattttatttacgtcagtagcactaaaatacattcctccttgagggtcacatttccacaacacacattaataccaatccacactccataagtgcccacacctcctcccaccaaaaccaagcaaacacagcaaacacttcatggttacttcttcaaaacccaggtaaccctgtcccagctcctagctacagcagtgcccataactcacagaacttcccctttccatgctgctggacccatctcaagctcaccaacaccctttacaaaatcctcactgccaaggggacaaagttcaagcaacagaccctcatggccaaaagaaaggaacacagccccaaagaggcacgtgcagcccagaagtgagatggcatctgaactacctggtgctcagtgcaagccacaggttaggtgacagcgtggcatgggttgggaccggatgaagcttgtgaaggggccattatttgcattttaaagaactg

SEQ ID NO: 2352 - DNA, 463 bp, Rattus norvegicus
  Genbank Accession No. AI179569
  misc_feature (1)..(463): n = a or c or g or t
ttcttttagagaacatagctttttgttttgttttaaatttattattgctcttttcaatcttgattcagaaaatatctcaaagagcttaacaatgctaatgtgtcctgagctgagatggttcgctgaaaggtttttccagttgaggtttcattagagacattgctctgtggagtccaataatgctctgacatcttcttttgtaaccattgtacagcccaactccagtggtgggaattctctttgaagtattctttagcagcaggacacttttgagcaagagtgacaagaaatttgacacactggtagcaacgactgctgtccacatgattactgtggtgcatcaatgctagtaatccattttctgtctcaaatacaaatttgactcgctctacttgtatgggatcttccatgaccagtatctcatgcagtagctggaatgtattctttaactcatggngtggag

SEQ ID NO: 2353 - DNA, 613 bp, Rattus norvegicus
  Genbank Accession No. AI179610
attagataatgccatttattatttcacacagaagttagagaccaaggttacaattattaaataccacccacccctcaaaagacagccctacttggttagaataaaaaaacaatcgatacaacaaaaaataccattacactggtagaactggggaaataacaaaaacaagacagaaacacaagacagaaaatctctgcacactgatatcaaagtggccatgacgctgggggaaagcagtcatggtcagtcaacatggacgccgactaccaagggcactgggctcagaacagccgcctctaccgaccacagttctggggctctgttgcaggatttggggctgctggtttccaagttcaggcccctggctgtgcttttggtgagggaaatgtgccaggcatctccttccattccagagagacaaaggaagacacaggaagggggcgaggaaccccaaaagctttcttagaggcccaagaaaagagagccaggcaagattctcccctgcagagagaaggctacatgagacagagttcacagcctctgggggccaacactgcatttacatggcataaattcccactgccacggtcgccaacaggaaactgagtgttga

SEQ ID NO: 2354 - DNA, 410 bp, Rattus norvegicus
  Genbank Accession No. AI179612
acaaatcaaaaggctttatttcgtattaaaataaataaataacaaaaaactactcaggcttagccccgccttcctcccaagtccaggctgggaggagggatttcactgggaaggggagagggagtggccacatcttgctctctaaggccatcttgtcctggcttcccattatgttcatcaatatctgaaagtccccaagttttaggaggggaactttgggcttccacatcaaggcagagcctctgggctgcgttactccattcaggagttccatttccttcagtctctcggggaggtaggtgattttcagagaccgggggaggcgtcaacagagcatcagcctcgatctgggttgctcctgctactgtttctgccaaccaggcctctgagacctcgggccccctcaggcg

SEQ ID NO: 2355 - DNA, 574 bp, Rattus norvegicus
  Genbank Accession No. AI179634
acttggactcatggttctggaggcaggaagagctacgattcggagggtgagtgggaagcagcaagtggaagggagaccagcagaccttgccttaaagcaacctattctcagggttgcaagcccggcccagcaagagcagagaggctcctgagtctgagcatcttcttcagcccctgtgcccagctcacacctccccccacctcctcccacagtgcaacaggtgatggagagccacatcctcaaactgttccagggtaccctggggcctgcggacccggagtgaagacagcctgttgggaacccaggcactcagggacaaaccagtcagcccacaactggcttggaaggcagctcctggacagtggtgggaagagccctccccaacaggaaccaataaatctgtgcagaacttgaagggcttctgggtgcctcccagtggggcttcctggaggaagtaaccgccgatacttctcaccctgccttctcacccagcacccgcaggtggtagatgactacacggtcaaaaaagtcggtggtatcctcaaaagtcaacttcagccggtccacctccatg

SEQ ID NO: 2356 - DNA, 581 bp, Rattus norvegicus
  Genbank Accession No. AI179636
aaaggaatgtaagatttttttttaattatctcaatcagaaaagttataggcttattaatttttgaaataaaatattagtgacaattgttcccagataaatactaattgggataacatgaaaagatgaggtttttaaacagaagagaaatttcatgctatacaggtaagctgagacatgtagagcttgccaggctattttaccgaggagtacaacacatacacttctgagcataacccactctgattctgaaggtttctgcatttagcttaaaagatgtttcttcccaagaaactgaacttttctttcaaatgcagttgaccgaataggagaattgggttcataaaagggattcatggcgaacttgatgtatagatcgtagacgtcagtgaagaagttcttgattccatcttcttgcctcacatcgtgaagcatgatgagcctcatgtggccagcagtgacgaaggccgagacaaaccactcattgaacttgtccacagtttttaagtacatattgttggagagccacatgttttcgtcaacgaggtccaaagcagcatgagctatgaactggttcagatga

SEQ ID NO: 2357 - DNA, 413 bp, Rattus norvegicus
  Genbank Accession No. AI179651
  misc_feature (1)..(413): n = a or c or g or t
accaaactatatttactgtttacagtagtaaaggacaacaggtacaaaccggtgaagaaacacaacagagccgacagacaccccacccaggcccacgcagcaaacaggcagaaacattttcctcgggactttaagcaagcgagagatggtaggtcagtgtcgggtgactataaaaggcagagatggccatcaagcagcaatggatccttacagaaggatgacaggcaggaactatagacatttaactgaccccacgatgcagaaccgcagtcacccaccgaggcgtcccgttaacacacacttggnaaactgcacaccacaatccgggaaaatgaggtcacctttcctgngcttgcttttgcaaccacacttgaaagcggggctcttacacaacactgcagcaaacttgatac

SEQ ID NO: 2358 - DNA, 444 bp, Rattus norvegicus
  Genbank Accession No. AI179750
cagtttccttaaattcacatttataagttagtcttcacagttaatcctgttgggaataaaaagtaagtgaacatatttctgcttttcctgcacataatacaattatattttaattcttgacacgaatggtccatgacttgaattttctgaaggggtgacaggccatatttttggatcacctgccactgctggctgatctgcatctctgttggtttggcttttgttggttggtttatttttgagacagggtcttatttatgtagtccattcctgtttcaaacttcctgtattgctcagggcaaccttggattcttgatcctcctgcctctacctctcaagtgctgggataacatgcttaaactggcccagctgaataacatcttttgtttaaatcctgtcagccacctggaagatagataccttattagtcccatttgcagatga

SEQ ID NO: 2359 - DNA, 418 bp, Rattus norvegicus
  Genbank Accession No. AI179795
tgtgttttttttttttttttttatttttttagtttatttttctacttaacttttaataaatgagaagaaacacagtagtcttgtctcatatagaacatttataatacagaacaatccataaagcctcatggtgaggtaggaacagctttggaaaaaacacacagtcatagaacgcacagaagttagggaaaaggctgccacactcgggttcgagatgagccgtaacaactgcgccgttggcccagaggacggacggacaggcagcagcagacaagaccaacacgagagcgtctcagagaatcagacacactaataataccccattgtgctgtttcaaggcagacccatatcatggccatttgtgtcttttatataaccacgtattaattctgttacattctcttcagcacctcgtgcc

SEQ ID NO: 2360 - DNA, 458 bp, Rattus norvegicus
  Genbank Accession No. AI179833
acatctgccacttcatttattgtttttatttgcaggaggagttgaaacaaaaatttaagggtgttttttctctctcccctaaacatgaatcattcaagtaaaaccaatttaactattgaaattagcaaagtaaagggcagtatgcagggcaacctaagagcaaaggctgagggaggagggtgcagtgggtatccaacagatgcacggatgcagtggttcacctgctggggaccgcgacgccaccccggaaggccagcacatgaacccctttaatgagaatgccccccaacatctgaaaatgtttcaacccaaaacataaggttaaaaaagaaaaaaaggaaaaacccaaaaacacacaaccccacagaccacccagccataaccaccatccttaatcataggcgtcttttcattttataaaaagattaataaaaaatattgaaaaaattcctcgtgcc

SEQ ID NO: 2361 - DNA, 497 bp, Rattus norvegicus
  Genbank Accession No. AI179840
gagtcccaggtcagatttattgtaaacaggataacccaaggaccccgccacactggcagagtcacatgctcttacattgactgattaaagacttttaagtctctggcaactcatgactttttcacaaatctcacttgcgaagctcgagtgcacgcagtctctgggtggtatgttactgttcgtggaccacaacctggacccactgagatgaaccggttggatgccaagtgacacacaggagctttggaacacaacgaaccaccacgtccagggttcatggaaggcaacatgggattgtttccaatctcttcaggtgccttttctcatacagaagacaaacttttaactgtacccatttttttttaaagagctaggttactcaacggcatgtgggtcattacaggaaaggtagcagaccgtagttcgctttcacaatgatggattcgaacactcaggactaggtctagattcatcttgtatagattttgcaggtcaat

SEQ ID NO: 2362 - DNA, 577 bp, Rattus norvegicus
  Genbank Accession No. AI179857
cagacgtttaattagctttatttacagagcaggtaattttttttttttttttgcagtctccaatggtgcctaggtaacatcattaggcaagaatgccagtttaaaagaaatttatgcagaatcctaaaaatgacaggtgtggacgctcctcaggaaggggcgagcgtggctggcagctcctgtgcctcagttactcagaagcagttctgttgcagtctctacatcccatgattttgaagaccagggcccctattactgcgttcctatcaaaacccatagcacagaggttttctatttttttggtgtattctggactagacactggtgctccagcatacacgtgtgcccaaagtcgagctgtctgcttgaacatttcaggattttgtttgtactgatttgctactactgcatcttgggggtcatctggttctgcagcggccagcagtgcttgcaatgacaataatactgtgcgcagagtcattgctgctgcccattgatctttcaggatatccaaacaaatagcccctgtgacggaactaatattagggtgccatattttagtgataaaccggacctt

SEQ ID NO: 2363 - DNA, 500 bp, Rattus norvegicus
  Genbank Accession No. AI179865
aaggactaagtaactgattttttattttaatacacagtatgagaaatgaacctgtaaatcaactgaactgtatggaaaatgaaatagcaaataaattttggccaagagtcaaaaaaaaaatgcatttaaactttggaacttgcccacatagacaggagaaccaaccccagcagttgttggggcagacgcctgagaaccaaagggctaggaaagtcaggaggagctgaaaggattcttcagtttatgaacttggttcagtgggaccaaggttgatgcctctgcaagggatatacacagttcatctaactggcaccggtcccctccatcacttgctgagcctgcttctgtcccatgcagcactgcgcaacagactggaacagcttttcgatctctggggcacagtgtacaaattcatggttccagaacttaaatgctgggtttttaatcagctcaatgaaggtgatgagaagaccccaaggatgcggcctatttacaatcaa

SEQ ID NO: 2364 - DNA, 616 bp, Rattus norvegicus
  Genbank Accession No. AI179883
gaaatttaaagaaaaaatttattgaagatctgaaaaacaactcctacaagattgacttttccataaaactgtagctacacgatgcattgcgtctatcatgttaaaacgtgcattagacacaaatacaaaaaccatgaaaacaagccaccattctttaacaattgagcaaagataaaatgcctaaggaacaacatggatgacttgcaaaggatgggctctttaagcaccatttaaaaaaaaaaaagagcacagatggatgagtgttcagttatacacactgaagggaacctttggcactaggagtcagagcattttgtcatagagcattaacacatattataaaagtgcgtagtgtcaaaggaacagaaccaccagcattcaaaagcagctttgtcaactaggcaaacactctacagcatgtctctccgttgtccatcactgatacactggtagaaactttgaaatgaaaaaaagaaagaaaaaaggagcagttaactccttttattttctctgtttaaaatcaaacaggaaacaaacatcaactctgttatacactaacggtcttcaaagtacatcatttgtacaagagaaggactaagaaccaaactgtttacag

SEQ ID NO: 2365 - DNA, 554 bp, Rattus norvegicus
  Genbank Accession No. AI179892
atcaatactttggttttattttaatgaaaagaaaaataaatatttttaaagagtaagaaagcagtgttgaggatggaaaggtccagccagaacggaggccagggggatgggcagaatccaccaaggagaatgaaaaaataagaatgaggttgggtaggaggataaagaggttggggtgtcttagctcccatggtcttgggctggctgaccaggggcctgggaattttactccctgcagtttccaagccgggccctttccagttccggctgtgatgtctgagggttccctccagcctcactgttgctccctgagggacattagctcccaggtggggttctgcgtttgtgtggatctgagtctgaggggattagcacctggtcccaaggcctcatcggcgtggcccccaaggcctcttccgtggctgtggatcccacctagcttagtggccgagactcagtggtgccccatgtcctccattcctacgcggccccagacgcccagcacgaaggtctcgatgtcacactcgttgatgccacgcacgattcggaagtgg

SEQ ID NO: 2366 - DNA, 494 bp, Rattus norvegicus
  Genbank Accession No. AI179942
tctctttcaaaaacctcgaaaacaaagcctggaaactacgatttaatcccaggacttaggtttcatggtctcatataaaaacttataacaaaaagattaatgctctacaaaatgaaatatagttaccctcaactatatagggggaaatgaagcaaacgtctttacctgacacagaggagagctgatcaaccaagcatccataataaataaagcgttctgaagtacagtgtcacgttcagcttacatagtcaagaatatcacaagatgtgacctgatattaaatgttatcacattcggaagtcagaaagccaacacattggaattgctaaagaatttctttgatatgcataaaagttattttaagtcactttttaatcttaggcatgctgttcatctaaaaataagtattaactaaaacagaagaatagaatgaatggaaataatcaccgtagctcaacatctgacagccataaaacatactccaacctcgtgcc

SEQ ID NO: 2367 - DNA, 590 bp, Rattus norvegicus
  Genbank Accession No. AI179947
cgccgcggcgaggcccggagttactgttgacataagcgtttaagcccctgttctgagccatggcctcagcagtcctcagctctgtgcttacaactgcctcccgctttgccctgctgcaagtggacagcggcagtggctctgattctgagcctgggaaaggcaaagggcggaacaatgggaagtctcagactctggggaacaaatcaaccgccaatgagaaaaaaagggagaagaggaggaaaaagaaggagcagcagcagagtgaagcaaacgagctcaggaatcttgctttcaagaaaattccccagaaatcctcccattctgtttgcaatgttcaacatgagctttcattgccaaacccagtgcagaaggaatcacgggaagaaaactggcaagagtggagacagagagacgagcagctgacctctgaaatgtttgaagccgacctcgagaaggcgctgctgctgagtaagctggagtacgaagagcacagacaggattatgaaaatgctgaaaacgcttcaactcagacaaaagttataaataaaaaaaaaaaaaaaaaaacacatgcgggctccaaccctcgtgcc

SEQ ID NO: 2368 - DNA, 586 bp, Rattus norvegicus
  Genbank Accession No. AI179950
cgtagtagtttattggactccgacaaatggccacaaggcccacagcacccgtttgctcggatggaggctcaaagctgctctgaccgctgccctcaagatgctttcttctgcttcttcttttcattttcttctttctccttctcgatttcagcaacatacttctcaatttcttcaggacttaaaatcttgaggggctgatcccgcctcatgacagcaagttcaatgtttttgccacctgactggaccacttccagcagcgccttgatcaccagtttgatggtcaaatcgtctgtttcaatggcatcatctgtgtagttcttctccagaaattcacgcaccgacttggcaccccggcctatggcattggccttccaagcatggtatgtgcctgaggggtcagtctgatagagtctgggggtgccatcgaagtcgaaacccacaattagggcagagataccaaatggcctgcgcccattgctctgtgtgtaacgctgcttcagactggcaatgtagcgggtgatgtactccacagtcactgggtcctccacggtcagccggtggctctggcactctaccctggctctgt

SEQ ID NO: 2369 - DNA, 568 bp, Rattus norvegicus
  Genbank Accession No. AI179953
gatcattaaagtttggtattctattaaaaaccttatttaattttaaagtatacaaaataatcatattttaataaatgacatttaggagtttacaaaattatatcagtgacaagcatgaaaccacaactcttatttattgttacagaatggcttcccaacgacattcttggcaggaagaagtgtcccctgttggatttgttgactgtcatcttgtggacaacacatcaggcagaatgacaatgctaaggttcaacttgtcctagaaaagttacacattgacctaaactagtttcttctattttttccaaatatcaacatttctgtttccagtttagaaggcaatgctgaaaagggaggcaaacagacattcaaagtagaaaaactcagttttaatcaacaggatttagagtctagaagtttcatcggttctttgaaaaccaccccatcttgtttctgcaccattaaattgtaccatggcagtgaaattcccaagcaaactcatgaagtcttttgatactgactgccacatcccacagctacagagtagacgagctgggggtggaggggg

SEQ ID NO: 2370 - DNA, 284 bp, Rattus norvegicus
  Genbank Accession No. AI179971
gcttcctactcaggctttattcaaagacccaaaggtttaggtgcaagggagggaaaaagggcccggtcaaaaggcaagcccggcaggaggcggtttaacgggacttggagggcaacacagtgctcacagaggcaaggaatttgtccaaaaaggcgtgcctggcgggtgtgaaatctccagggggggggcaaacccagggcaccaacaggcattggctcaggaacttgaaatttaccggatccccaccccgcttgggggcatgcaagacgatcaaaagggaccgg

SEQ ID NO: 2371 - DNA, 597 bp, Rattus norvegicus
  Genbank Accession No. AI179979
aaatgatcaaagagatcctttatttaatgtagacagcctagtaagtcatcaaaataatttataatagttagatgcctcttaaatatacatgttatcttctgaagctaaaagtaatatgcactcaaccagtttttaaaatctatttggaacattaaacatgataaaagtagaaaaaaaatctcttatgaagtcctctacgaaaggaaattgtgacaagttcctgttaagacagaaaccattccatctccaagggagaacaagagaaacatgaatatgaacagaaacacctacttcctgggtttatcctaggtagaccaactctttacagttattttctgtcttccctggataaataagaatcccttaacagcagcccggaaattaaccaattccagtgaagaccctgagatggctgccctgcagcaggttcttgccttttgcagtcaacaacatcttttacaaagcaccttgacttatggcaggcgtgacaaaaccaggtgaattagttgtccccagccagggcccggccacctttagccttctaggcgccactgttgggaaaaggagccatcacagatcgccatgccgacgtagccc

SEQ ID NO: 2372 - DNA, 546 bp, Rattus norvegicus
  Genbank Accession No. AI179984
aaggaaaagctcttttattgcagaggctacattgaagctatcggccaccttcctggaatgtgtaatcagtcctccctccctctggggttttctgtagcgcactgggacattaagtgctgctggggtccaggattctgcctatgaagaggagggcccccgtgtccgtgtccctcagaacaaagatgaacggtcggttaaggtgatagtcgagcgggaaggtgaggcggacaggctggaggtctgggttagagctggtccctgccccctcctcattccactcaaaagctgccctgtgttccacttgggtgagcttcacaggtttgccggtaatcttgctgaagtcaggggactcaaacaaggactgtagcttcatgtcctgcaaagagttggtaacgtcgccttcatagctcagcttcagcttggggacagtcagcacagcttggatagtcttcagttctcggccaatgtcatgaacgaactcagaggtgaggctctcctctatcatggtcaagttctgggtcaccgtcaggggcaggaagaagatcc

SEQ ID NO: 2373 - DNA, 586 bp, Rattus norvegicus
  Genbank Accession No. AI179987
aactgtaaccagctttattaaagatacttttcataaacaatcatggtatttcaggcaggacatgggcagacagtcaacaatatacaagaactttcaaattcccttcttgtatagactaccaaaatcagaaatccactataaaacccaatgaagtcttcattcaatgctttgaaaggggaagtagcttagagtgagggttgacatttcacattaaggaagttgtttaacaactttccacaagccgaccctgactgtcaggaactgaacatggcagaatcaatctgaagatccacaatcttttataaaaggaaccagtgatcttccgagaacacgcgaagtcactgcaaagtccacgtcgcccaatagactagaaaaccaattttgggggtgaggctcccaacaggtctctggttttaagggaattaagtctatgttgatggtacagggggagggaacaggatatagaaatgaatttagagtttcctcagaccacaaggcctttttttggccttggtggccacctacgcaagaccaggatgtctctcctggaagccaagaggaaccttttgaaattttcaaggaaaga

SEQ ID NO: 2374 - DNA, 540 bp, Rattus norvegicus
  Genbank Accession No. AI180015
ggtttaataaggaattgtttatttttgagaaaaagatcccaaacatcaggctgttcacaaaaataacccatggtataactttagaaaacaaatattaagactataacactattttcctgtaagatgcatttgacatgccaaccccattcacaaaaatacatggttccattgggtagtaacagtcccactcgtgtgagggaaaacacacgcctctaatgcaaagctgctctcagggttacaagtaaaggagatgcctctgcagttagggaagcgactactgcaatcgtgaacgggaataactgtactccctgcataacgagagattattttggagacagttgataaaaaccatacaactttttattgttaagtcaaagaggtatcaaaattaaagcaaaacttacagggtaagacttaacaaaactactaaggagcatcacaggaagtgaaaatggaactaggcgcagggcaattatgaattaatgaacacaggaaggataaggagggagaacagtgagaatgtgcagaagattctagggg

SEQ ID NO: 2375 - DNA, 472 bp, Rattus norvegicus
  Genbank Accession No. AI180032
cctatagcccagaacagacaccacagcaatcctctcaagtcacactgtttactcgaacaaagaaatgaaatggacggaaatctgaggaaatctttgctcagcgggtaagcaaatgttcagcatgtgaacatccagagcctctgaatgccactcaagattagagtacttccccttagtaagccaatcaatatattattcttaaaaattaaagtttggtcactaaaaaagactgaacaaaaagtatccccacccaccacagacaactaaatcagtcctacttactccccctactccccagacaaacagggaagtagcaggaacggaagcctctatgcgtgaaatctcagttcctaagacacgcaccgcagctctcgcttgaaccccagactgtgtactccattcgccaatgtgccccatttataaatttattccatacacacgcacgcgcacacacacgctcgcgcctcgtgcc

SEQ ID NO: 2376 - DNA, 452 bp, Rattus norvegicus
  Genbank Accession No. AI180044
ctgtaagagagtctctctatgtagccctggctgtcctggagcttccaatgtagattgtgctggccttgaactcacatagatcctcttgtctctgcctcccaaatactaggattaaaggcatgtgccatcatgcctggaatgattagggtttgttttgcataagacattggctgatttcaccacccacagcatctcatttaattttaattttcacaaaagttgtataatagatgttacatgaaaactattctgaaaaatcttattcatcctctgttgagggaaatggggaacaaaggaaacagcatttgtccaaagtcacccagcaagtagagccaatacataatcccagaagtgagcaacgcagagtccataaaatacccagatgcccttcaacagaggaatggatacagaaaatgtggtatatctacacaatggaatattactcagctatc

SEQ ID NO: 2377 - DNA, 403 bp, Rattus norvegicus
  Genbank Accession No. AI180087
acatggatttctgagaatttaataatcaatacacttaaagaagtgtttttttttttttacactgttgcgtttctttaaaagttccaggacatactaacatttcttcagaggcatgttcataccaacttgcacatgaaaattaccttccatgtcttctgaaactttgacaatgttcttcaatacattggtcttcccaattgtaacctatagcagtgaggttcctgtaggtctcctgcatcacatctttgtagagactcttctgtgaaggatccagcaaagcccattcttctcgagtgaagttcacatgtacatcatcataggtcaatgcatccatgtcgcaacttcggagcttgcctgaacatgcctcacagaatcctaacacaggacacagaaccctcgtgcc

SEQ ID NO: 2378 - DNA, 504 bp, Rattus norvegicus
  Genbank Accession No. AI180108
atgtaaggttctcttttatttaaaagatcattcacaaaataccatatccatagactcactttctgtcatagaactgaatgtgttaagtgtttggaattccattcttacagagtcagctgggcgcccagcagtgtggatggacgtgcctgttctgtcttttccgcattggagatggattagatcatctgaaagcatcagctttgattacaaccacgcaatgcatgtctgtcttaagttaggtattggtgttacacaaatggttcttatctcagaagcagagaaaatggcaggcgagggaaggagtgagagttctgtaaattgccgagaccttgcgacaaagacaatcatgagccaaggggtggctggcaggaagctgctggctaacgagcaagctgcgcacctcagcccttctttcccaaggctctagtggctggctgacccctacctgctccgactggaacagatggagaccctcgtgccgaattcttggcctcgagggccaaa

SEQ ID NO: 2379 - DNA, 535 bp, Rattus norvegicus
  Genbank Accession No. AI180113
ccaggttatatacttttatttttgcaaaactttaatgtcccaatagaaaatacaagtcttatttctttaactcactgatccagagtgaaatgctttgactgtaagcacaatgatcacaaaagataaacaagaacagcatcagtagcaagttttataagaatctgtgcagaaatcatgctggcactggccaggaagcttcatccctactagctagctctcacacttcttgaaggttctatttatatcactgaaggagaaattgttcagcattgaagataaccaactgtgtgcggcctgctagctacagaaaggacaggcctatcaaggtgtgtccactggcacaagaattgcacagttatgagagtaaccaaccactttctgattggatttaaggcctgctctaaaagatggaagcctgcttggtactgctaactagctaaacacctgtggttggggagaccattgccccaggggactatctaatgctattatactggtaaagggatgcagtaataaagtgccccactgggaagtt

SEQ ID NO: 2380 - DNA, 526 bp, Rattus norvegicus
  Genbank Accession No. AI180114
gtaaaaattgttttatataaagtgtagtttttgctatttagcaatataaaacgattacaatataattagttattaaagagctaaattcaacagttgcaaaccatgacagcagtgaacagtcccttgtacaagagttcatttggaaagaagtcaagtaaattttgtaacagatgacataaacccttgagccagcagtgcactaggatgcactacagccctgcccccggtgctctgcctcctccgggatggatgcggaacttactgctcactctttggtggttcctgtttcccattaagctcttgatcaacttgtttgatgcactctggtatgccgacgtactccatgggaacaagctccgccagttcagccaaattaaagacgtatctaatcttctgactgaattttgaactgataaatggtcttgtaacagccagaagtgttcggataaaccaagaggggtgcacaatgattagagactttaggtttttccttaatcgtctgtcgatttgctggtagcatctcctg

SEQ ID NO: 2381 - DNA, 545 bp, Rattus norvegicus
  Genbank Accession No. AI180170
ggttccacttaaattgcatgttttatttctcccaaccccagccatagcatagaagccccatatatccatcccagactggtttctagtaggctgaggttatagggagcctcagtagagcaccgtctcccaagagccgggcacaagcgttgcccccacactgatgaagccaacagtgcactggccccgtgtttccgcactcagtctgagtttacaacacaacctcacccttgaaacggacagtctgggagtgggggtgtgagggagtgaaactgaaattgcctattagctcacccttttcaacattaaacagagaccaagagagaaacggttccaacatttcaccacatatatttcttcttgtgcagtctaagccgagaacgccatgtaaatgggtcactgcggaggcagcgaacgcagcaatttagttactctccgatcagagggagaaaccaaccagtatgatctcacgtctactgacttctgaaggtttacagcagttaaagtattttgcttctatgtatgaaggttaaaaaaaacattttttt

SEQ ID NO: 2382 - DNA, 600 bp, Rattus norvegicus
  Genbank Accession No. AI180187
gggttattatgtgtgtgcttttttttaattgtataattcgtttatacaaagaaatcatttgattgatttatttacagccttttccaattttcagttccactggagatatatttcacataatggttaacaatgacttgaactgatcaccagtaaaaccctgggctgacatggggcctctgtccttctcccccctttaaagagcatgaccccatttctaatgcaaacattttgcagtgaagaatcacgagctttcttgaatgaagaaaaccaaccagaattaaccaaatttccaacatgccgtgtggcttcttctcaaatttagcatttgcaggtatgagaaaccaaagcaaacagagttcacattccccctggccttctccaacttcctacataccctcaggtcaggctgctcctagctccgctcctctggttcagccagacaattttagacaagttactctttcccttccctttactatcccagtctcctgccttctctcttgcttttctgacaacacaaaaacttccacccacccttcctgtggtttctttcagtagtctagaatacactaagtcatttcatgggactttatcaccctg

SEQ ID NO: 2383 - DNA, 545 bp, Rattus norvegicus
  Genbank Accession No. AI180253
acttcagtctacaatcagactgaacattttattttaaaatttatatatatgatcaattctcccacacagactgtgttttgatattccaatcgatcctggaggagcatcaagggtctagggatcaggagccgcagccactggtccgactctcttcttagtgggagctccttggccattttcttcatgccatgcttgttgaatttggattttcatccatgttatgatggataagagtgaggatataagccatatgaagagcaaaaaaggtatgcgtggtatctctgttgcccgaagatatccactctccctgagaaggatcaagctgtggtttattggttcagctcgtgcggaagcatgaaaaatatcctcagcaccctgagtagcaggcagaccttcttctacgtcaggagtaaaagaagattcctcatctgaagtagcagaatcaaatatttcttcttcacttgtactctccttgtaaagaggtaaatcaactacataatccaatccaatgtgactagctggtcctgagtcatgaccctcgtgcc

SEQ ID NO: 2384 - DNA, 457 bp, Rattus norvegicus
  Genbank Accession No. AI180259
caagtcattgtatctttaataaccgggcagtaaatcaaaacatggaaaaaaagtcgttccttttacgggcgatgcccatcaccacagactttagtgagtgagaggggattctaaacagcatgggaaggcttccaggctcacggaatgaagtgtttggttgctgataatcggccgggggacgagtaacacaagagattaacaagccctcagaggacaggtcgcggttgctgggtcatgagcaccttgaagcgtttcttgatggtgattcggtgtcttgagtatttgtcatctggggagaaccgagcaggatgggcagagcaagtctgttgtcccatggggtcaaatttctttagagtatagacgcgatcgccctgctcgttgaggtaatactggagaaacatgactgtccctcaacagaaaacacaccaatacgtttaccgccagccgccctcgtgcc

SEQ ID NO: 2385 - DNA, 475 bp, Rattus norvegicus
  Genbank Accession No. AI180292
tcagcacattgggatgtttagggatccaggttttaggaaataactcaactcagtaattgcccctttccttggggggctgtgcgcccgggaacaacatgaagagaaaattcagtatttcctgggcagaccagcaggtcgaaagtggttggggtctttgccactccggccccacttgttggcaaactggtcagctcttgagtcctctgctccgtgtcctgttaatctctgaataccctctctggcatcactgatgactttagcagcccaggctcccccaggaccccttcgggcggcatcatagttcccccgagcatggaagtatttgtctgagtttttccagttggcctttctcatgtccgagtaggcgcgccacatgtctttggtcccttgcccagcttccttcataaactggaaccgtcttttgctgtcaactcccaggatcaagaggcaaaaaacgatggcaatggaagacttc

SEQ ID NO: 2386 - DNA, 480 bp, Rattus norvegicus
  Genbank Accession No. AI180367
gccaaatttgttttaatatgatatatacatatacacacattcacagtcacaaaccagcatgacaagtccccttccttagccaggagagctctaccacacgcaggggtcctggagatgctcaagggcctaagtatgacagttttcacatgtgacatccattagggacactttaatcagaggtggcaaggtgcaccacgggtgtacatggcccggggcctcatgcaggcccagagctctgctgtacccgcttcatcagctcttcatcctgcatagacaactctgtcaacttttttcccatcctctcatggatgtccaagtacttggatacgcatcggtccagacacacagactcgcctttggacagctctgcctccttgtagtggggaggcacgcacttccggtggcaggcactggtcattctgttgtacatgtcggccatcatctccacctccagctccgctgccagttgctgggctctga

SEQ ID NO: 2387 - DNA, 451 bp, Rattus norvegicus
  Genbank Accession No. AI180373
acagccagtgataaaaaacaaaaacaaaaaaacaaaaaaaaaaaaaaacccaataaaatcaaacaaacaaacaaaccgagacggaactgcagaaccctgctgtggccctaggtgaaatagaagaagtgacacagtaaagttgatcctgagcccccagctgctaatattgctgcaaaagtgctccaaaaataaatttatgctatttaatcatgcaaactccaccgccttcctgctcacctaaaagcgtcctgtgaaaggcacggtttacagctcctgcacgagttgtagccgtctgcagacggagctcaggtgcagtcatgatttgtcagtcacatgcttaggtgcgggctccccactggcccctcttctggtcagtggtatgaggacagcagactatcaacgtggctgcccgcgagttttctttccttgttgcgcaccctgagcagttgac

SEQ ID NO: 2388 - DNA, 435 bp, Rattus norvegicus
  Genbank Accession No. AI180376
acataaaagactttgaattagattcattctatccagcatctgaaagaaaccttgaaattgatttttcaataattcatatacataggctgcaaggagggagacacacagtatgaccggctctgagtgctgccacgcccatctgggatccgcaggacctgaggcagctagtttggttcttgttgaagaacagttatcgaatcctctcagggtgccaagtaagaatccagcagcaatcctagttcagtgccgcatattttctttggccaatccttcctggccttgaagtccccgaggtgacagacgcctgcaccaactgcgcagggtccataggcagcactcagctccagggggggacgagacattggtactgggaacatgggcaccctggcaaggtgagcaggctggccatcaggcaatgtctgaggagctgtgggc

SEQ ID NO: 2389 - DNA, 492 bp, Rattus norvegicus
  Genbank Accession No. AI180392
ggcccttcaaatttttactaagactgtgcgttccaaccatgaaatgtagggagtcaagagctatctcactgaggacagggtttgtttggatgctgggttcctcacaagatgggtgatatgtttaacagtggagttctgtaaagtcaccagatgtaactgtaaaccacactgtgtcacaaaaggctcacagcacagcatgtgtgggcactcagggtcagtcggggtgagaaagggccagctcctgtgtggtgtggctgttagagcaacctgttgacctgggggcagaagtgaccagggcagaatgaaagcgtacagactggaggataaggctagtgctgtcttgagggaccaggacccaagctctccctcagctgtagactagtttggtgaagctggtgtcagcgaatgacatggatgtaatcgcatagaccagccactgcctgggccagcaactacaggtcccaagacaggcctgaggacctcagctcccga

SEQ ID NO: 2390 - DNA, 490 bp, Rattus norvegicus
  Genbank Accession No. AI180413
gactgaggcaactcggtagtttattctgctatttcagttgattcctcagacaagcagagatacaaatgagacattcaattttgattctgaaaatgtcttcagcacggtgtcacatctgatgcatccgttttccagaaagccagagaactgtgctccttgaagcatttggggatctcgatggtgccgtctatgcactgagcctcctcggtgtagctgcacttcttctccttatttttacaatagaagtgaaccttgtcaccatgcatcatcccattcttaaactggtcctggatcttcaccctctgcccttggtacaacacggtggccttcttaacagagagtttgcaagatgctttacagctcggcagggccgaccaatttcctgtcttggtacactccacttcttccgggccatccagtttgtatgtttcatggcaaccaaatacggctttatctttataagaaagcaccggctttgcagcctcgtgcc

SEQ ID NO: 2391 - DNA, 603 bp, Rattus norvegicus
  Genbank Accession No. AI180416
ttttttgaagtttgaaagatatttatttaaaaaagaacaaaaaagctttggtatttcaaaacccaacaaccatcatcactagaaagtcaaacacctctcccagggacccaaagttcaaaaacacagacccccctggctcaaagtaatacagaggcaatgtgcaaaccagcagagggcagggagccacgccttccccaggcagggtggccacaggcccagcctacagactgtgtggggcctctgggtgacaatgaggtggcagggatcagttgctgtcaccaacagtcctgattaaggtggaagaaaagccacccagcaaaacttcaacaaaaataaattagaaatccattcgagaaagaacacattaaattaggaacacaatttttcctaaacaagtctttaaagaggatctattcctgggatagaagaaacgggggaagtggaggggtgcgctcaacttcaagtattctccctaagggtttgttttattgactggaaaacttacacaagtcctcggccctccctcccctccagtgcaaactcttgtacccacaagcgctcctgagtcactgtcccccacaaggcacaaagggtcctcgtgcc

SEQ ID NO: 2392 - DNA, 607 bp, Rattus norvegicus
  Genbank Accession No. AI180426
gggatcaacagcatttatttcccttttgaggaattgaagagttgacatcacatcagagacttcagaattaacacgcagactggaaggacagcttctacttacacactggttcatgcttttcacatccacgttaagctcccactctgatcggtcgaggtacacacactctgtgacacttaacacgtaacatcagttttagtttgcatgcattcgagattgggcgacacccgcaggcactgtacttcagtgtttgtaaacttgagcacacccatgaagaaatgaaatgctaaatgctgcatgagtggtcaggaactatacatcacttcattacaaagtctaatccactgtgggaacacatcgactttattaaaccgattaacaagtttcatttgttgaaatatagtggctcctccccctcctccataaaacataagggcaaatttcctatgaagtttttattttaaatcagtacttatccaagcaagtttaaatagaacctaaatctcaaatgctattctgaagaagtgtggagtaaataattttggtaatctgtaagatggttgcatgcaatgtatactgtatgataacagcaccaaaccctcgtgcc

SEQ ID NO: 2393 - DNA, 597 bp, Rattus norvegicus
  Genbank Accession No. AI227688
acaccagtagttttattacaatacacactgacacaattagagaaggaatgttctggcatttctgagcatttcatggaaagcaaagtaaccatctaggcagtagtcatccatattttttttttttctaaacaaaaagcaagcctttacatgcgataactcagggaaacagtcttattcttgtctagaaaatatcagctagagaaaacagctggtgtaacatgagccgagaagggaagttttccttcaagatgtccaaatcctacctttcatccgagagactaaatgactgtcaggacacctcaggaggcggtgtgttggggctccatggcatctgcttttaaggcagtgactctgtcaccacaagtggaagggaagggtgagctggaaaccaagtcctgtatcatgctctttccacaattcatctgaaggtcacggttaccaacgttccagttctatcacagatcactggcaaagcatgacacgatcttcacaagggcgctgctcttgcaccggcttgggagcggaccactccgtgaccctggggagcaagcactacattgcctggagtccacaggcagttttggatctaccatgtaa

SEQ ID NO: 2394 - DNA, 541 bp, Rattus norvegicus
  Genbank Accession No. AI227690
aaaaatagactatgtcagaccatgcacaatgagagttcatttaatttattaaatgtcccatgacaactttgcttaatataggttttggtttgggctaaggtggcatggaaggcaacatagtaacgacatccaccatccacgtctactctctaagcaccaagacccaggatgattagtctccagagcaaaaggtactgtgcagatgtggttaatctacagaccctgagaaggatatcatcccaggttacccaggtgggtccaaccaactcacaaaaggccccgaaactccccagcagtggagaaccagacagttagtccatgacaagattcaacttgatgctgctggtcttgaaggggatagaagaagagctaagaaaaattggtggcctctagaagctgagaagggctcttagttggcagctgtaagaaaacaggaatttctaccttaccatcgtagggaagtgaattctgccaatagcttgaaggaacaggaggtgagccccaacttccagaaaggaacttagcctgggtcttaatctaa

SEQ ID NO: 2395 - DNA, 575 bp, Rattus norvegicus
  Genbank Accession No. AI227705
agaccacttattaaattagaaggctgaaagtaaaaatatatcatataatcaaagaaaaatctggacatggacccccatccccaaaataaccacagacagggttctgagaactattcccaccaacctctagacagtgtgtcggatgatgccagtgtctgtaaagagtggcctgggagggcgagggcagagcccatcgcaccacacttctgtcaattgggcaggcgttactcacaggtgagatgaaagccactggccatgtcagaccacaaatgtgcagcaggttacaacttcagccaaccaacatgtgcagagaagagaacagcgcaggccatccctagacccatacctacctaccctggagttggcctgagggcaggggccccagtgaacaccttgagggcagggcctccaatgaacaccttgtgaaattttgctaccaacatcaatcttcaaacttggcaagagcagcaatgatacccagaaagagcctggtccccacgcagaagcttgtctgtctctgctgtggcctctgcctttgagctccttccaagggtgacttctcaccttgagaagat

SEQ ID NO: 2396 - DNA, 428 bp, Rattus norvegicus
  Genbank Accession No. AI227734
acatatgctataaggaaacagaataagccagaccaaagttcagcgcagcagtgtttctccttcagggatgattcaaggctgcttcttaccctcttgctagtcagtgattaattttcaaatagttaaaaattctctccatttggagaaatacacagtccctacacaatgttttaaactattcaaccactaaaaatttgactcatacatgatttcattacatgtaccacatgacacgtatgcactatatgtaccaattattgggtgtgagaggaccttgggcttggggttcttattctcttgttcagcataactaacagcagggcttcgcacgacaggcagtagattttacattttctcaggagctgatgattactagatttgtgttctcacagggccaggtgcagagagagcattataaattaaatgca

SEQ ID NO: 2397 - DNA, 480 bp, Rattus norvegicus
  Genbank Accession No. AI227761
gcggtaacagctttaatctgtggtggctgacacatgggacaggatcctgttggcctcccatccttccatgccccagaggaagagctacttctcagggagctgaagcagatgccatgagcaagttggtaattggtgtgtttcccagtgtctcctggagacctgtgtttaaagtgagcactgcagggcggacagcagagacaggctgcaagtccttacacacagggcttggagctgggcacagaaaggcagggctccagtattgatatattatacatatatatatatatatatttcatatgtatacacagatagttttctctctggaaagtattaaaaaaattgatcaaccttcaatctataaaaaatacctactctacatgatagaaaaatctctcctccaagtttacactgatttacacacaaggctttccccaaaatgtacaatacgaggcaacgtcttaaaccgtagtgtagaaggga

SEQ ID NO: 2398 - DNA, 533 bp, Rattus norvegicus
  Genbank Accession No. AI227815
gggccaagactgcatttattcaggagagttgctcaatggctgcaagcagctcaggcctcaagacagattttgctggctcagctcctgctgcccttatatcctccaacactgaagcatcccaggagaaggtcagcagggcagagggtaccagcccgcattcattcagggccagggcctcgttctcctccagcttctgcccacccgaggccctcagttcaaagggcagccagtcgttctgtagcgcctctcgcacaaactggaagagcacagatagcttctcccgggcatagaaggtccctgcagggcacagggcatgaactagaggtggtatggccagatctctacccaccctaggctagggtagtcatgcaccttgcagtggacagccatccggcatgcgcacacgcagaagggcataggtatacttgcgcagctcccgctgctcctccttctctcgcatggctttggtcctgagtgaactcagccgttctaccgcttctgttctgagcctttggtcacgctttacctcctca

SEQ ID NO: 2399 - DNA, 590 bp, Rattus norvegicus
  Genbank Accession No. AI227829
aaaagtcccactttgactttattggattaaagcaaaattaaaatttggctattcacacgtatgttacagaggaagaagagtcccgaagaacctccttggcgtttggtggagccacagaacacggggcattgacaagcatcagagaacaaacaccaagcagccttagatttcacgatcactccgaacaggacagaaatacggaatacagccagcgtccacctggaagagctcttcgtgtacaaatgatacgtatttatgtatagttaaaccagtcaccacgaaggtgagtctttcgtccgctaataagcgggggatgaattctctccagcttaactggcgcggtgtttgaagagcaaaatctgtttattaaaactacctgccccattcaaaaacaaacagaaaccaaactgaccccctcttcgaactggggcaggggggcatactaagtttcagtaagtggcagggttcagagggggatcgggtcgggagaaacatttcacattacttcgttaattgttagggacatggacgtgggtaaggaaccataatgacaaggcaaagtctcttcctcgattactgcaactggcttg

SEQ ID NO: 2400 - DNA, 654 bp, Rattus norvegicus
  Genbank Accession No. AI227854
gaggggctgagtcatactgttcactgctttattgagattcagggagatccttcccccccaagagacaccacagtgtgaaagggacgccgcctcccgccccgtcagtccatctgtccgtgccttcatttggtcaggacgcgcacccactattccactggaaacagcctccaacctgtccccatttctttttcccttaagttctgaaaaataatgacgatgataatgaaggaaaggaaaccacgacgcagcagatctgagaaatgactgaagagaatgaaggtggacgcacgagagcaaagaacagagggaacatttgcagatgaacctaaggccaaggagagtttttggatggctcaaaaaacatggactggggggagcccgattaactgtgtgtgttgggtgttcacggctctactggaagaagacaggacatgagctagacagacaactggaatcccaattactcagaaggctgagacagccagtcagggcaacacgaacgcatgcacacgggcgcacgcgtgggcacacacacacacacacacagttcacagaggcatacaagtaaaacataagcagacacaatgcgtgcacatgagggagacagcgtagcgtgctcaacgcatcatacacacctaccggagcatgccactt

SEQ ID NO: 2401 - DNA, 537 bp, Rattus norvegicus
  Genbank Accession No. AI227872
gaaatgcatgctcttaaataagatcttcatagatcatcttctggtttttcccctatggtaaggagcaggaatttcacaaggacgcttgcatttatgtctgtctgacagtctgctggattcctatagaatggccagacttacaaaatacccctgattccatgggtaagtgaatgaaaaaaacatgattgataatagggtaaataatgtagattaatgagttttaagagatgtttcatgtttttattgtaaggaaaaccgagtctgaaaggaagtttatctgcaacaaaagatgatcagtatactaagctgcggagcagttgtggctgggtgacagacatttaaagtaaaaaacaaaacaaaaacaaaaattctgctgcaatgcagtgactgcgagtgggtgacactggacagcattcaggagggtgctctagagacgaggagacagtctcaaagtggctccgagaagccggaagaagtttggttctggatgtgcacttacccctcagccccagtaaacgtccctggtggaggattaca

SEQ ID NO: 2402 - DNA, 508 bp, Rattus norvegicus
  Genbank Accession No. AI227885
tcactaacaaggcatcctttatttttatttgagttggccaaatgaaatgttctacacaaggcaaacatttccccatgaaatatttaaatcaatgataaataaatgagtcccagtctacatgtaaaataaatctccaggtgccacacacacatttaagacatcgattttaagttaaataaattcaatcgttggagactctgtgacctgtttggttcctaactttgttgtggatcccaacttaatatcatatgtgacattggatggttcactgggacacagcacttgatgctcaagtgtccagactttgtttggacatgaggggtcaggtgctgagggtctaaagcaacggtggaagagcagcaaacagcaagaacctggaagttcatctttgacctactgccattttccagttctcccaaagcatcgggaacaggagagcagagtccacagagcatcagaagcgagcctgagacccgaacagtttaaactccttcttgtgctaagacct

SEQ ID NO: 2403 - DNA, 613 bp, Rattus norvegicus
  Genbank Accession No. AI227887
aaacaaggaaacaaaactagcactcatcgctttttagacaatacataattattcaaaattaactattaccggaagggcaagggggccatactaatgggccttgtctcacatgagtgcatgtgggtaggtgcaggtcgtctgtcattattgcagaaacgaattttaatttttaatctttagtttgatttaaacattgcttttagtatgatgacaacaccagctgtgcagaaagggctctggagatgcgttcatagcagcacacacctgcggctcttcttcggttctggaggctccaaggcagccaatattgcttcatcaaacacattctttaggcctttctgaaaaggggtagaaagaagaaatgggcaatctgactttcagtatctcaacagaactggagttcatgtttaaaacagtcaaaccccaaagacagtgagcaaacaaagaaacattaatgaccctgaaaccatcctaataaacttgcttcactcagttgtcttgccagggcacaggagagattcagcaatgctggcacagatgagcagatattcgttaagtggtcctctgagatactttttgcaaaccaatatatgtcacaagaagcaaacaacct

SEQ ID NO: 2404 - DNA, 663 bp, Rattus norvegicus
  Genbank Accession No. AI227894
agcacagtaacaaatgcagacataagaagtctaaatcaaccaatcgactgagcagttcctactccgcacttacacttaacagcttaaggtatttcactacagctttccacaaagcctgatctaactcttgaagtaatttgcatataaaataaaatacattaactagtggtttcctacatggtgtcttgtagtcagctgtccattttacatatacgaggtaacaaactcatctttgcaaacttgttaaataccattgtttccttctaagaaggaaaaacaaattccaacttttttaaaaaagaaaataggactttacataaatggccgtgtgtgacctatacaaattgaaactggttttgaaagtacagtagactacaatcaatggaacacaagtgtctacacatgcattctttcctgttgtactaagtcagctaatcttgcaaagtgacagctctaaaagtcgctattaccactgtgtctactgtagcaagataccttaagttacaacaaaatcctgggaagtaagactgaataatatctgttatagaaataccctactctttaccaactcccacccccaccctttcaaaatcataagcagctctcttctgtgacagacaatcatgtaagaactgtgaaaacccagtttatgtagcgtatctc

SEQ ID NO: 2405 - DNA, 582 bp, Rattus norvegicus
  Genbank Accession No. AI227935
tattgagacataaagtacaaactggtgacatacaaatattaaaaatagaatgttttattatacgtgagccattagatactgtttgcagggcaagtcctactatagtgaactacaaggaaacctacgtataccagccaggcacgagtcaggactttggtctttggttatgcaaatggaggatgacaaggagctgaaccagtacctgtcgagagtttaggaatactgttaatctaggcattgtcctcaaagagataatgaaagtttaatgccccatcttccttcagaaacccaaattgcaaatgcaaaatttcaactcctttctcctccttgccagaaacagacgtgtactacagtgaaacagtcactggtcaggcatggcaatggagtacgtgctttgtaggcaggagcaagcagtgaacactgaaggggcatgtgtttgttacggtcacgaagaatactcagtaaggctgctcatcgtgctgttacccagagtgtagaatatcctacttcagaacacactcagcggtgagtactgagactcagtgccttaatcacgtgccagctatttaaactaaatggcaa

SEQ ID NO: 2406 - DNA, 693 bp, Rattus norvegicus
  Genbank Accession No. AI227941
acattctgaagttctttatttatgtcaatgaaaagaatttcattatcctataaagtcacagacacttccacttcaaagtattacaatcaaccagttttcctataatcataaagtaaaagccttgtcaccttcttggcatgattaacaaaacagaaaagagaaggcagagctcacaattgttctgagcttccatgtatgtacattcctggacctgatacaatttaattcaattcacttactagctgatgactgtgtgaagacacccacatcctaatccctagatcctgggaaagagatacatggcctaaaggtgttaaggctgcaggtggaataaggatgctaattaggaaccttaaatcccatgagagcttaggccaggcagaagaagggagtcagaagggacctaaggacccacacttgttgcctgagaagatggaaataagggacaaaacaatcaaataaaccaaaacaaaccaaacataaaaacccacacgagcagactctagcatcatgggacggcagaagtcatcccttatacgggccccagaatacatcgcagccttagcaacacgagctttgctgtcagcacagtaagccctagaactctacagaattgagatgaaacagtctgttgtcttgagacatggcgtctatggcgttttgttagtgcagctacaggacactaatccagcg

SEQ ID NO: 2407 - DNA, 581 bp, Rattus norvegicus
  Genbank Accession No. AI227953
cgctccggagcttctgcttgcgccttttggccagcggcgcgttctccacactcttcaaaaagaagccctcgcgctttcctcggttaaacgccatgaaagtggcattgagcccggagcgcactgctggcccagaggactccagcacatccggcgtgcggagcgggggcgaggagcgcgcactgccgtcctgaagccacgagctgctacgcagcccctccagcttcagccgcttggcggggtccactgtcagtagccctcggaccagctccttggcttcctccgaaacaccttgccaggcttccccgtccagagagaagcgcccttcacggatcttgcacatgatctcagctgcctggctctgtccaccctggccagaggccccttggaagggaacctgtccagacagcatcatgtacagaatgacacccaggctccaaagatcacaggactcgtcgtacccctgctgtgccagcagctcgggtgcagcgtactgcagggtgaagcaaggcgtctgcatgggccccgccgggctctggggccgcagtctcgcgaacccaaagtcgatgatctcctcgtgccga

SEQ ID NO: 2408 - DNA, 564 bp, Rattus norvegicus
  Genbank Accession No. AI227972
aaaaaaaattaacagtacattttggtctgaaatggtccctcgccgaaatgccaggtagctgtagttctggctttgcaactgaaaccccaaatgttcaataaataacagaactagttgcccttctactccacaccagcttgtcttagctgaagggaggggaaaagggaggccagaaataggaggcagtgagatctaggaaccatggtccctggggtagggtgagggcatgtataccctccttcacttaattgacttgtagttaaggaagagaaaaagttaaaagtagctcagctttcatttttggcctctgagctagggagcttagaaaggtggaaccttggtccagctttggcagaatgaggcccagaaaagggacagtaaggcacaaccctggcttgaagtcagggagtcaaaggcaaacagctagctccagattcttaggaatgaagaatgtgagttatgactccaacccttagagctgagaagggttagcaggagaaagggtaacttggaaggtagagagggaaatgagaccagacagtcccgtcttaacaggatacagcc

SEQ ID NO: 2409 - DNA, 332 bp, Rattus norvegicus
  Genbank Accession No. AI228004
  misc_feature (1)..(332): n = a or c or g or t
agcccangggctcgcggacccgggagcgacaaccatggactgcagcctattgaggacgctcgtgcgcagatactgtgcaggggaagagaactggtggacagtcggaccatctacgtgggacacaaggagccccctccaggtgcagaggcctacattccacagagatacccggacaatagaatcgtctcctccaagtacaccttctggaacttcatacccaagaacttatttgaacagttcagaagaatagccaacttttattttctcatcatcttcctggtacagttgatcatcgacacacccacaagtccagtgacaagcggcctcgtgcc

SEQ ID NO: 2410 - DNA, 494 bp, Rattus norvegicus
  Genbank Accession No. AI228052
gaattgtaacagatgcttcagggttttacatataaggcatattacaaccttaaaattcatgtgtttttttaaaaaagattaaaagacagttacttgatatccatataatttatttggtacacctatcaatttctacaataaactggtgacaaacagttcgtgtagtgcccgctccacatctgtaatgacttacaggttaagcatccctaatttgaaaatacaaagttttagaaagctccagaattggaaatatcagaatgttaacataataatgcacgtggaaagttccacagtagaccaattgccaagtcacagtcaaaagcacgtccattaaaaaacaatgtttttctttcacatgacacacatgaggctcatacagcaaatcccaggtgttccattatacatctgaaaagggttccaaaatgggaaaaaagaatcttaaaatactcgtggccccacgcatttcaggtaagagataatcaacttggatgtaa

SEQ ID NO: 2411 - DNA, 429 bp, Rattus norvegicus
  Genbank Accession No. AI228068
aatgctctgaaaacactttattacacaaattacattcagattctgaaaaatagtgttctaacagtgtaaccatctaaaaataagacatcccggaaacacaccaactgaggagaaatttaaaaaaagaatttaaatagagactttttaaaatttctctcattgcaatataatgttagtgattttaaaaaaatagaaggagatttagcagcttttcgtcgtgtggcaggttggttctcttcactgccacaggctgagaatgctgaacaggaaaggcaccaaagaaagacactggcgatgggtgtggactgggagaatactgtgttcaagcagagaatagggctatttacatccaccaactaaaacgtctccaaatgtgaatgagctaaacttccctcgggggttggagcgctaccttggaagaggagggcg

SEQ ID NO: 2412 - DNA, 509 bp, Rattus norvegicus
  Genbank Accession No. AI228195
ctgtacaggatttttgtttatacattttagtaacgggcaacagtgcaagggctacagggagaataagagttcgagagctggggtttggcgtaaattttacaaagtgtataaagaatctgtgtttctctacaataacaaaaaaccaaaggctacaagagcagttgtatatacaaaacacggagatattgcttcacttgcagacaggttcctgaccagacaaggagacgagacaagagaagtggggacgggcagaggagagcgctgcgtgcagaggaggaaggaggggggcaagggtgtcttctcccagcataaatctacaggcaggagcaggagtgcgcaggcctgggaatgctggaggccgtgctggcgctggcgctggcgctggctatggtggtgtaggcaggaggcagagcccagaatgtccacctgctcagcccctgatgcctggctcttcgggtatcagctcagagagggtttggggtggggatgcagggccagctgggtcacct

SEQ ID NO: 2413 - DNA, 588 bp, Rattus norvegicus
  Genbank Accession No. AI228236
caattactttaataaggtgttctgaggaaccaggaaattaacagagaggggcgaataagtaatgcttcttaagccctgctcagtatttcgtcagtcatcttctggtaactggatcttgctgggatcaaaatagttggattccatgatggggaggccgttgagttctcggtatttcacaagtctctcagcttcccggcgggcccactcttgcatcctgtaatcaggcaggtaagccacaaaggtggtaccaaaaaccaggacgatggaaaaaccaaagaagaagacagctcgcatattccagacgtccaccacagggtcactgtcataaccgtgaaagtctgggttcttcgcgtagaggttttcgtcctcgggttctgggtcctcctgccataccatggtcggttctctttgccgctttctctccacaccggacggggcgattacagccctggaagattcccagcgaacacgggcagccgggacctctcgtatcgccgccgctactgacaggcggcgagcatacaagcttaacagccgggccgccatgaccgcttgtactgaggagtccagggggtgggggcggggtgg

SEQ ID NO: 2414 - DNA, 448 bp, Rattus norvegicus
  Genbank Accession No. AI228254
attatgaaaacaaaacaaaccccttaggaaaaaggttcatgattaccagaccccaaagtacttcctaccgttttttactttggggggttgaggccggatttgcaaaaaacaagctaaactacttacaatggactcatttttaagtaactgacatttacaggagtatcctaaaaacggcactaaaaagtttaagaaaagttacggtaaacttgcatgcacattttccagaaaagaaacgttttaaatatttatatatgtatagatatatagatttatttataaaaaaggaaagcttttggaagtgttatgccaggaccagggacagtgatgaacaggacaaagctttaacaggggccttgcgcttcccaagggactgcaaaggcatgacagttgcaaaaggacaaaaccaagaaaaccacacaagaaaatgtttccagtctgtaagcaa

SEQ ID NO: 2415 - DNA, 632 bp, Rattus norvegicus
  Genbank Accession No. AI228256
ccactgatttttccaatgttttattataaaaatcaacatttcatttgttacaattcagctttttgtaataatcaaaagggggtttatacaaggtatttatacagtttataattaaagcacttattttacaaaaaggggaaagtgaataagtggacaagggctgaccaaatgttggtcattatagtataaatacatccttgcaaagcaccaccgtaccaaagtcgatgtacaagagacaccagctgactttaagacaatgataaagattaaagcttaaagaaaagtttagactcacaaaggacaagcatccgaaagctgcgccagatccttcacctgcaacaaggccgcaggctcagcctcccatatcctttctccagccacctctcagcagactgacccaagcagtctccttgcttctctctcctctaatcctcatattcaggcatcgatacagacacacatccacatggatgtatggctttaccactcctcaactcccctttgtttgatggaaaaagaggcatgggataaggaaaccccaggaaattaaaaggggttctgacatcttaactaatgcgtgatgataaacttgtttagggtctacacccacacttgtgcatggctgtcatctg

SEQ ID NO: 2416 - DNA, 400 bp, Rattus norvegicus
  Genbank Accession No. AI228269
acagacaattatttacttataatcttggcccctttgtggggtgggccaaaggtctgggcccagcatgcacccccacttctttggggcccgatcctccctcaactctgctaagtccacaggggccagagtgtcataccagtggaggtggaggtagccacaggagtgtagcagagagtacagagccacaatgggatacacagaagcaagggcacagggacagcaaccaggacccagtgctgagtccaggggggcccaaaaggctttggcctgtccatcgagatgagcctcaaagcaggcggcaggcattgcccacactgtcagctgaggtgtcaaggttgtggctgtatggggattcccagtctctcaggaaaacagcctccagctggctgcgcaagccacc

SEQ ID NO: 2417 - DNA, 513 bp, Rattus norvegicus
  Genbank Accession No. AI228284
ggctgccatcggtggcatttattttggaggtaattagcactaccgacatctcccttcggttttttaaaaataaacatcttacaagcatcttacaggccagagagtaaccaagaatctggttcacacacttacaatatccgggggaagcttggaggtggcacagagcggactctttggccatctggtgagccaccgagaccatcagagctgttgtgctaagtagatggcatcatcgtgtgcacgaaaaattcttctgcccatcaaaagggacggtactgtaataagaagcatctagaacattctggacccaggagccagccaggtcagcacaaggctgccgagcgtaacacaatctcatgatgagctcagacaggaagccaaatacagtgtgacccgtgtcgggccagcggcttccatccaccccaggtgctgtacacatacccgtggaatacaagggcaggacagggcagaacttgaggacagacaagccacccgcagccataactacacact

SEQ ID NO: 2418 - DNA, 461 bp, Rattus norvegicus
  Genbank Accession No. AI228291
acagagctttaaaaatatatatttattgagtgtctagcacaataaaagccacggtaccaggcaggagcaagctggagataggaggtgaccagggcacacagctcctgccctccatgagtgagcatccccagtgagggataaaaaggaagtatccaatactgagtcaaatgcatacgatgttattggttgagcgacagcactaggaccaactgactaaaccagaactgaaggaccgggaccgggctcagggggtaaccagcagactcccacattactccgagaactagcctaggatctaccaagaaaggactgggagcagggttccgtggtggcacttagcttatacaaggccctgggttccgtccacaacaccacaaggaaaacaaacaagcaagctacttgttggatttgaattcactgttaatgttgtcttttcacacaaatgaattatagatagattg

SEQ ID NO: 2419 - DNA, 505 bp, Rattus norvegicus
  Genbank Accession No. AI228299
cctttcaccaacctcacagagggcttctatttgtttatttaaaaacaaattttaaaaagtaaaatgaaaccaggtgagattaagatacattaaccaaactgcaacgtagaaaaagggacttgctggaaacatgacggagaccactggagatttcacagacacacagaagagctcacattgtcaacagaattaagctgctacgaattctccccagaacatcaaggtttcattttgctcagcctgagatctcgctcaatttcaaactgcctgtggtccacgcgctccagaaaagctttccgttcgatgtacccctctttccctcggttatggatggccagctcttcaccaatcccttcttcctccttgaagctctcccagtccaatttggatttctcaagggtgctcattttctgtttcttggctccaattttccctaaaaggctgctcatcccacttgttctttttatccctgacccagcagggggtggtcttgtcacttcagccg

SEQ ID NO: 2420 - DNA, 462 bp, Rattus norvegicus
  Genbank Accession No. AI228301
ccagatggacccgttttatttccaaacaagactgcaagcataaataaacttccccagtaccatactgggttttcattctataaaatgtatttaattcctaaaactcttcataaaatctgcctttccccttgcagcggaaaattggcaaaagtcaaaggttgaaaggtcatgcacaaaacattccattcggcatcattctgtaagtctgtgagtctgtgagtccttgcaaatggacaccaagaggattcctgcttcactgtactctgcagtacctcaagattttccttcagtattccacagtgtgacctttccataacacagggaagcgaggccaagctgtcgtagactgaaaagatctgctgttagcctgctgtggagcgtaacatatctctaagaataaagccctaaagagaaaggaaactcaagtttgccatcaaatgcagtgggtggctcctttgcccc

SEQ ID NO: 2421 - DNA, 475 bp, Rattus norvegicus
  Genbank Accession No. AI228313
gtcaaataatttgtcatgttttaatgggatgattaaaataaaggctcaaataagttttcaatatattaatttctttaaagtcatcttcaagcaaggtgctgtttaagaaaaaaacttagctttgtccacagatattaaatctcaaaagctacccaaagtaattttgacattggatgcagctttaaacaaaaaaaagaaagaaagaaagaaaacacctaggtcttctcaaagcaaattatacaattagagcccccaaatttgtaaactaaacattctgacacaaatgcaaacttaagttggcaacattaaagaaaggtcacaagtgcatgtgtagatgtagtgcttgccactgagtagagaaagtgacgtccatttggccatcagagaaggggactgcctagaaacctcccaaaccagttagggttaacaagaccctcccatcatcctacagcacacaggaaaaccagaaaagaac

SEQ ID NO: 2422 - DNA, 356 bp, Rattus norvegicus
  Genbank Accession No. AI228348
aaggactcatgaatattttattgtatggcttataactcattacaggtttgaggtggttacccgcacagtagattatgagcaaacacactggtgggcaggatggagcagggttgtgagctggggcttaacaggaaagcatgggtagcagaggcactgtaggagaccagactcagacggacaaaatgtgggcatgaggagggaggagcttagcagggaagttccaaacacaggtggctgggagccagtgtgccaacggaggcctgcactggagctggtttgcagggtcccttagcacaggcttttgtgtaaacttttgatgctatgctacgaccacagggccgcacagacctcgtgcc

SEQ ID NO: 2423 - DNA, 332 bp, Rattus norvegicus
  Genbank Accession No. AI228419
ggaaacattcagtccctttaatagctttgttttggggtgaattcccctcccctggtgaggaaactcagaacaggcgggcgtaatcctcgttggggagtctcagcgaccatgaggaccaccatccacatgcaggcggtagttggggcctcggcagcgcctctcggggtgccgggggtccctgttgcccctcaaggctctgtgggccaggggctgcaagggccggccattaccactgaggctctggaagatctgggaggggggattctggctcaggagtctcagggagtgcatctggagggaggtcatacttgagagccctgccaaggaggatt

SEQ ID NO: 2424 - DNA, 395 bp, Rattus norvegicus
  Genbank Accession No. AI228422
ggcaggggcatattagtcaggctgtacctgctttctttgaccttctctggcaagcagactgcatcaaagcgagggttctggcctctgaatctggagtaaaggtcagggaaaacggtcaggcttctatgaccctataacccaagctgggtctaatctaaagactgcagaagaggaatcatgggaggccctgttcttgattctggctactcggagagtgataaggaaaagtcgtgggtagcaggaaagacatcatggccctgttgaccgccctttggcaccagcctggtttcttcagagagcatgggaatctcgtgagcctaacacttgcccattttgaactcttactgattggagtctggcacatagagtatggaagtgcacagccatagatgctg

SEQ ID NO: 2425 - DNA, 450 bp, Rattus norvegicus
  Genbank Accession No. AI228438
aaaattaataaaaatattttattgaatttcaggaacttggtactttttaaaaattccaaatctttgcacacagatcagcactctgcttactctggaactgcagatgcttggacttcacgattgtcacttctctccttgtatcacacagcatagaaaacccaagtcctgatgctccccaaccccttctgaactactacagctactctgaccagcccctcagcagaggacagggaagtggggtggggtgtgtatggagaccagctgctgtctgaatacattctgcagtgtgggggaatagctataccaagttatgccacacacattctggaatgcaccgtacccaggacacaggtgagtttccctttgagtactgtgtggttcaagccaacactgctgaggttatctagtccctgagggagctcagaagtttggtaaaggtcaaagagagac

SEQ ID NO: 2426 - DNA, 404 bp, Rattus norvegicus
  Genbank Accession No. AI228502
atattttaagatttttttttaatgtatagacatttggacacaagggttcaggtaccaggtaaggccagagaggtcactgggtcactggaatgggagttataggcagtggttgtgagctgcccaacctggggtttgggaaccactgagccatctctagccaacttgtctggtttttcgagacagggtttctgtgtagtccttgtcctgtagacctggctggccttgaactcggagatctgcctcctaagtgctgagatcaaaggtgtataccaccaccacctctaatgaaatgttttaatgcactgaaatagggttaggactgatgcccagatggagaggtaggcctacagacccagcaaggccagatatgtgattgagagccacagtgggtccaggctggggaa

SEQ ID NO: 2427 - DNA, 536 bp, Rattus norvegicus
  Genbank Accession No. AI228540
ggctgtattttcatttattgaatgcagcttttgctggttacatggcaactcaatataaacagcccagtggagggtaggccattaactcttgttctcatcaatgtaaacacagcagtaatagtgaagggtaaagaaaatgggcccagtgtttgttccatatgaacggtgaggaggtgcttgccaacactcggacaggtcctgaggggaaatgaagttcatcagctccctcacttccaacagtgaggcagagaagaacacagagatacccgacccacttcttccagtggcttcaacgtagtcatatgggtgttcaaattggacttctgcgaactgttcaagtccctctcgaggcctaagaaggggatcataccttctgtgagtgtcgaagtagttccatgaagccctttccttgtgacttggtcacggtccatagaaaatgtgacttgcatatagtgtttggcttcatatttctgtagtccctgttatagccctggatctaatgagtagaaacttgaaatcaggttgttctcagggtt

SEQ ID NO: 2428 - DNA, 611 bp, Rattus norvegicus
  Genbank Accession No. AI228596
caaaaataaacaatttaactttattaagtcatgacttcagcccttacatggatttgttttttaaaaaaatatcagttcagactattattgaaagtgactatgcacaataaataggaatggcctgcgtgtgctgcagacatgggacacaaaaggttggatgcaatcagcaaagagtgcaaagcacctgggaggaagtttcaaatgtctagaaaagtagctcagagctctggaccactcaccaaataaaacaaaaagcaaaaacaaacaaaacaaaaaccccactcagtacatctggcaaacaacttcccaacaacactgaactatctcctgcgacccataagaacaatttaaaatacccaaagtgctaagacctcattagcagtactttaaatctgagttttaatgttaaatatgattactcgaataccctaaactgtatgacatgcctaataacaataagttacaaatattcaacctaataacttagacatgatatggttaatataacagacattgtatctcagctaacctttcatgtaaggtgagaattaaaagacttgttcatctgtgcactcaaatgaggaatgtggtatcctagcaacagtgatgac

SEQ ID NO: 2429 - DNA, 592 bp, Rattus norvegicus
  Genbank Accession No. AI228624
agggacccaaaatacagagataatttattggtcacgcatattgtcccttgcatgtttatctgtatagcatgtgtgctgatcccagcagagacatgaaagagggcattgtttttaattggcaccatgtgggggcaccaagacatgaaccttctgtcctctagaagaacagctaacggaaatctttatagctgatccatcttgacaggtcctaaagataaaccttatttaatctgcaaagtgaaaaagttttgcaaggtcatgcccagagctaaaattttgacgctttcctttgcaaagctgaatggtgaaggtgtcaagaagaccagttctcagagagaagactttaatgaatatattttacaaacacactggagaatcaggcaatgcttcctgcattggatgcaatcctgggccacaagtctgcacactcctttgcaactggacctgtgatagcagaacctttcatctcgcctttattgtttactatgacccctgcattatcttcaaaataaaggaacaccccgtcttttcttcgatatgactttcgtagtcgaatcaccactgcaggatgtacctttttccttagttatgg

SEQ ID NO: 2430 - DNA, 617 bp, Rattus norvegicus
  Genbank Accession No. AI228628
cacagtacacagtagttatttatttaaatacttgaaaaggtcaatgatggaaaaaataggtttattgtgagagtttatattcattagatttattttaccattaaaaaaatgttgcctctaggttatcctggccagatatagaacagttcatgacacatgcagctacggcaatatactacacagacacagccatgataggacggttttcactctgggtgagtcagcggtggtcagggtggcttctttaatagaactaaaaacattgataatatacaaattgttttccccatttgactgaaagggctataaaatccacactctgacaaagaagcaatgtggtgacacgggtaacctccgctacctgtttctgcctcaggtcctcagccacatactcagctccacaactttctaggtttcatgatggctttaatgccggcctaccacagtgacggaaacagagtggttttggaaagctgaccttgactcctgtgtgatcttaaaagtggagagaaatggctatagaagccaaaggctcattctgagtccccttgaaataacgtgtgatacctgagtaaacacaacccctgggactgaacctaacaggtgggccacacaac

SEQ ID NO: 2431 - DNA, 586 bp, Rattus norvegicus
  Genbank Accession No. AI228630
cccacagacagtttattgggagagccacagccagtgaaaaggtggaagaagtcctgttttatcctcttttgttgaagctgctggccaccagcaaagacaggatccaatggcaagtagggccctgcggagcttctgagacccacacatcagaccagtctcttcacttcaaaggccaagtatgagagcagacacagttcctaccccagagggtgctgaggaaacacgtccctgcccaccctgtcctccctcaaagatctcagaaagaaaggccagtatactgggccctggttggtcaatctaactcttggtgtgaagacctgggcaaaaggctaatgggtctatttagacctcgtgtctacactatgagccatatctaacatcagaacatgattaaaacactcaagactcttgttggcagaagctgcaccccagataatggatgtccggccacattctggctagagatagaaatccaagcagactgggtatgaatgcatgaggaaaccacttggcccagtttggggacgggtagtccaggctcagcctgggcccaaactttgggtttctgtctctcactacccagtgt

SEQ ID NO: 2432 - DNA, 634 bp, Rattus norvegicus
  Genbank Accession No. AI228642
acttttccaaacactgtttacttcactaaaatctggagagaggcaatgaaaaggtacgccaacccctgggatgccaaactaggagtgtacattgacaacagcaacatacagggccaaggtgctgagggccagcaatcctgtcaccactgcccgggccagcagcgctgtccaactacccaaggagcagagatggacaaaggtctccatgacaaaggccttgtagacactaaggaacattaggagaagaacagcaggccggaaggtgtggtacaggtcatagcgtgttatcatccagacctgagctgatgcaacaatgtagtggaccagactgatgttggagtcaatgctcatctggatatatttccagtcaaattcaatgcctcgggctcccacccagagagggatgcagcgggacataatgagttcagcagtggcccagcccagggcagcaaccatgatcttgtactcccccttgcctgcattccgggacatgacaaggtttaggcctatcaggtctgccacatccacactggccttcatgaattccccaatgaagtcatagatgcccccttcccaggtggggaagaaagtggccaaaaacaacatcttacatagctgcacaaagaggtaggtg

SEQ ID NO: 2433 - DNA, 575 bp, Rattus norvegicus
  Genbank Accession No. AI228646
gagcgtcgtcactgtctttattcccgaggtgggctgtgcccacagggcccatcttcctactggctacctacgacacactctgctctgacattccctgccacagcctggtgccatcatggcccctaccaggtcagctctctttcgatctcaccacctgttcccagggccaagaaggggcgtgggaatacccacgtccactggacaggctgacccttaacagaaatggtgctggtggctgtttcagggctgatggcacagtccgagggccaatactccaaactccctgtaaccccacacactgaatccccatgaaatcgagaacaggacaggcacagaggggtcaacgtctgtgtctgctgcctagacggggatggagcaggactggacacaaaataggactggctgatgtctgtgaagacggagggaagctggaagaagagacacggatcgtcggtccacacgctgggcacaagtcacaggcctcagtcctatgtggcacaggccactggaataaggcaggcaggggcacctgctgggacctgcaatccaagcgtgggtgggcatggaatgctggc

SEQ ID NO: 2434 - DNA, 591 bp, Rattus norvegicus
  Genbank Accession No. AI228649
cctatcacaattcatatttatcaccctgggctgggctgactgaggacaagaggaggatgggtaggtgacaggctggaggataaaatcacaggggaagagagggtggacggacgacgacgacgggaaggaagagaactaggttgtcttccccagatcaattttcttctggatggcccgagccgagtggtagatgagtgagtcaatgagtccagccactgtaaacatgcctccaatgatggcacacacacccgtcaggaagtgcgtgaaggacctgtgtttctctgtcagcttcaccatcattggtgagagctcatacagcacaaagacccccggcaggccctgatcacccagtaggccattggcaaccttctcgtgcctggtcacagagaactggtttgtcctcagcacctccccgtccactttcatgtacactgtaggcaccaccttcacaaagtactggaacatcatggaggcttgcggtgcagtgacgttggtgtggtccagggggttcacaatgccgggatagtcctccccgaatgacaagtgcttgatgtaatgggtcatgttgatattgtcaaggcccctcgtgcc

SEQ ID NO: 2435 - DNA, 552 bp, Rattus norvegicus
  Genbank Accession No. AI228672
ccaggttttctccttttttaatcaatgatcatctttgtccagctttggaaatctggacaaagagaaggctaagaggaggcctggtccagtgtctaaaggtctctgagtgagtctgtcagcacatggaccccgaacgggcctgtccatcagctgggcacagcagttttcctgagtatgagccagtcccaccctcagggcagcatcctggtccagagaggaataaaggccccaggttgggcctattcccaaggccctcgggacagtcaataaataggttctgagccaggcctgggaggacggggtgtaaagagtggatcagctacccagggatcccaaagagggcctgggaaccctcctgctcttcttcaacaaggaagtaaataaatagaccttaaactcaggaataggggtgttggagcaggggatccttccccttagagttagtaattaaatcccatgttaaaaacaaaccagccctaacccctaccggcatctacaaaaatcctacaggatagggcaatgggcttgcctgtctgggggtacacagttccc

SEQ ID NO: 2436 - DNA, 509 bp, Rattus norvegicus
  Genbank Accession No. AI228676
gaatagttagtttgattttatttaaaaataataaatcacaaaactaaagtgtttgaacaaggtcacttaaccccctcccaggccacttcttgttatcatttggtcatctttattactccgcactacacgtctaaaagaggatcttcagtatgccagtgacaccaggacacatccctggcacaggtgatctccagaagaaaagctgatggtctagagagctttctcctctgccttcacagtgctgactctgggtggaggggacaggggtctctcggagtttatcactgagggaccagttcccttagagaggccagagcagcatggacacggacgtgcagtctgttttcaaagtcgtagccagaaaaatcctcctttgcctgaaggagtagcgttctgcctcttgctacagactctgctctgtctagcaggagacagccaagctcatagcaggcatatggctggacgtatgagttattctgacggcacgactcgtctttagccctcgtgcc

SEQ ID NO: 2437 - DNA, 525 bp, Rattus norvegicus
  Genbank Accession No. AI228723
gggctgatatatgtatatatactttatttttgtaaaaataaatgtaacacatagacttgacaagactgttcccaaccttctagggccagcagctcctttagggtcagagagaaagtagggtcttttaatcggcatgaggttactttcactctccactggaatgactaggcccccagttacctaattgtggctttacgcacggtctcctcatctcccaggaactgcatgggcttgatgggcttcaagttcttgtccagttcatagacgatggggatgccagttggcaggttcagctccatgatggcctcttctgacagaccctccagatgcttgacaatgccccgtaggctgttgccatgggcagcaatcaagacccttttcccctccttgatctgggggacaatttcttcattccagaagggcagtgccctggcaatagtatccttcaggctctcacaggagggtagctggtcctcagtaagggctgcgtaccttcttcctaagcagacccttagtaaacaaaga

SEQ ID NO: 2438 - DNA, 282 bp, Rattus norvegicus
  Genbank Accession No. AI228811
aaaaggcataaaaataaaatagtttattaaaggactggaacatacaaggcattttttttcaagtccttcaaaacaaaagcaatactaaattgtagttagcgtttttttatataaaagatgtgcaaaaagaaacatcccttatcagtttctattcactgggtatggctataggggacctctataaaagggagccggacataatcacaaagggtacgtgagttcactcacaccgttcatttttattgctcagctttaaacagtcaaaaaaggctagagttagag

SEQ ID NO: 2439 - DNA, 130 bp, Rattus norvegicus
  Genbank Accession No. AI228813
agatttttatccactttattaatgaggcgggcaaaaggcccgggtgagggtgtgggggtttgctcctgtcccactcacaagacggggtcacagaaaccaaaccaattcataaaacttcagtccttgaaga

SEQ ID NO: 2440 - DNA, 136 bp, Rattus norvegicus
  Genbank Accession No. AI228829
aaagaatgaaaaaggtttttaataactgaaactcaaagtcattgttctcctgattccaggattcctaaaaggcatttttgggcccttttaaaaaccaggggcccccccctgtggtctcagggcattaatttccttt

SEQ ID NO: 2441 - DNA, 404 bp, Rattus norvegicus
  Genbank Accession No. AI228846
cttataaagattctaagaaaaaactcagggtgagaggaacgaggaaggggatccaatttagctcagcgtccgaaagtgttttctttgcctcttaaggggcctcccctctaagagaggtggttcctcccctctatctaagatcctgcccccccccccccagatcggctcagttccgaggaagtttggcactttttgcttttaaaggggggaatgaaagagtcgagaattcaggaagggaagaatacagacaaaggtagagacaggacagagaaccgtgggggaggggcaaccacgagaggaaaacccagtgggccttagggaggcagagaaatgatttaaagaggagaatgcggtggcggtggtatcggaagctggagggtagatgagacaattcaatgcaggca

SEQ ID NO: 2442 - DNA, 511 bp, Rattus norvegicus
  Genbank Accession No. AI228931
aatcacaagccttttttattcacttcaagtattaaaaagctaaatgcagaaaaaatgtgtcctgcttcctggggccacattgccggacatgagcgagtgccggctggagacaaacttgtggattctggtcctggcagaacttacttttcttctcttgttaacgtttcacatacaattcagcagcagattacccctcacagaaaactctgatcttcattttaaattaacttgagaggacaagagaaacggtatggtggcccatgcctgtgggccagcacttaggaggcaaacatgggaaatcaatgcagattcaaagtcacccaggggggtgcaccaaggccctggttttaaaaagggaaatcaaaccaacttcaccatcaacaacaacaacgccagaggagataagcaagcaagtgtccagtgccacgtgcagttcgggtccaatagtttacctcgagtctcaaagagcggcaggctgaagttgtgatggaaggttttgtggtggggccct

SEQ ID NO: 2443 - DNA, 565 bp, Rattus norvegicus
  Genbank Accession No. AI228963
gattttggaataatttaatatataacctcaagacataactctattctaagaccattattttaaaggaacggatccttacgagaccaagataacccacagagcatgaggttggttcagcctttccttttcttcttctttcaacaaatgtgcaccacgatgtttcaatggcaaggccgatgccgtgaacatgaaagctgcgatttgcaagtaccaaccacaccagaacctgggaggccaaccagacagtgggttgggtgccattctaattaaatgatcaggtgacatcacaacacgctggggtgtagcctcgcaactgtccattaagtttcttttttcttgatgatcagaggtcccacgttgtctccagtctcctcattgtgctttatgtgagccccatcgcagaacgggaactttttagacctccagcaccggcaatacacggccttatcccccagatcctccatgtcgaaggcgtgcacaaccttcgggttgtctttctggatctgaaggttcaccatagctttggtgcgactctctttagcgtagaacttcttgtaagccaggt

SEQ ID NO: 2444 - DNA, 591 bp, Rattus norvegicus
  Genbank Accession No. AI228970
aatactttagcaatttaatatacaatgaatatctttaaaaagccaaaacagaaccaaggttacaaaaagtgaaattcaagggcagttaagaacagcagtttttcacacccattaagtcttacaaagctagaattcaaaaccctgttaatcataatttgagctgtcctcaagctgtgttctgcaggagctgtaacacttaggaactgagaccatgagaaaggtaacagcattatcataaactcacagaggggacacaaagtctaaagacctcgactataaaaagtgagaatgccattttatttgccacagaaaggaggaaagctccgtcagtgaaataaatctgacaatgtgactcgtacttcattaaaactaacttccccaaattcaccatgttcacatttggctgaactaaaaagaaccgaagacaggaactttactagatgtacgcagggtgctcgtgtacctttctatacctgtgcttaaataaagcaagcacagaggtaaagggttcacccatgcgataggttcaagcaatcttccctattacactgctttacaagaatgacaaaaatattataaaacatagatttt

SEQ ID NO: 2445 - DNA, 531 bp, Rattus norvegicus
  Genbank Accession No. AI229035
ccgtgaaaagagtatattcttttattgattttttttgttcatacatcttatttcaactttcaataataaaattcaataaatttgattccttaatcataaaaactcgctatacacattatttacaagttgccaaaatctacaagcataacaaacgttacaaggacctcactgactctaagcataggaccgtcacacagaagggagtaactaatcaacatacatccggatggaaactcatggatatgcacagtgtgtttggcactgttcgttaatattggaacattttgtcagaacgggcattctcgagccttagtcacaacacgccagaatctgctattcacattatgatcagcatttcaccgtcaaacaataactgttcagttttagggagcaatctacagtcggactttagaaggaaggtaatccctccatttcttcacatgccccatgccatctgctgagtgagtttgacttggtgtctttgtcactgtggagcatgtcaagggaaacgatttaaagggaacgcccttt

SEQ ID NO: 2446 - DNA, 503 bp, Rattus norvegicus
  Genbank Accession No. AI229059
gagtaacacacacatatattttattagaaatgggcacgggaggaggggatttcttattctctgggcatatactacactctcaccaccctttctgccccagcttgatgcttctccttggctcacaagacacagcctctccagacaaagcaacaaaggcagagtctgctaacagcaggatggttctgagcccacagccttcctctcctatatgtctgtcaaatatctaggtcgtcatctgggtcttcttggtccacatcatcaaaagcatctggctcgtagaagatgcggccagtggtctggcctggcactggatgcagcagagcttgctgtttttcagagctgaactggaaaggcagagtgaggctgtctttggcttctctttctttcttggataagtgaaggttaaaggtcaaatgactggcaggatccacctgggttgtgtgaggatcccggtgtagctcagaatggaggggaagaccttcatggagatccaggctgaagtc

SEQ ID NO: 2447 - DNA, 484 bp, Rattus norvegicus
  Genbank Accession No. AI229074
agcaggcagaaatgagtttattgcattagaaaaaacaccaatgaaaaccagcaacacctccgtgttagacataattagtcagacttcaaggaagtcacgaaagaatctcagagaaacacttcagtctgggaaagtatgatggcctcatgcctccacttcccttgtcccttgactaactgaccaacagacaggagtgtccaacatgtgacacgaaccacacgactccttttcctctcagcttcatggtgcatgcccaggtggagtccctcctgagagtctggcagggaaatgtacaggtgggatctggggttcctggcctggggctctggtgacactggacttgcacaggggagaacagcttgcctttctgctgaggccagagactgtccagtcttcctatctctcctagccatggccacagactctggcatggatggctgctagacgtgacaggagagaagtcaagcaattaagtgactaaagt

SEQ ID NO: 2448 - DNA, 605 bp, Rattus norvegicus
  Genbank Accession No. AI229166
gacaaataaccacttttatttatttaaatcaaaagggtagtttcactcagagtcaagtagactaaacatactagacccctatgaaccctagggtttagtcttaagtcttttgccaggactggcttccctggcagctgggcaggtttggaaactgtcaccatattgctcgctggactccagaaagtagcccatggtcagctaagtgtcggaaaacaatgcgactaagtctccagcgacgcttaacaccgcgggggcgagatgtcatgacacaccgatttctgattctaacaggacagctatcccgtggaagggcagcaatttcatcaccagccatttcctgaaggtcttttggcaaaatggtattctttctgagcgaattgatccgaagccgctcatctgcatattcataagccatttttcgtctcttcacatcacgcaacattctccagtctacatagtaacctcgagcttgacctgacgatgacagaggaactgccttcgattgccattaggggtctcctaacttaaccggagcgggaaagcagataggagccttgggattgggcctccgtgcgcattacaggtgtcagggttactagggacac

SEQ ID NO: 2449 - DNA, 319 bp, Rattus norvegicus
  Genbank Accession No. AI229172
gagaagccacagccttttattttggtgaaaaaatggagtatcagggcttctattcaataaaatatggaaggttgaggaatgcttgcttgcaaaagctttgcacaaagaagtgctggtagatacttttattttggtgggaaaacgaatgctgtctctttctctctcctatctctcccccctcaggcaactgtgccctctaccatcgggggggctggtggtaccatgcctgcgcccactccaaccttaatggtgtatggtatcacggaggtcattaccggagccgataccaggacggggtctactgggccgacctcgtgcc

SEQ ID NO: 2450 - DNA, 461 bp, Rattus norvegicus
  Genbank Accession No. AI229179
aaataattaaaaagagtttattgatattagtgttatgaatgggccagggaagaaaaagaaaaatgacaagcagaatctttatacatttatttataatgaaattatggtctaattatttacaacatacaggaaaccagagtttgtacaaagccaacctgcaaagtattcaaaaatgtgcaaaaatgacagtcagtatctcagacactcctggctcagccaccgattccttcacttccacacatcaatatttgatacaaaaaagttcttttggcaaaagtcacaatgccaagaaaaaaaggacaagttgcaattccagtcagagtcaccgtcctattggtagcatcacatttctcttctcgctgcgaccagttctgagacaaatgagtatttcatttgtgtgatgagctctgaccagctttccatcacgttttctttgaaacgtgaaaacagggaggttggaa

SEQ ID NO: 2451 - DNA, 386 bp, Rattus norvegicus
  Genbank Accession No. AI229192
tcagttcttttgcatttttatttttcttattgtttcaattttaatttcttccacccttttcccaaagggtttttaagtaaagggcagctcaaatcaactccatttacccgggtgcaacacaagcgttgacaccccacttacagcacattgcaaatgtgccccccatctttatgctggattacgaaccgcccatgtgcacgagtggggaaatacaccaagtaaggcgtgtgtaagggcctggttccctgagtgtacgcgctccgcggcaccagtggggtgacagccgagtcacgtctggtccgagtttcctaaaaagtctgtccattctgaggcaaggctcagcagaagtgggggttcacgcgcgggccaggggcacccatcgtgcc

SEQ ID NO: 2452 - DNA, 469 bp, Rattus norvegicus
  Genbank Accession No. AI229196
gtggtaggaatttgtatttttcgcctttgttgagaatacatgagattggtaaatctgtcacatgcctttggtggaaggacaactcttactactatacataaactgtgagactgggttaggaaagacacggtggtaatgacagacacaatggaaaccccacatcacctcatggcaaacaaagaggatgtgggaagcttggcttcaactgactgcagatcccaaggtaagttgcatatttgctcatgcacatgggtgggagggacagaagactgcagagacacagaagggggtccagggtgaagtgagaaagaaagtagaaggactaacagccccagaagaacaaagccaactacacctggtaagccttggagggacagaaacccaggaaataatcccccgctggggctgggtgggccaacagggtaaattggctccaggcttggagcacaccaaggacagtgtgggttct

SEQ ID NO: 2453 - DNA, 482 bp, Rattus norvegicus
  Genbank Accession No. AI229253
gagtttaaaaattatacctttaattatagaatattgttaggataatacagctataaacaagacactaggataattgaccaataccaagggaacctgttctacagatttacctgttcatccactctccacaaccatagaacacaggcacagactgtctggtatgtgcagaaacggccagggacttgtgaacagaaggcatgcacttagcgttagtgaagggtgacagttgtgtgacttctgcagctcagcgcaggaaggggagcagctgaccatagctgagtggacagagctggcacagccactgcctttttagccacccagctagagtgtacacatacgaagaggtgggaaggcaatcagaaaccttccaggagccttttcatctcctagaaggcataagcagcaaatgaaacacagcataaccttttaaaggaaggctagggctgggtgtgtgtgcctggtgtgtgtgtgtgtgtgtgcct

SEQ ID NO: 2454 - DNA, 223 bp, Rattus norvegicus
  Genbank Accession No. AI229260
gtaatatatctgtacatagtgggactgataccgggtcagcggctgctcatgagagagccgcgaggcctggtgagagctggctggaaggggctggactggaggggctggcggttcgcagcagagcgggactatctgaagaaaataattctctattatttttattaccacatgcttctttctgattctaaaatatggaaaataaaatatttacagaaaccttttt

SEQ ID NO: 2455 - DNA, 494 bp, Rattus norvegicus
  Genbank Accession No. AI229291
accaaaatactttctacagagtgccgaaccaaaatgtactgtatttagggcatcttttttatggcattttctctgcactcaaagatgatagtcatgcagcagtttaatgataaaaaatatgttaatattttactatacagcagcaagaagttagttgtcaattaaaagcacacaaacatctttaaatgaaaacctgtaaaagactatcgttacaaacaatttcagtggaggacaccagctgggtaaagtgctctcctaagcttgcattttaataccctacactttgaatatgagtgataatagaacatacttttgacagaaggcttgtacacttgggaacacaaatacacttagcatataatgtagccagtaataactagcaccacagctacatggaaatcctttacatacaccaacttggctttcacttttgaaatgaaactcagaatccatggcttcataggataactagaatggtgttgctttgcttttaa

SEQ ID NO: 2456 - DNA, 501 bp, Rattus norvegicus
  Genbank Accession No. AI229307
  misc_feature (1)..(501): n = a or c or g or t
atgagaaacttcctttattcttctaaacaggtgaaaataagcaattcttatatttctcacttgtaagatttttaaattcttaaaaatgcaattttcttttcaaagcacatgccatctttaaaaaattctcagcaatatacatttgcacccaagaaatacatgcagcatcactgccgtctgacaatgtcctgcactaacccaccgactcctgcacatgtgcgttctacttggggactcagaacacaggcttcagtgcaacacttatttccgtaggaaacacaggcccagtggcgtcttctgacaactgtttcccaatggctgagcacagcctccatctgccttaaagcactctcccccgtgccaatgaaagaaacaactagaattcaggagcatttgaggatcccagtgcgggaccgaggagggatacttagggctaccctgtgccacanaacttacgcaaaaatttacctagaaaacaaaactgaaaaaactcttagattt

SEQ ID NO: 2457 - DNA, 493 bp, Rattus norvegicus
  Genbank Accession No. AI229318
tatcagcaacactagtcctgccattatgaagcactgcagaggacacgcattgtacgcaaacagtgaacatgccaaccacgaatgcagatgtgaatattacacagcgtcaagtcagtgagaaacagaatgtaacatgactatcgtgtatggattgaaatagacgaagaatacagtaattttacccgttacactttgtaaaatcagacatgaatttataagcagtgcctttaataaagacagtaatttcatttcaaataaatatatttcctttctattcctttatcatgtagtttattatgttcctaactggtaaaacgcaccagattattgaactcagtaataatccaatccatgatactccatttgtcttacatttaactcatttgatgtacactgcaagttcacagagcagttcctatgaaactgttagaacctacccgagcctagtgtgacaggccttttggacaagaccaaggggggtacgtttgagcat

SEQ ID NO: 2458 - DNA, 303 bp, Rattus norvegicus
  Genbank Accession No. AI229387
tagagttttttttttttttatttattttatgtatgtgagtccactggagctgtcgtcagacacaccagacgagggtgtcagagctcgttacagatggctgtgatccaccatgtggttgctgggatttgaactcaggacctctggaagagcagccagtgctctcaaccactgagccacctctccagcccagataaagggatcttaaagccagagctgaaggagcaagacactgcttttctccatccgtatgtaatctctgacgtttctctatgttaggcatagatctagtttctaatcggttcc

SEQ ID NO: 2459 - DNA, 535 bp, Rattus norvegicus
  Genbank Accession No. AI229416
agtcaccataactatttttattacattacaatgattaggagcagtacagttcatgacaaaaatattacaaatttcagatcacttcacagcacgtactcctataaacatttaaaagttaattttaattaagagtggtcacttttaagtttaatgtttgatatgaccaacattccctaggtcagagcaaccaaaggatggaaaacaactggatcacactgcatatgtcccaaacaaacaaacaaacaaacaaacaaacaaaacaagaaagaaaaggaaggaaggaaggaaagcacaatgtacaaaatgtgcatgtttcagtttacactatacaaaaatagttaaaatacattccaggtaaacatgttacattaagaaatagcactagtaagaaattggcactcaaataaaaatgcagacgtgttttcaacattgaagacatgagacagtggaattgggggaccaggagataaaacagcacatagcccactcagctggctggagttgagtctgaaactggcatttctgcagaacttca

SEQ ID NO: 2460 - DNA, 557 bp, Rattus norvegicus
  Genbank Accession No. AI229430
aagtttgcgcccgcaatgtttttttttttttttttttttttttggtttagcatctctccccaagggagcagtttatttgatggggaagggatgagaggtacttttgcccatcagcaggaccacaggggaagtgaagcaaagggtgtctctggttaggggtcctagatgtcccctttccttgcagacagactcctggcaaggtcacacaggctttgctagcttcaggtctcatcgaagtctacaccaccagctggtttcttactagaaggcaagagagtatgtaaggcaaagaggaaaaggaagggaccagggtagggaagacaggtggcaagtaccttttgaaaccagggttgacgagagactcccctggacaccgtctcctgaccccagacccagagctgcctctctggtgatcaagttctggtaagaactgagtgcctgctggctgggtgctcttcctggggctaatggcggtctcttctgtggctgccagccgcctctccaggttgcatacatgctctgccaggctgagagtcaaagcctgcagcctgggggct

SEQ ID NO: 2461 - DNA, 560 bp, Rattus norvegicus
  Genbank Accession No. AI229450
cctaccctgccctttttctacctcaatggtgttcctacaggaaatggataaccattttaactgtatttttttcagcccgtaccttcttgggaatacaattgtctaactttttatttttggtctggctgttgtggtgtgcaaaactccgtacattgctattttgccacactgcaacaccttacagatgtggaagatgtgaaatttgtcatcaattatgactaccctaactcctcagaggattatattcatcgaattggaagaactgctcgcagtaccaaaacaggcacagcatacactttctttactcccaataacataaagcaagtgagcgacctcatctctgtgcttcgggaagccaatcaagcaattaatcccaagttgcttcagttggtcgaagacagaggttcaggtcgttccaggggtagaggaggcatgaaggatgatcgtcgtgacagatactctgcagggaaaaggggtggatttaatacctttagagacagggaaaactatgacagaggctactctagtctgcttaagagagattttggggctaaaactca

SEQ ID NO: 2462 - DNA, 581 bp, Rattus norvegicus
  Genbank Accession No. AI229467
attattgctataatcaaggcaaaaatttctttaaacaattggccttgataatggtaggatatcagaaccattattcaagagtttgcagttgctctccactgctgagatgtcgctgcttctcacaccacccacaagaccttggtcacacaggaagagcttgagagtaacagtgcagtttcaacactcgcctattcctgactttacaccaacctcatcctctccaaaattgttgatattatatttttaaaaagtgtagaagaggaggccaactacatctgcttacttggaaaaccaactgagataaacagggtgattaagagaacatgaaagaatttagtgtaaaaattacagaagacattttatcactagtataaggaggggtacagtctgtctgcaggagccggtatgacagtcaccaagggttttaaatcctggagcagggcaaagaatattgacgaccaagtttccgacccactctcaaaaagcatctggcttgacaagccacttcatatcaccccaactgtaccctaaaaacactgtcagctttatttaaccttgatatacatttgtacaagcaattt

SEQ ID NO: 2463 - DNA, 586 bp, Rattus norvegicus
  Genbank Accession No. AI229487
caaaccaatgcaatactaagactttatgtccatagagaccactaggctgagagagcgggaggctcgcccaggcgagcaccgttccaggacatgagctcttcagaggcatcaggccccagaaggttcctggttcacacagcaccatgcaagtacagagctaagaacttcttgaaggtctctggctggaaatcaacaggcccaacaggttccaccaccaccttttttttgatgactgggcgacaccagaagtgctggtaaaggagctggtctgagtctgtccataccaaattcttgacgccctcactagatgtcagatctgtggtgttcaactgcaacaccagaaactggaagacacggccatcggtgcccacgctctgcacgactatgggctgctccaagactctggctgtgttcccatagaggagcctggcctgagccagggcatttgcgaaagcaaacaggagcatcttagcccttagctgttctggaagaaagcgctgtggccgtaaatgggctttttccaggatatacaaggtgtggggatggggataaggatagccctcccggaatcctgtgtcttctttca

SEQ ID NO: 2464 - DNA, 414 bp, Rattus norvegicus
  Genbank Accession No. AI229493
ctcttaaaaaatgttttaatcagttaaacatatttcatggcatatgaaaataaatgatttttagtgacagtttccctctgtatccaggggttttaagcatcacatgctaaccatcttaatacagacatgctccttgatgagctgctacggtaaggtgctcaaatgacaatgtgtattaaattcactctttaataacaataacatcaccataaagggtttgagctgtgcggtctggtgctaagctgcggaggagtagttaaacatctctaaaaattctgcaaagtatcattaaaattacacacataatgccaaatagtccacaatgccttttttttatagggccaccaaagcttttttacagcatgaagaattcttaaaaatcccatgtctaagtagaacagcttatgattaagc

SEQ ID NO: 2465 - DNA, 444 bp, Rattus norvegicus
  Genbank Accession No. AI229497
gatggccaggcctgtcattttatttcagcagtggatgaaacaagagttctttgtctggtgtcttagacggcagcagtctccttggcagcctttctctcttccagcatcctctgcttctgctttgccaggcacttcctggcagaatagtaggctcccaggtcctggtagcggtcctggtaggctttagacacttgggtgaattgctccaattccttggcacagttctgcagtgcactctctccttccctctgctgacaagccttaagtctctcctggatgatgttgatgatttcttggtccactttgaagtcccttctccactgcatctcagcctcatagatacagatgacatcaccctctttgcattccgtgatgtctggcactcgacggtactgtcggtggtagtagtaggttcggttcttggcgtgctgttgttcaatgaac

SEQ ID NO: 2466 - DNA, 572 bp, Rattus norvegicus
  Genbank Accession No. AI229508
ccttctagcggccgcaaaggtttttttttttttttttttaagttgtattcaaatttattaaaaaataaactataggaaactgtacaagaagcgaatgaaggcactggctaggcaggaagaaagtcagcacaaggagcatgggccctccctcggtaggcaggctcttgtgctcctccatcacaggctccaagaacgttctggaaaagtgtgcaaacacttctaagttgctctttaatctaaaaggggaagaaacagtccagaaacacaactcatggcaaagcagcaatggttttggtaaattctgtcacctgaacacaacctcagctttttaaggagcctgggacagaggggctggtcaagaagagtgctctagagaggggcaggagaataagtacagtcatttcatccttggcccaggggctcatgggtaaaggtctgcattgagcatcaccccacccccacaggacacagagcccctggtggaagtgggctgtgtctgcagagtgtgactgagcctcgtccagacagagtcctgtgctgacctcagaactgctgtaggatcagcttgcgtt

SEQ ID NO: 2467 - DNA, 531 bp, Rattus norvegicus
  Genbank Accession No. AI229595
aaaggtttttttttcctttttttgggtttcaaattgaatattttattaacatggtagttgtctttttaacatgtgcacacacacttgcacactcagaatgatctgcctggggagaaaaagactaactatgcctaaggggaaaatgaaaaataaaaaacttcctgtaggtttccttattgtaggcaatcatgtccacatcacttacaaagctattgccaaatgtgtccaaggaagcaaagtttgtggggcaaactcttggggaagtcaaactggcatagccaagctctcaatatgagaaagctgacatgatgtggacttttgctgggaattttctttgcaaaatatggggagaggtttgtcaatgggcagaaagtaagagaaggcggtgtgaagtatgcttttgcagtcaattttcctcacagtattgtgcagggtcatcaaggaaatgcttagtctttctctggaaccagtttcagaacttttccaattgcaatggtcttaccttcatctcttaaagtaaaacgtcccatc

SEQ ID NO: 2468 - DNA, 627 bp, Rattus norvegicus
  Genbank Accession No. AI229630
caaaggttttttttttaagttgtctttcagggtgaaatggaaatactataaagtcagatgtcaaacttttaatgttttcagtgttctctaatttttaggagttttttgtagcctttacacctgaaaaaaaaaaaaaaaagatttgtaaaatcacccaaataattgtgtgctttattttctaagtcgtggttgtacatgctacatcccattaaaatgtcctgatagccgctgcaaggtctgttgtcatctactggagcagatgtctcgttagcataaggaagtgaagtacttaggaagtaaagtctgtgcatttcaacatttatcgtctggcagtcagacagtgtttcctgtgaggaggaatagtcaactcgtgtagcccttttgatatgtttagtacctaaccgggctgcttgtaaatttgatgcacatagcatcttaatgagatagcagttaacctgcaagccctttaaagaagtaatgcctgtttgatttacatctgtagaaaacaggtcaggtaattatatttgggaaactaatgcactaactttaaagaaattgaaaattcaggtggatagtcttaacagaagacatgctttatgttatagctttggacccatctttaattga

SEQ ID NO: 2469 - DNA, 571 bp, Rattus norvegicus
  Genbank Accession No. AI229655
aaaggtttctttagttccctttttttagggggtctagctttctctttagttcttatcacacggaggtgctcggtcacagagaaggcacttaattaggaaggtcatctaatcccggccaaccatatcctctcccttcaccaactcccttggcacttgtttgtgggtccacttaaccctcataatctggggagagagcctaagggcttgaactccagactcagcaggtatggggaggggctttaaaaacagagaagtcagagttggcagagacctgggagctgcccccagccagcagggggccatggaggaggctgcacggagtacagggaaggaggatgagttgggacaggaggagccagcttggtaaagtttggagacctcctgaggcccacaaaaaggttccacctcctgtcgatcctctaaaggcacgtgaagtgtggggtttagggatgaggcaccaatgatgaagcagagacccttctcccactaagccggtgggactagctcactgctgggcaccgaaggtactcaataaatgttttttgaatgaataaagtaaaagggttgggag

SEQ ID NO: 2470 - DNA, 563 bp, Rattus norvegicus
  Genbank Accession No. AI229664
gaagattttacaaacattttatatagaaatattttatgaagattttataacatagtcaatcattatgtcatactgcagaagggtgaagaaaaatattaaatggaaagaaagtgctcctagcaacgcatggcggtctccatgaaagtgcatcaaaagttaaagcaatgtcccatgttggtactgcatattacaaaaagacttgtagaacagtttaaaaaatatttacaaacagttttttgtttattcttttcagagatattgaaaggggaacctttgtgactattcttgctctagaaaaagacagagataataaacacgtcggcccaagtcagtgaaggtaaaatgctctgtacaagctcatcattgatgtgcagtcctttccaagcgtgggctgcttttctgcctgtcaggtgctaggcctagggccagctctttcatataccaggatagttagtgatcactgacaacagtgactctggttacgtgaggtcctccccattagcttccagtttctacaaccacaccaataacgtgctttaagtccttctgtactgcactagaaa

SEQ ID NO: 2471 - DNA, 550 bp, Rattus norvegicus
  Genbank Accession No. AI229680
gaatgtccactggagtttatttacagacaaccttaggtaaggcattttcctctaggatctacatcttgcgaagttacttggcttcaggcttcttgtctccagcttcaagcttgagatgctcagggggctgacgataggcagggaaagcctcccaggggctgttcaggtcaaacttgcggaactcttgtgccaactccactggctcagccactacccgcttcacctcatcgtcataacgtagctcaacatagccagtgaggggaaagtctttccggaaaggatgtccctcgaagccataatctgtcaggatccttctcaagtcagggtggttgaagaagaaaactccaaacatgtcccagacctccctctcataccaattggccgcgatgtgcacagacactatggagtcaatggctgtcagctcatctgcataggtcttcacacgaatcctagagttaaaccgcagggacagcaagttgtagacaatctcaaaacggttctgccgagttgggacatccactgctgtcaagtcagccaaagatttgaactg

SEQ ID NO: 2472 - DNA, 558 bp, Rattus norvegicus
  Genbank Accession No. AI229727
  misc_feature (1)..(558): n = a or c or g or t
acaaagcagtcagaaagaacaaaagaaagtgaagggccttagacaacagatccacacaaccaaaccaacatgagtgaaagagttagcaacacggcctgtggttcgcctatgtttgggtgtcttggagcaaagctgctatggagaaatgtgcaggtgcctaggggatgctgtactgctctagaggatgtaactcaactcacagggtgactttttgatgcctgacccaattactagttgattaactccttataaaactcagagcgcacgaagcggggcagagaatccttctccatcagggcgtagatccttttctgggccaggtcaaagctgtgaggggaaggttccaccaggttcttcatggtgatgtctttagtgaagtggtcaatgttcacctctttaggggcctctgtctggatgaattcttcatagatttgctttgccttctctgccattttgatgggggacttgatcttcttgtaattctcacaggcaacccagaactcaaggtttttctcactgaattcagacttcaagaaactnttgaagctggcaaatccg

SEQ ID NO: 2473 - DNA, 561 bp, Rattus norvegicus
  Genbank Accession No. AI229849
caagagaaaagatatttaattatttctcagtctaattactcttaaagcgttcaaagtgttttcacaagtgcaaggggagggattgttctcagccaacatttaccagtgattccgacacacgcaaagaaactgccaatcacggtgctttatacttactttaatttctgcactgaaaaagaaaaaaaaggtaaaaacatgacaaattacagcaacatcatcttgtccttaatcttgctcttggggccagagttgggaagagacagggaaacattgaagcgtggtaatcacatgaccaggacacctcagtctggctaaccagggctctacttgtctggacaagcactgtcagcgcgccaggtcaggaacaagacagacaacagtcaagatacgtaaaaaaaaaaaaaaattctcatgattccattcttaaaaatcaagcacaaaatctgacaatgagatcaaggttcacatgtccccgtgggatcggggatagctccagggaggcacccgtgtaacatgacttacagaggaacagacctgttttacacaaaatgctgacagctt

SEQ ID NO: 2474 - DNA, 518 bp, Rattus norvegicus
  Genbank Accession No. AI229854
cattacagaaaaatatttttaatgtagaaaagatgaacattttgtagcataatgaaatataaaccattgctatacacagtaatagacttcctgttataagaacagctactcctcccccagattctcagaagctgggcacacagcaccacagaaaggaacgagtccatgaaacacacgaagaacggtgttatcatcagacctgggcagcttaggtcagaggctgcttcgcctcttggggactgagctggccagtgttgtccaatgttcctcagtccaactgggtatctttcttgtcctgaaccaccccgtactcttctaagtgttgtcatgtgtgacagtccttcctctgtcttagaatttcctttcccctagcacggctgtgttttatctgcttaatggatggcaacaaatggctctgaatgaagtcaccatgatttaggaagttggaaccacaaattcttcatgtggtcaaacttttaagtcctatcatggcacattcaccagttaaaagttgggtt

SEQ ID NO: 2475 - DNA, 471 bp, Rattus norvegicus
  Genbank Accession No. AI229905
aaaatttgaagtgctgactttattgttgaaagacacattaaacttgatttcagaatcagacttgaccatttgatttctgtacaaatgactgaatatataaagtaccaaatataagcagtagtgtagcaagaaaataactggcagaataattattcagccagtaccaatagttaaaacttccaaagatctttttctatgcacaacaagggcggaaacgttgccagaggttcgtctccgtggctactgctatacttctttcttcctcaggatgagaggacccacgttatcgcctgtcaactcattgtgcttattgtgggacccgtcacaggcagggaacgtcttggagcgccaacacctacaataagctgctttcgtaagattcaggtcttcaatgtttatttcgttcaccactttgggattttctttctgtatcttaaggttaatcaagctatccttctgttgcttcttctt

SEQ ID NO: 2476 - DNA, 450 bp, Rattus norvegicus
  Genbank Accession No. AI229979
  misc_feature (1)..(450): n = a or c or g or t
caggactcagtggaatgagatctcctggagccctcagcaaagctgaggagagcaaaggagatgacaggtgagtcctcaacaaaatacatatggttggcacataaatgggaggaaccctgggcctgctctggaggagatggatcaagaatcctaaggcactgtgcttctgtggatgccttgatgaagccaaagagctggcactgtcaagctctggtttccatggccactgccttcggtggagtttagttctctcccagcccctcctccttggggcagggaattttagtatctggtgcctttatcacaaggtcctggggtctggaggtagaaagtgagatgcaggagaagaaatggggcanggtgataagaactccacttcctgcaagtaggaaggccccagccaaccagatgccacacgccccacaaggtcagaaatagcagcctcgtgcc

SEQ ID NO: 2477 - DNA, 544 bp, Rattus norvegicus
  Genbank Accession No. AI230056
atattgcaattgacgaatccttgaaaagcagcctttcaaggttgcctttaaagggctctacacaaacggttacaccggatcgctggcagagacctttcagaaactgtagtcactgagttcattatgagtcaaggtgcttgtgggttggttgaggaagaaaagatcaacacatcatacataaattcacaaagtgctgaagttacacacgggaaactaactttgaagtaattctggtggtaaaagtatcaacaatgaagattcaagggagaccaaaccatcccatgaaaggattagtttaaatcagagagcaaggagagcacgtcatccccaaaagccgagaccatgactccaggtctagtgcacaccaggaacatctgaccaaggaggtccctttccttgtccatcatttcagttctatccccttttcaagggcatcgaatgctctgaaagtttcctgtgtcttggcttatacacatatctacctccctcccagaaagaaagctcaagaaagcaggagtgtgcagtctttcttgttcctggctga

SEQ ID NO: 2478 - DNA, 528 bp, Rattus norvegicus
  Genbank Accession No. AI230073
aattcttaacacttttaatcacttccataatcgctgtactgagaaagaatgctcagaaagaacattgagttattttacagttagactccttactgttttcttctttacaggaacaagcatctgaacaagtcttcaaccaaactgtctctaaacaggaagtctgttatataaattatgctttatttttataatattactaaaacactgtattggtgaaaataaatagacattgacaaagacatcccttgttctgtttctgccgtcacattccacaagcacgtctgcctttgcagttccttctaggtaaagagccaaatgcacagagggcagaaggcggaatgataccacagccagggggttccaatagacttctgaagggtttgtcacaaaagcagagagacaccattagcacagatattcagaaacatggcggagcaattacaactgtctgcctgggcttctggtgcgataggtaaggtacatgcagcacagtaacatgaggccatgtgatttccaagtcagacccca

SEQ ID NO: 2479 - DNA, 418 bp, Rattus norvegicus
  Genbank Accession No. AI230074
tttttttactttttattatgcatttcataacatgtgcatagtatataatatgctgcacagccttctaacaggaacagatgaccatagctgagtaatttttttcatcagccaggaaaatgcttccttagtcaatgttctccaggcccttggacacatagtagcgattgacaccagagatgcgtctatcgcgttccatcaaataccattggtaatgaactcgagcaactctcttttccttgcccccgttggtgaacttgtggatgtacgcagtggacaccccggggatgaccaggcacacccccataatggcgaggccagggagaatctcgaaccacatcttctcaccgttactcacactccaacccgtcaccgttaccggctcctcagaggtgaccgggggcttcaccgccctcgtgcc

SEQ ID NO: 2480 - DNA, 365 bp, Rattus norvegicus
  Genbank Accession No. AI230136
caactcaaggcaatggctttctactccacctctaaatccataaaacgggtcttaggacatccgtgaagtaacagcaagacacgctccgtgtgcgtctctctctttgagacactgtaatttctaccaggaatttccagagcattatgtaagtagaaaaaaaaaattaaaagcaagctgttaacagatcttggatcccattaatagagtgtgtatagctaaatcaacatctgtaattcacgttttcctcttttatcctttaaccgaaatcaagaaggaaaaaaaaaccaaaccaaaaaaaaaaaaaaaacccccaaagactttgttaaatttggcatcccaaaggttttaaatctttgcatattttt

SEQ ID NO: 2481 - DNA, 495 bp, Rattus norvegicus
  Genbank Accession No. AI230142
gagtatccatgatttatttgtcaattatacatcaatgaagccaaagacagagaaaaacagagaaagagggaaagaaatgtgtagagggacaacatcaaccaatcctattatcaaataagactttggaaacctgggaataggtagagaagtttattgctcccacatatgcacagagagtctcctctgtagtccctggtacatggaaaattctcattatataagaaaatgacaaatgattaagtaaatttacacatgtagcagtattataatatgtataaccactggctgcgtacctaaaattctgtggacctctctttcacatgaaaaaactttccaagcatctgcgtagtggtggataacaatgcaatcccacagtcaaggagaatgtgtggttcataagtatatttttttcacctgacaaaccaacttctgtttatcactgcaagagctatcactccagccccatccagttttctcatgatgatttattataac

SEQ ID NO: 2482 - DNA, 466 bp, Rattus norvegicus
  Genbank Accession No. AI230165
gtatttaaaattcagtgttattcacattttcttgcaacaacatcataatctcgttagcaaacaattaatgagagtgttctgtacagcacagaaggtcaggtggatgccagggcagggctccaatgggaggcagcacagggaggcagagtgtccctttgctgtagcacccattttaattttgatcccatttttaatttatttattatgcgtcagagataggagacatggctatgtgatcatcgaggacaatctttggtgtccgttctccccgtccaccctgtagttactgagagcggaacaggatgtcaggtctggtaacaagcacccttccctccaggccccgcctgccctggaatctcaggtctcaggcaatttaactccattttcccttcagaattttctgcagtacaggttagtagaaacatttttttctgagtttttcagagaaaatcttcacaaaattaat

SEQ ID NO: 2483 - DNA, 549 bp, Rattus norvegicus
  Genbank Accession No. AI230208
aggacaggcacaaggctgagattggccactttatttagtaaattgtcacaccctggccctattgaacggtcctccagccttagctgaggtctgccttcgtaaaaagttaccgggaagcaggaaggcccggaatcccaaaccctgtttgctaccacaggcctcagaacaaaaccactgcctggagccctaagccatcccgtgagtacacagggcctcacctgggccccaaatacagactcccttgtccccaagagcaagccttgggatggggcaaaaccctccagctgtggggatgctaaaccctgacccggccctgccagctgtctcagctgggcaagaagcaaaatgtacgaaaatactttaattatttcttcgaaacagttaagaaataaggttgcttggtttttacaatcccagtagaaaagagttcacgtgagagccctgacccaaaggtcaggcccttcccagccaaaccggcctctctcagtagaaacgcttgttccgctcctggcgcttttgaaacaccacggcgcccaccacagcacagac

SEQ ID NO: 2484 - DNA, 626 bp, Rattus norvegicus
  Genbank Accession No. AI230228
caatgttttttttttagatgactcaggactttaatgttcttcatatcgtcaatcgaaaacactaacacatgaacaaccagaaaagacctcagcaaagatctggaatgtacagattgccctggttaaactacaaaaacagccatgcgatcacagtttgggggtgggggtgtaactgagttttgtttaacggcctaaccgaaaagcaaagaaacaaccatttcttctacttgtggcaagaaaagtaaatcatggaactcctagatccttctcatgaagcagctttaaaaggcagtaggtggagggtgccagtgtccacaacagacgacggtcatgcacaaagtcacgggctgaacgaactctgaaaagcctctacagaactgtttcattagaaattcaaaagcatagatataaaccgtatggtgtttaaaaaagttcccaccccataaacacggcctatcatgcctgtctttttatgggaattgcagtacacagatccagaatgctcatcagtcactgctgactttaaccaacagctgcagaacctggccgactcacagctgtccatccagcacataggacctctcaacctccttgggatacgctcctaacgataaagaaccagttgg

SEQ ID NO: 2485 - DNA, 466 bp, Rattus norvegicus
  Genbank Accession No. AI230247
cccagctttttaagttgcatttatttttgataatctgtactgtagccaatcaattctattctccattcttgcttaattgtattagccataaaggagttcaggttcataggactcagtttctctattaaaccgtcattgattatggaaatactgtcttaagcactatgcagattaacaccatacttttcttccattacatctttcaagacagtcactcacaactcagaagactgatacagcattagatgaaaaaaacaagattcacagatatatgtagtgaaactcaaactaggagtcttagagataaaaaagataagtagatatttaaaatgtagtctgttaaagatttaatcggtttaaagtataagattagaaagacaaagtttctattgttttgaaagttttaagtaaagaaaaaaaaaactggaaaaaatgtctttgttgttctttctccgttcttaattac

SEQ ID NO: 2486 - DNA, 430 bp, Rattus norvegicus
  Genbank Accession No. AI230260
catagccttttcttcctttatttcatatccccaccacagtaacaattcctttaatttaaactaaaaaccatagacttcctgaaagggtggcagcggagggacggtggtgtcacaggcagaggaggtgggagggcactcagcgaatcgtcttgactgggctcttgaagttgctggcggcttggagctgcagctggtaggccattggatggatcttgaaaccgtagagcctgggcacaaactggttggccggccgcttgggccggtactcgggatgcaccatgaagagcatgtgagggaaaccagtgccgaagtatgcgccatccgtgtggtggtgcctataggacttgggtgtgtacacgtccatgcacttggggcagtagagcttcaccatggcctctcctgggatgtccgaaaggccgatgggaaacat

SEQ ID NO: 2487 - DNA, 323 bp, Rattus norvegicus
  Genbank Accession No. AI230262
gtgcgacgccatcctgtgcacacagggggcttcaccaggcttctgtgtagcgaacatcaacctcctttagattaggaagcttggccttcagatcctcataggtgtcagccgagagcttggtgctgttcatatttaaactgcaaagactcttcatggagctgagggccagcaagcccgcgtcggtgactggggtctcacacaggttcagcacctggagcatagtgaggtgttccgacaggagccgcaggccggcgtctccaaactgcgtggaccacaggttgagctgcttgagagaaggcagtttgatgaggtgctcggcgcag

SEQ ID NO: 2488 - DNA, 514 bp, Rattus norvegicus
  Genbank Accession No. AI230278
  misc_feature (1)..(514): n = a or c or g or t
gagacttggaaaacttcatttattgatcctcaaacccagcacgaactcgatgcacaagttttataggccctggaccttgcggccacagctgtgttcactgaagtcagcttgcttctgtctcttggggctctgagtctgctttctgagatgctaagaagacttctcttgctctcttccttcgtagtctctcagcattggtgatcatcatcggatgcagcgggaaaaagccagacagacctaaaagtttctccatgggcttagagagctgagccccacagccaatccagtgccggatccggtccaggttgagagcaactagcttttctccatgactgttaggtagtggatcataggagcccaactgctccacaaatcggccatccctgggacacttgttgtgagcagccacaatgcggtaaaaaggccggttggtgcagccacccaaagcaaggcgtatggttaggtggccgncgtggtaggctttgcagaaaaaggttgtgaggtggaccatggc

SEQ ID NO: 2489 - DNA, 547 bp, Rattus norvegicus
  Genbank Accession No. AI230326
caagacagatgttttcctttattttaaaaaaaaaatcatttggggacacagtggagggcacagctcccatggctttgggatgggcatgggtcctgggcaggaggtcactggtatggatacatgaggaagtggaaccccaaactggagactgcgccttctgggacagcactggacagggtatgtagtagcctagagggccagggccgtgatatgtacaggggtgttctgtgtacccctgggtgccacatcaggccacctgggtgcccagtgcatcttgatgggcctgacctgctcagaccctgcagggcaaggctgagctctgcgggcacaatagtaaggcgcccgtccaccttaggtgggcagtgctggcctggcactggcgctgctatgagaagtaggaaccatggcgcacatgttaccaccctggggcagacctcctagagactctgtgtacatgcccgggaggccagggtttcaggggggcagcaggacctgggaccctcccagggagcaacggagacggaaaggaacatgaacccagactgct

SEQ ID NO: 2490 - DNA, 563 bp, Rattus norvegicus
  Genbank Accession No. AI230362
ctactaaaataatttaattagaaacaggaatttgtatcagggaggctagaaggatgatactcccaagaaaccaagtgaagcctttaaggcctctccgcctgccgccagggggcgcccgcggatggcccacgtggcagcggtcgtagaggggcggagccgctcagtccgagctctccgagtcagggccactatccggtgtgggtgggagcaggggccgtcttcgagaccgcttgatccggcgcgagggcaagggcagcctccgtttcaggatagcagccacggtgtcctggctgtctgacgtgggcccccagtagatactctcgctcctgcggaagttccggtgcagtctcgtgcaaagcgtagccaaggtgagcaggaccagcaggaaggtcagggccatggcagcccaagcggcctcttcagtacgtggagtgggccctcgagctacccggggaggcactgctgctcgaggagctggggaaacctgacccggacaagcacaaacctccaaggttgccttgcccactgggcatctgagcctttggcctgaacctaccattgcc

SEQ ID NO: 2491 - DNA, 551 bp, Rattus norvegicus
  Genbank Accession No. AI230373
gtcaatagaaatgctttatttaaaaaatagcgacttaaatataaacatctctaaatataaacacttcataagaggctccgaccagtggtgcagccggggtgtccacaggctgccctgattcaccaggattttaaggccacatgtgcatctggaaggctgcagtctaggacccatgctgagacaagtctctgggaccgtttcttcacatgagggtttagcgatcaccttccagccttgggttcgaggtctcattaggcacattagcatctgtctgactttgaaatattgtccttgaagtatggcagctggaggtgagaaagaaaattcttatttccaaactctaaggcaagcttcttcggccaccggtcctacctacttcaaaataagccacgtgggttgtcttgagcacgtgtggaggtgactagaccgcagcagagcgctgcggtggaagggggtggggcaagcgtctggcttccacccagcagaatactttcaatggctggccggagtgccaagcccgctagactagggaaatcttgtcagtcaataag

SEQ ID NO: 2492 - DNA, 575 bp, Rattus norvegicus
  Genbank Accession No. AI230413
ctgaaaggcattatttactggaaagaaatattataagaggtttcccgaattcttgtaagaccaagtaatgtgcccctaatacccacccccatcaaaagaaaagtattttacaaattctgaaccctaactttggaatgtccaaagccagggtctaaaattatcaagtttacaactctcaagagggccagggagcaaatcacactggggagcagattcacacttgacaagggctagcagcaacagtcaaggaacccagtgctttgcttaaactgaccatcttaatgtccaggccaggatgtccttatgtgaagtcacacttccatgatgcattggttcaccaacaccaacgagtaattccaagacgtttggaaggaaataatcataccaaaggaggaagggggagctatttaatcttagcaagggcagccgctcttctttctgtgttctggaacaaggcacgaattaaagcttttacttcgctggaagggaatgcagttgccaggggcccttttccatctgcccaccgatctccgatttcctgcaagctagcttggagcattatcatgagttctttg

SEQ ID NO: 2493 - DNA, 360 bp, Rattus norvegicus
  Genbank Accession No. AI230424
ggctcaaacgtccatttatttcaaagcagtaataatttaaaatcataaaaacccttctgccgttgaacatttggagggtgaggttaaagacggactgaaggcgcctgcctgctggggacatgggacccacgtgcacacctccaaacaggagcggccatggccaagtccgagccgcccgcagcctggggcccgccaggtgctgccggccgccatgggcagcacctctagtccacggccatggcaggcgggcctgggcccagggaccctgacgcacctcaaatggctgccggttctggtcagtaggggctgtggagggggcttagccgatttctgtgttactgcacaggaagaaagagcctg

SEQ ID NO: 2494 - DNA, 536 bp, Rattus norvegicus
  Genbank Accession No. AI230440
gtccatttatttagaaaaaaattaacatgagcaaatgagatacctcagtgttacaacagagtatagaaatgtctagcaataatcaaataatttgatctttaaatacaaaataaccacatgaacacctaatatacaggtttcatctgaatacatatttattagataaatattagaggtcacatcatctaactacatacagctttgcaagactagaaatcacaattagttttttttttctgaccagtcaaaagtatgaaatgattgccatgtacatacgctgtacaaagacgatgggttccatggacatcacttcaggctgcacgtgtgggtgtggatgtgtatgcgtgtgaatcacctgtgatcatgatatcaaaaacttatacaaagcatatgaatttggttacaattttcttctgaaacccccgtttctcttcattgtttccatagcaccccaaaaatacacaggtggcagggctaggacacggaaggtaaatagtacgtgtaggtagaaataaagacaaaggggaacgaaaatg

SEQ ID NO: 2495 - DNA, 549 bp, Rattus norvegicus
  Genbank Accession No. AI230458
  misc_feature (1)..(549): n = a or c or g or t
gacagttttccttggtttatttcaagagaacaaagagtcagccatcaaattctgtacaaaaacatggtgtcagagtgtagttaggtcaccacctgggtcagccaacctctttcccttgcctaagcccatagcgtccccttatttatcaaaaacaggacaagcctacccttccctccccccacacaaaaagctaacaaattctgggggggaaatcatgaaaaattaggagaccctccttaactttcttccttcttaccaccgatccaggaacttgaagggaacatcgtggtcacagccaaggtgggcaggcagacattggcagacgtagtgtttggcaaccatggggctggggtgggaccttggagaaggggacagacctncaccggccctggtccagagaacactcaaaacacagtttataaaaaatcagggccaggtagaagagaaaaaagtcatcagaatcaaaaactaaatagtggaaagatttgtttnttgtttttcttctctaaaaggcataaggctacaaacagctcaggtcctgagctcccc

SEQ ID NO: 2496 - DNA, 318 bp, Rattus norvegicus
  Genbank Accession No. AI230528
acagttggtgctcagagagaggattcatcaccctggtgacactgccggtcctcagctgagaaccatgtgcagaacacacaggtcacagttgctggggacaaacccggatgtccccttggaatcccaacactgacatgagggagaccccttggcgcctctctgcacatggtatgtctggtggaggatgagggaccactatgtccttgggatgggaccccagagtagcttcctcttaacttctagggataccccctcccgaacacatcacacagggaggattccagggcaaaccagtcaggggggtccgtcctgtctcaa

SEQ ID NO: 2497 - DNA, 616 bp, Rattus norvegicus
  Genbank Accession No. AI230549
caaaaagtcctagtttgatacactttactaaacaaaattaaaggttaactgtacaagcaattaaaacatgatatgtagcaagtgttatcaggagttttctattggcaaactgtttaaaaatagtcacaaactgagcagttagaagtaccttcgaagtaagcactgctcccaagtgacaggaagcctctcccgaaagctcccctaagagtgccagctgcccagcaccctcaagtttgggactgaaagtcaatggcaattgagatgggaggtgcagacctctgtagggtcagtttccagtttgccaacaggagtatgagggacgccctcaaagtagaggaacgtggaactgtatagcctcgaaggagggcacattaggctcacatgagccccagtcagtctataaagaccttgtttggactagagatgcagtcagtgcttggctggcatggagtcttgttggagaacttcatgcatgcccacaggtttatgtcaaacaagaaaaagttaagggctgggttgtgaacacacagagaattccacgatggcattcacaacaaggtgcccaagtccccttgtcacaacactttctgtatgacttaaggaatgtctttatgta

SEQ ID NO: 2498 - DNA, 521 bp, Rattus norvegicus
  Genbank Accession No. AI230625
  misc_feature (1)..(521): n = a or c or g or t
aagttgataataatttattaggctatgtatcacttacaatgtataataaattatataaaaaataccacagcatccttctaaacaatctctcatattcatatcctaatgctcgctacggtgtctgtaggacatttaattagattatattttagcattagccagaaagtttaaaaaaacattagaaaatcgttcacagtccttcagatttatgaagggccccattctttcaactttgggcaaaccattttggaatgtgtacaaatccataaacgaccaccatgctgggcaaggcatccagttctttgactttaacaccagggggcgcactgtcttaggcattgtatgaaatgcaagcagtcaattactgatctgtaaaaatcttgcccccataaacagcacggaggtttagccacattttaagacattcgggttaaaaaacaaaaaagcaaaacttcagtaaaccatttacgggtcatattccttctctttcctccctctccttacccacttngatatttttc

SEQ ID NO: 2499 - DNA, 492 bp, Rattus norvegicus
  Genbank Accession No. AI230632
caacaggatctcaacattttaatttaaaattaactaataaatcacaattctatattgctttaaagattatttttgtttaaaaatgacacatctcaacattaaccatttctctttgctattccaggttagtttatccaggtcagaaagaataaaccacagtgcagctcccttaacctcggagtcaggtttgaatgacagagtccgtcgccagcaatggacacgcagataaccatccaagaaagtgaaaatacaaaccccagactgctctgttgcctaaaagcccttgtggagtcacagcacaggaggggcaggggcacgtgtcccctgcgctgtctttgacgtaggatggagcacctccttgagcagtccaagacaagcagtcccactgtgtggctggctttctactgtgtggcagcactgtcaccacaatccacccagacagctgtttacaaacagtgcacacagccagagcatgaggcagcacagcgtccc

SEQ ID NO: 2500 - DNA, 658 bp, Rattus norvegicus
  Genbank Accession No. AI230697
cgattaaaaaccacacacattgtattacaggcatacagagtttacagtccagatatgcaaatacaggcaatttgacatttcagccccttttgtaagtgattaacaattacagaggacacagaagaccttcaatcattggttttggcttacatgttaaacagcttctaagttctgtttctgtgtgtgtttcgttttgttgctttcctttaggtgtatgtggaagggattggaccacaagaaaataagaataaaaaaggtcaggaataaaagtgttactgaaattaccacttccttataatacaagcagggagaatatggcttcaaagacagagggaagcctcttatccagtcacactcaacattaatttctagtaagtatgacaataatgccaaacttaattcattaggtcaggcaggaataactagagtcattttatcaaacccaacttaattttggtcttcaaatcttaagtgcttggagtttagggatttttcacattaataagaaggtaggtcaacaatcaaaactcctaaatacagggttaaaagataacctcataactactttaaaactttccaattaagatttctataaagattaggattaatataaatgtattcctgcccctaaaatgtgatctctttggactatagacca

SEQ ID NO: 2501 - DNA, 585 bp, Rattus norvegicus
  Genbank Accession No. AI230716
atgcaaaaatttatttgaccaaaatgtagaaaaagtgataccattacgtatgatacaatcgcaagaatctaaagaacagagtagattttatcaattgcacagtttgctaaaagttcatctccctggtagtgtgatgcttaataaataggagtgaggggcagggttcagataagctataagcaggtgactctccgtcagcactgtaaactcgaggtggccccacactgctggggaatgtggaatgtttcagggagatgttaactgaaaaagcaaaactacaatgccaaaaaatatgtgcagcctctagagcgctccacgtccagttcagtcaggagttctcggactgtattagtgtcattcccaaaggaattcaagtctcagcaaactcaagctcccatttcttgatccctgaacaatggatatgaagttaagccaattgctttctctatcactactttgcggctggagagaccctttgttgcctaacccttggcatcaatgttctgatggctggcaacctgcatattatttgagacagagtctcgctgtgtatcgctggtacctggctttgctagcagtcttgat

SEQ ID NO: 2502 - DNA, 528 bp, Rattus norvegicus
  Genbank Accession No. AI230741
gaatcctgggcaggagggcagaacaaatctagactttattgtcaaggagaaagaggaagggggtttgctacattgtcaagcagaaagagtccatggggaggggagggccagtgggggccggtccccatcctgggtcggcggctggaagggctgaccacacagaaaccacagaagggatgggttgggggtcacgcccccgcccgagttgtgcagtggaggtgtcacgggagggggcagccatgaggtctaggaactggaatggggaggctacagacggcaaatcctgcggaaagggacgggccggggcgggggctaagcttctattgctttttgctcacagttttgcggaaggcgaggcgggggtgggcttggactggacaccccttgccccccttggtaccccttgggcgatgggtgctggtgaaaagaatggaacccggaccggggaggaagaaggccagggaagggtctatgagggcatctacttggtcccacccaaatgcctgaaatgcccccaagtgctgcccc

SEQ ID NO: 2503 - DNA, 669 bp, Rattus norvegicus
  Genbank Accession No. AI230743
ttgtcatcacttttcttcatgatccagatatttgaaaatgcaaagaaaacgaacttttcatgatatgtcagggactggcactaaaaaaaattcagactgcaaatgagttatacaaatgaaatatcaaatggagatccagttatcaaaatgaaagcactcaacatattaaaagttcacaattatttgtacagagcacataaaaaagtcagcttgctatccaaccgctgtgctttttaaagagctactgcagaatttgaagaaaataggcattgttagttaacttataaagagaccaaagagcctgaaacaagtagtaaaaagaaatttttgcctttattagaatggcattaggccttaaatatgccaattttggtaatcacattattgttttaataagaaacgactctacagaattgcaatactggtccaacagtcttgtctttcttttaaagcaagaaacagaatgtaagtaaccagaaagcagggcaggcatcagctaacccaggagactagcttcttagatccaagcgtttgcagagagaaccgttgggctggggaggggtggagcagctcgagataactggaacccagagtgcacgccaagtcccatgaggctgcttgttgaaatcatcttttccttggtcacactggttccctccaatactatag

SEQ ID NO: 2504 - DNA, 632 bp, Rattus norvegicus
  Genbank Accession No. AI230747
aagtcctttcaagaatccagttggagactaggggttttcatctccaccccactgatctccccaggggccctggcttgtctgtggaaccagaagagacagtgcaagatgaccacagagttcaacaaaagctcaggtgatttctacaagctggtttaaccattgcagccgcaggcccggtcctcccatcttccccagatctgtgtccgctgctccacaccaaaggtgaatgaattcactcctccctctgacctcctgtgggaaagctaaaggaagtgagcaggagcccacatgtctggggtaggtaggtggctgcagagaggctgtctgtcctgactgctgttactttacagggtagggccagtgtcatcatttcctgcatgggagaacagctgtgagtccatggaggtccagccagtgacagaacaaggccaggcggcagagccaagtgccactttaaagagaagctacatctccatcctagagctttggctctaagctctgggaaaagcaacttaccaagatgagctgtgctcctgtctgggtcaaaatcagttgcagaaggcaaccagtgcgatctctcgttctgggaggaaaatacttaggacacagcagccaggcgcactggtaagtgt

SEQ ID NO: 2505 - DNA, 667 bp, Rattus norvegicus
  Genbank Accession No. AI230759
caactttaaatcagtttattgacacagtaacacaacacacttgcctccctgacacccccacacccaatgtagctctctctcccttttttctttagaacaagccgtttggtgaaagcagtaaaaggctggtcatttctgcaacccagccctacccctcggtcctgcagcctcggctctgttctgaacctgttacagaggcagtcagtactatgcttggccagccagaggcatccagttacagattcccccacaaaccccaggccctgagtttggtattctttctctctgttcttgctaggaaagagatcttgaggcccaggccacagaggcaagaactctggtggtaacttgagatgtagtttggctagtttcttaaggcccaggcacccccaaaaaagccctggtgtgggggatgagtttcagtgcccctatgtaaaatgcacgggtaacattaaacagactcagccagcttaaccaaatgcctgaataacactaagctgtaaagaaagcaaggtcagacctgcttacaccaggccagacacaaaatgccggaagctcaaggtggagtgtcaaacacaacccaagggcactgcccaggagctaaaagcctatactcaggagcccctggatgacaagaagcaaagaaagaaaatacctaagtcttaaa

SEQ ID NO: 2506 - DNA, 663 bp, Rattus norvegicus
  Genbank Accession No. AI230762
tgttttttttttttttttttttttattttatttatttatttatttttttttttttttggtccacacagggaatttcacattatctggcagcgcaggggcccctgtgggtcacatggtcacgtggggcattttcagagacccagggacctagcacagctaattgggcttgctcagggatgcagggaaaactgagaccttcatagaccagagggacgagggagggctggctgcaggtactggggtttgcctcagtttccccactgggcacaggagggtgaagtctgagggtgttgggaaagcaaatttaatccctcggaatgcccgcagtatattaaagcctggtgaacccgatacctttgggagcaaacaaagcacaaaattccttctcttctttcattgaaactgcctgtaggggttggggatttagctcagtggtagagcacttgcctagcaagcgcaaggccctgggttcagtccccagctccgaaaaagaaaaaaaataaaaaaaaaaagaaactgcctgtaatttccttggttcacaaaccacaaaaaccatgttaaagagaggaaaaaaccgaaagctctttgggccggcaccttccaccggccctcccactaggaaatgcactgcctcgctttcccaccaaggaaacccatgttccc

SEQ ID NO: 2507 - DNA, 664 bp, Rattus norvegicus
  Genbank Accession No. AI230765
aacaattaaaaggcagtttatttcctctgtaatacacacagacaataaatctaagattttttttttaagtatcaactacctattaagaaaagtacttttaaatggttaaaaggaatcagaataccaaagtttagtgtatgaagagtaaatataaaccaagaaaaagtagatcattggtgttagatatttcatatgaatagctgcattaaggtcctgttttccacctttacaaataaaaaagatgtcctctccccatggggatatgcactgtacagctttctcaacaagtatgagcagggttttagaatgttgccaatgttaagttcttcagtacctaaaattgaggacagtaatattacggtggcaatggtgcatctcaaagtgtagttatgatccaacgcgagttgtggtggttcttttatctgagaaaaaacttttcaggagaaacacctgccctatgctaaccacaagaagaatgagggcttctcccaccgaccagtaggccactcttgtatttagatcctctgctcggcttcggccttgagcttcccgtagtcggaaatgtgtctgatagtcaatgacagacttcagagcttcatgaatggaaacacaagcagattccatctgggtaaaggcactgactcggttctcactgggaaacaaa

SEQ ID NO: 2508 - DNA, 468 bp, Rattus norvegicus
  Genbank Accession No. AI230773
gagcttcacacactggaaaacgactttattcctttagaggacagtacaatggtgccggacagccagagctcagtttcccccgcccaggcaggtgcaaactggcaactctgtactggtgccaagacctctgtgccttcacaggcacaggcactgacagtgctcagaaggatggcatttactgggaaatgggccgatcccacagtgttctcctggaccctctgactacctaccactgggaatcctgggtggcactaagagagccagacatcagctgacccaggcctccatcctacagacaggtagcctaaggcccagaggtaagatgactttgtcctgccacagctgttacacaatttccctgtggagacattgaggccagtggcctgtctgctcccattcaggccctacactggctccatcgtccacaagcttggtgccagggtctcaaccctgctctgccgttcagga

SEQ ID NO: 2509 - DNA, 560 bp, Rattus norvegicus
  Genbank Accession No. AI230778
actttattcaaataattaatttcttttctctgtgaaactgagtaggactaaagagaggagagcccatatattaaactcttaaatagatcctttgagttcagcgtccagtcaaggagaggcacgggtcacaggtcttatcccaggagatgaggtcaccaaggagcctgtccattggggaagatagcaaagtgaatgtcttttaaagaaagttctcagaggagaaaaaaaaaatagaagatccccaagtctctgaaaccgaagtagtctctccctcctcggtgttgcccagaacagaggttctgagctagcttctgccgagatgtatgactgctccatcctggcatgaccgagagccatgtgcttgggttagtccagcttccgtgtgcaggtcgaggactcaggcatctgagccctgtggagactggaaatcacgaacttcccaggtgtggggaggtactgttctggttcacctgaaaatatcctttaagattggctggcgttttatagtcttctttcaagacccggtgtgtgttgttgatgacaatgggggccgggttccc

SEQ ID NO: 2510 - DNA, 438 bp, Rattus norvegicus
  Genbank Accession No. AI230884
acatttacaaacattaaatttattataactagaatgaatgtaatggttctcagatttggccaccttatagctccgattaaggaggggattttttttttaaacagaaaaatgcattataacttggtcagattacctgcacattaagaaacaacatctaaggaggaaaacaagaaaagcaacccttcagtttcacataattaaagaacaggagaaagcacacaagcaacatcatagctaaatttaccaaaccaaagccagggcgattttctcttctgattatgtgtcataaaaaggtccgctgtcttatatacacatgtatataatgttacattccagcactgtaaaaagtcccctttgccccctccccccaaacttttcagtctagtcgccgaacttggaaggaggcgctcgctcctgctgccggtgcatttcgttttc

SEQ ID NO: 2511 - DNA, 539 bp, Rattus norvegicus
  Genbank Accession No. AI230915
gtcaagatttgggcaaccagaagtataagaaaattattttcctcagtagttaagctattttttcctcttcctttcttgtttgaacctcttgggttttttatatatatatatatattttatgttttcttagaaatatttaggtaaggtttatcttgaatcttaattgccttaattttaaggacgtcaaaggctccagaggcatgctttcagtgtcttgtttttaaaaaaaaatatatatatatatatatcaagaaagaattgaggtattgtgccagttttcactggcatagaagatggagactgagtttttagggtgggaaaaaaaagggaaaaaaactgtacagtttaagggaaaatgttctttcttcattggaagaaaatttgttgataaacaaaaccaaggcaaccgcgagaatcgggaaacgctgggacacttctcatgaactttgacacaatccctctaaaaggctaaaagacattttacggtaaagttattcatgttggtttgaaaaacaactgcattagagatgatgtgtgtt

SEQ ID NO: 2512 - DNA, 408 bp, Rattus norvegicus
  Genbank Accession No. AI230970
cctacttctgctttattcaaagactggttcaggggacggaagaagggcctggtcagaaggcaagcccgacaggaggtggcttaacggtacttggaggtcagcacggtgctcacagaggcaaggaatttgtccagagaggcgtgcatggcaggtgtgaaatccccagggtggtggcaagccaaggtcaccagcaggcagtggctcaggaacttgaagttgacaggatccacacgcagtttgtgggcatgcaggtcgcgtaactagttaacattgccagagtctcgttcgttatcggaattaaccagacaaatcgctccaccaactaagaacggccatgcaccaccacccacggaatcgagaaagagctatcaatctgtcaatcctgtccgtgtccgggcccctcgtgcc

SEQ ID NO: 2513 - DNA, 596 bp, Rattus norvegicus
  Genbank Accession No. AI230981
  misc_feature (1)..(596): n = a or c or g or t
tggcacggcctaagagcgacaggtgcgttcgcacgctgactggaagaccacgtgggcaggagcggggtaaggcaccactctgggacagtaaggtagctcgcagtaacaagagtcagcaccacgagtgggtgctcagcaaatacttgaataaatgaaaaccataattagcacaattctgttcactgccagcaattcttcaaccccaataaaatatctattaaaacccagtttgtacctgaatgcagattcctgctttttagttcataccctttcttcagtgtttacatttccttgaaaaattaaattaaaaccatactttatgtgtactcagccacagacataattgaattactgacagccatgaacagattttaagtgaacagaggtcagataaagcaaacttgctcaggatagcacataatactgaatatgaacctacaaatgaaaataggtaaggaaaagtaacagttttgttttttaatatttgctaattttttaatgccttagttcttgagaaaggccaaaatctcatgttgacatgaacacattttaaaaaatggtctcttaagtgtaatanttaataaaactaggtattg

SEQ ID NO: 2514 - DNA, 258 bp, Rattus norvegicus
  Genbank Accession No. AI230991
cacagggagaacacggggactttaatgatgaggacactgagccagagaacctgggtcacaggcctctgctcatggactccgaacatgaggaggaggacgacaaacacagctctgactcggagtgtgaacaggcaaaagccaagggaggagaatcgagctccttgcgcaaaaacaaacctggtggtgccccggagcctgccagttcacccgcgctgactcccagtcaggagttcgatgtgttcggtgctgttcccttct

SEQ ID NO: 2515 - DNA, 327 bp, Rattus norvegicus
  Genbank Accession No. AI231010
gggcaagcatttttggtttcaccatttattacaaaactttcctgaaaaagactcaaaacagggtccgtctactggactttaccctcattcctatagtcccatgacgggtgccagcctgccctgtcagggggagccttaaccactgataagggtcagggaccgaggaaatccacgcttttcccaggagtgcagggacttttccatagtccaagccgcttttgtcaggctttgagcgttgagtccaggtctggggggaaacaagccttatacccaaccttggtatctttctttcgatagtacatgcgtgtcaacactgtcaacaggaag

SEQ ID NO: 2516 - DNA, 618 bp, Rattus norvegicus
  Genbank Accession No. AI231011
atagactaggaaatataatttatttcataaaaattaattttgttacaagaggaatgctaaaggttatttacaagttgtttacagaatgaacgggtggggctgggactatccccagtggatcagaacccacagacacacagccatgttcacagcctgacatccaagctcccacacacccgacctctgagggcgggaggaaggtgctgactcagatgcctgggagaacacatgaacttgtaaagaagataaagaaagacatccatgttttgatattggaactaaaatggtaagggctttggccagagtaaagaactgctcagtcgtatagaaaaggcattcagctgtcacatgtgtttatatgaaaagtaaaagaagcccgcagtatccagggttggtactgtacactgtggtttgggtgtcactggaggtcttaaggcgcgtatcttgggacagaacaatggagagtggacagcagaattaagtacacatctggcagaagccacctgagaccattcaccggtcctctctggtaatgctgcaacgctgttgtttctcacggctatagggacactggcatttggcttgttgtccactttaaacagcaaacaccccaaaagc

SEQ ID NO: 2517 - DNA, 501 bp, Rattus norvegicus
  Genbank Accession No. AI231038
ggtttctgctagcctttatttgtgaaagtttacacaaaaatctcccaacaggtgagcctatataaaccccacatgcctcttcccattaacaaacagaagatggctctgatgggggtagggtggggggtcatgacaatggtacggaacaaggtttattgaaactgtcttattctcaaattattttgaatatgctgaaaatgaaaggaagcaggtaataacctgtttataaagctgatgtgcatttgtgcaagcctactgccaaaggcaaataaatgctcttcaagcacaatgtccaagttggttgtttttggcatgaattaaaacaaacgaaaggacttgaaataatttcagttctacaaagcttatgtttacagatgttcttgtttacaagagcttggaaacaaaaccatgggcaaaatggtctatttttctcctctctgaaacattgacattttccaggacagaaaacagaaaattagtagagtggttgtcattgctcct

SEQ ID NO: 2518 - DNA, 328 bp, Rattus norvegicus
  Genbank Accession No. AI231094
ttaagaagatttattgacagactagtcttgcagtccagaaccgggctgacggaggctcaggaagttgtcatggtacaacccggtgtgggatccactctctacatgggacccctgttccacaaggtggctgctggggggtgggggtggggagatccactccagtgtgaacccctataccctgatggtgatggggctctgaggctggcacagggcccatctctgagaggccatgcatacctgctccagtgcatgctgagctctctaatgtctggtaccaaggacttgaccttgagggggagagaaatgaattcagataactacttgtgcc

SEQ ID NO: 2519 - DNA, 461 bp, Rattus norvegicus
  Genbank Accession No. AI231127
cgtttctttggttttattattacaaatgcgccgtggctccatcacactcaggggaatctgaattctacatgttcgccacaccctttcctttctacctgggcagggccacgtagaagcattcaaaccacgtgtggtcacaagacataattgacagaaacagttcaactcatagcttatagtgatgccatttctccagcggtacaagagctttacaggatggtgccagggctttcctggacgatggactgcttggttcacatttgtaagctccgaggctggagctcccttttcccaaggccttggcaccgttgttgaattccatgctttggaaaggtcctttctggtagtcagcgccaagatacgaccgccagatctgtgtgttcagtggttgaacaaccgtgtttggagggatcgaaagctaaaactgacctctctccccttaacatcccaacccatccaag

SEQ ID NO: 2520 - DNA, 523 bp, Rattus norvegicus
  Genbank Accession No. AI231140
atggtggaaaaaaagtatatatttagaattaaccatctggactcactttagatgatcccaatcttgttggcaacatctagagcatcataatcaggagccaagcgaacatatgccttcttctctccgtcaggccgtatcagagtattgactttggccacatctatatcatagagtttttttcacggcctgtttgatctggtgcttgttggccttaacatccacaatgaacacaagcgtgttgttgtcctctattttcttcatagctgactcggtggtcagtgggaatttgatgatagcatagtggtcaagcttgtttctcctgggtgcactctttcgaggatattttggctgcctccggagccgcagggtcttgggccgtcgaaagcgaagaaggaagctcctgcccctcccaaagccgaagccaaagcgaaggccttgaaagctaagaaggcagtgctgaaaggtgtccacagtcacaaaaagaagaagatccgaacgtcacccactttccggccctcgtgcc

SEQ ID NO: 2521 - DNA, 528 bp, Rattus norvegicus
  Genbank Accession No. AI231159
gcatggtcagcatttctactcgggaactggttaactccaaccagaaacgaaatcaggaacatgattgctgactcagaaggaaatacgccaatggaactgagaaggcaaaatttgggagctgggacaggttccgatgggcctcccactcctggaagaggcggatcaggtactcataattccgggcccgcaaggccatgtggtcaatgagcagcagcatgcacagggggtcctcatccggctcaaggctcaggatgagcttgcagtactcgagtgcagtacgtgggcagccacgcttctccaagaagctcatctgcttgtagagggccaggtagaagctcctgttctcaggtctgcggtaatccagcctgcaagtcccactggtgaggctgaacaaggggtggaacacacactccatgctgtacagggctctctcgatcaggtctcgagccatctcctgatcctcctgaaagcggcaggcatcactgagctgaagaagtgagtcgacatgataggggcttgtctggagca

SEQ ID NO: 2522 - DNA, 574 bp, Rattus norvegicus
  Genbank Accession No. AI231193
gggattcaatgcttttttattaagaaatttggggcccgagttccctctctccctcttcctggagcgctgtgctctttgaattcagcattcagaaacctagccgtgcccatcctccccagcaggcgccagaacctctggggtccctcttccttccttctccccagatcttgcagaaacacccaagtgcttctcagcagagggtgaagcgtctggcactgatgttcatgcgcgtgagtcccagatgccgcagcggtggggccagagccaggcccatcccagactccaactccatctccagctcggcctcatccagaagctcctggtgcaggtgacagacttggtccactttcagtcggtgcagctgggcccgcagcctgagcagctgccccgccagctgccggtcctgagcccgcatctcctgcagctcccgtctgagccactcaagcgctgaatccatggagtcgaagccacagatggccccaggtcccaccggctcaggtctagcttgggctctgcaccaggcccggctctggactttggcagtccactccagatatgaaggccgtcgggtctg

SEQ ID NO: 2523 - DNA, 577 bp, Rattus norvegicus
  Genbank Accession No. AI231217
gtaaaaagttggtttatttgtcatgttttcactgtatctcagttaagccattttggtgtccacagtgacagtcctcttggaagccaggtcatccctactcacccactaacagtgaccatcaaccacaagccaccaggcccggctgacagctacagcagcaagtgagactgtggactcctctaggcctgatgctcctcagcacagcccagagctggggactctgcacccgcttgccagaagctgtggagtccctacggtaggtgggaagccctgctgctctgtggcagtggcagaggaggggcagtgggaagaccctgtggactgggagggcaccaggctcctctgctcaggactgggtctagacaaggccacgtgtgatatggtgtgagtcctgggctatgtgcaagggccctgatgctgacctgtgtcggggcaagtggctaattgtcccttgattgccatttgctggcaagcatagcagcaagagtccctagaagccctgggtcatggaggcatttgctacttccactgaggtgtggcggacccacgtgtcttgctgctggcaggccctcgtgcc

SEQ ID NO: 2524 - DNA, 602 bp, Rattus norvegicus
  Genbank Accession No. AI231218
aacatgtaaagggtttatttattttaattttaaaaggaactgatactattataactgtcctgttttcatttccaatatggtaaatactgacaatgactgtgtaaacaggttcttaggcatcaatggtgtttatacatctaaggaggtggtgaggcccaaaggcttgagaaccactgtctttaaacccatactttacatccactgaaacaaatattaaagacaagcaacaaaaggatcaactgacccaactcgactgcctgcccacgcatgcctcaatgctcttaagctaggacaaggaatgttattagagacgaataagagtcaaagaaccactgtcgtaaacagacaacaatctaagcactggcacacaagtacataacttcaaaatgcatgaggcaaatgtgacaagaataaagtaagcagtgggcaaagccattaaagatttcaacaataatctcttcaatggttgaaataacaaaagtttaaagaaagagcaataaaaatacagatgacttgacacacactggcaaacaaccagccagtgtggcctgtcatttatagaataaattctcacatggtagaatatacattcttttcaaaga

SEQ ID NO: 2525 - DNA, 638 bp, Rattus norvegicus
  Genbank Accession No. AI231219
gtcaagtgtttatttatacctacaaaagaaaacaagatggtatcaaaaggacaatttacaaactaagaatagtagtaacatagctctgagcatcctatgccctaacatcacgcctacaattcaagtctcaatgacaggaatgtgttgagagaccagcaagggcattagcagagcactgatcccaagcaaaagccaccaacctttttagatgagaagtctgcacaatggattgttagggagcagcagcccacagctttatacctaagcccttccccctaagtgagtaaaccacagaaggcaatcaacccagcttcagggtttgcctgcacctgtgctgacaacggactgacaaggaggcagaagtcacttgcgctaagtaggaaaactgctagttttctgctgtacccaggccaaaagagcttatgaaatatgaaatgtgctatttatctggattctgcctctgctggagaggggacagaagcaacctagctactgcttcatccccggaggcagtaatagaaggggtgggtattttgaagagctacagtagcacagaacagcccatggtataatgcttaataaaaaataaatctgaatttggttgtagaaagtatcttttacaggctggtcagtgtcag

SEQ ID NO: 2526 - DNA, 601 bp, Rattus norvegicus
  Genbank Accession No. AI231230
atggcagcttgctatttttgtaacatggtgatttggttgaacacaataaagtacagtagtaactgatctccccttcttcctggatgagtgagcagatgattaaatgttggtgtcagcatccttgagcatattcagatgagcttctgcttctgttgaaaaggatgctgtgtttgattgtggtccgaagctttgaagcactacttggcatctccttccttggaggtctcactgtttaaacgtaacagatttgatagcttgttggtaaggtgaggtccagcttgtctccactaggtcatcttcatgtgaatccggtggttatacggttttgttttagggatatttcatttttttaataacggttttagctgacattcatggagagaatgaatccttagaactgtgccactagtgaaaggaaatcctgtctagagtatgtttctttacaaagctgtgtcacacaccatcctttgggccctctgctggaaaagtagaatcaagtctcaaataatgccttttaaattgtatcctctagtattatagatgtaggacagtactgtatcatacctctgtggatgtaaaatagcttgtacctgctttatga

SEQ ID NO: 2527 - DNA, 659 bp, Rattus norvegicus
  Genbank Accession No. AI231292
tgttttttttttttttttttttttttttcattttttaaattttttaattgagcaagagcaaggtatgacaggtactgcaaggagaagagaaccaggggacagctgttctgacgtgcagaacctgcctgcagcagcttctttactgtctcctggtgggaacaccccggagatgccctccagagctggagcacccttctcagggataaaacactacagggtaggggaacaagtaagggaccattggcatggtcctatgagactcagctcttaggcatttttgcagctggattttgtcagggtgtgtgtgcctttccagggcacgctgtagatctggaaggagcagagtgccttcctcatcagatggggctggtcgtggaaaggacagttagtcaaatttgtctgggacttggtacatgtagttcggcccatctccacatccaaataatagtttattccagccacaagctgcttacgagctctcaccacctgtatggcgcggctgtggtacgcatcgttgctgcccttgttgtactcgcttacggcgaagtccaacgctcgctgcacgccctcctcgctggcatctgcctcctgcggagctcccaacaatcgcgggggtggcctgtaagttccggcccaggccacggccaggacggccagca

SEQ ID NO: 2528 - DNA, 586 bp, Rattus norvegicus
  Genbank Accession No. AI231309
gaaatgaaaactcaatgaccaactttaattttaaaactagaaaagaggaaaaaatgtcatcaataatgaacttgggtagagtacaacaaggagtatgagttattttcaaaggcaacatatcctattttgtacatatttgcatataaaagttgtccttcctcagggtcagggagacaggactgttgcaacgggcctcctttgaagtgctgttctctcttcattgatgatgttcagggcccaaagaattcaagggcagctcctccccgcttctcctcagacttggatctcactccagtttaggcttctctttttcttcttctaaacttctcggggcatcccagatgtagctgttgagtgcttctccgagcaagtacagggaattcattaggagggttgtcgacccaaagaagatgatcctggctcctgagccaatgtgttccaggaaagggtacacccacatgccggtgacatgatgtatccagcacacccacaatatatagcccacggagaaagtgcatatggcggcgagcccactgcttctgctggggtactggtggtgggacgttctcatctcgattagtataaa

SEQ ID NO: 2529 - DNA, 549 bp, Rattus norvegicus
  Genbank Accession No. AI231321
  misc_feature (1)..(549): n = a or c or g or t
atcaatactttggttttattttaatgaaaagaaaaataaatatttttaaagagtaagaaagcagtgttgacgatggaaaggtccagccagaacggaggccagggggatgggcagaatccaccaaggagaatgaaaaaataagaatgaggttgggtaggaggataaagaggttgtanatgcctcgctggtacaagaagaagtcttcgtgtacttccataagcgcttgaacggggccattttccattagctccttcatgatctccttctcatcggaggccaggcggtaaacaggcgtgacctggtagatgtcattggaatcaacctgactattggggcagcgagaagtggcctggcgcttgcccccccccatggcgcggctgtgcatcatgcatcgaggagtggggctggcctcgtcgttctgctcacggccggagaatgggtaacagttatcagacaccacccctcggcgccgcaggaaccaccaagcaccatcgagacgcccaccttgggagcccttctggtggtgggtatcacaggataacangttct

SEQ ID NO: 2530 - DNA, 446 bp, Rattus norvegicus
  Genbank Accession No. AI231388
gaaaacagaagaacaagtttactattcgcctagtggttgtgaagtaaaattgcaggcatagtgataaaaaaggaaacaatcaactctgtattcctcagcttctaacacaaatgggaaaggggaagaaggtacaagagaagcggggtgggagtggggagctccgggacatcagggatcaggccctaaaacacaaacaaaacagcaaggggagtgcaagggtcacccaaagatacagaaacaatctcaaccccgccacttagttctgattgtccttgttgccccgccttgattttcagaagccggaaattctaatttaatgtgaagcctctcgattcttagagggcaactcgattttcttggaaacattaaatgaactaaaatgtagcagcgagcccggcagctttctgcgctctgcggtagacgtggtgttacactgccactctcca

SEQ ID NO: 2531 - DNA, 454 bp, Rattus norvegicus
  Genbank Accession No. AI231421
gaaattcaaagaaatctttttaatttttgaccattggtaaaactttaccagaaaacaggatgtactttaaaaacttgaatcaatgaaaacatgaatgaaatatgaaattaagactcattctggtggcccagtaagaaaagacagaagcccattatcaagacgaaagaaccggtggacccgagtctctgagaacagcgagtacactgagttccaggacggcctccctccacacccgggagtaactgcgtactgagttagcaacccaaaattcatgttcgcctcccaactgcctcaccggacaaatttagagtcatgattctttttgacatttacagtttagacatataagctcatgttaaatgacaactggtctgtcaaaagtacaggagaagaaaaagcaactgtttaattaaaacctttctagatttttgtttttgattattgatcaagttgc

SEQ ID NO: 2532 - DNA, 549 bp, Rattus norvegicus
  Genbank Accession No. AI231433
aaagaataaatatttttgtaattaaacattatgcaaacacgtgccacgcttgctttatccatgcatatgcgctatatacaattttgaaaaatactgtgttgtcctcttgttttaaaagtcatatacaaagtttttgtgttttttgtttaatcctcttgctgcctacccccttctccctcccaagaatttcctttacaagtagctaataatcattattcactcatgaccttagggtatgagagaaagtgaaactgtgtgtggaggtgtgtatgtgcagggcaggaaggggaagaggtcctttaccaaagtacaacgaaatggctggtttggacatgaaaagcagtgtccaggagctgtctgaatgtttaactgtactacactcaggaagaagaaaaggaagtcagctttgagaatgaagctacgttacaagttagagttggagggcttttgtgtgtctgtcacactgttggcggcctagaatactgttgtacaatggtttatctaccttttttattacactataatttacttaaactttccgttaacaaa

SEQ ID NO: 2533 - DNA, 534 bp, Rattus norvegicus
  Genbank Accession No. AI231439
ccagaaaacgtccctttttattccatatgcaaagaagtagattcatcacagaaaaaaaaaagtcttcatcaagccaagagaaccaaggccacccaagagtgaaacccaagatcagttgtcccaaggccccccgcggctctctgtattgtcccttggaagggttcctgcgaggtccctcctgagaaaaggacattctgagttaggggcaagattgcctcagggatagtcgccatgcggtcccttggccagcccactccaagtgtccgtttgctgctgcggagcccgcagctgctcagcactcggtgccggccaccgctttctattggaacgggtcttcagtcctgcagctagctgagagtccccgctgccgccgtccggtacactcagtacactcggtacactgggtacactctggagcagctgcccacggagacggtcgcccgaggaactgcgtgaggcgcatggcgccttcctctcaccggcttctcccggcgcccctgcatggagggcgccggcttacactagccccggcat

SEQ ID NO: 2534 - DNA, 526 bp, Rattus norvegicus
  Genbank Accession No. AI231448
aaacttgagaggctgagcccatgcctcctctgggtgtctttattctagctgggatgtgaatacaggtcagaacaacatggcgtcagcatcagagcccttccgcctgcttcaacagggggagggtgcacagagggggcggacagcagctccagaccagcttctcccaaaagcctcgtggtccaagtccggtggtacgcactctgggcagggaggggcaggaccatgcagtgcataggcgagaagggacacgaagtcaggagggccgcggctgggcttaatctattttggtgtcgcgctgcagcttgatgaagccgatcagtccattagtggaggagtcatgggaggttacggcagagctgccgtccagctctggctcaattttcttggccagctgcttccccagctccactccccactggtcgaagctgttgatgtcccagatgatgccctgaacgaagatcttgtgctcatacatggcaatcagtgctcccagaatgaagggtgttagcttggtaaacacaattga

SEQ ID NO: 2535 - DNA, 552 bp, Rattus norvegicus
  Genbank Accession No. AI231471
gtctctttaaatgggtttattggttttatcctagaacacaagaccttggctctgattctgagcctgaaggaagctgtaaggagcctgcctagcacccagtgggaggccctcctggaggtgaaagcacaggcttggcaccgatgcaggctccaacatctgcctgaggagggagaaactcctcctggcagtctgtattgaagcaggctgtgagccctggaggagaggcatcaagaatacccagcactggatgaacagctgacaggatcccacagcagcaaccagctccatttccaagtcttgtgaaaaatagggttcatttttaatgtgacaaaagagatccccggcagggatcattttgactctgtgcagtttttccctcctggtaacaaggtccgacagactccaggaaactgatttttttggggatggctggtgtgcttgctgacctggcccccgagtggagcaagccccaggtgaccagggcagggttaggtgaagtcactgtagggcaagcggaaggggtagagtgggtgtatcttgaatcttgccaga

SEQ ID NO: 2536 - DNA, 494 bp, Rattus norvegicus
  Genbank Accession No. AI231479
aatgggtactattaccccctgaggaaaagttgcacagtgagaaccagtctagttatgacccactacatgtttatttttttacattactctctcacgagctgagttttgctgagtgcgtttgtcggtttgtttagtggcgtttggtggaagcccttctttgcgctgctgaagtgaaatcttgctgactagttagcttttttgttgatctcagtatgggcaaagaaacaaaatccaaatggctggacagacttctgtaaatatttttaaaaaaaaaaaaacaaatgttctgtgtgtgtgggtttcgtgtggtcgtgaagtatttccttaaagcgaagcctcgagggtgcggagaggaactctttgtttagcaagtttggagtgaagataaaatggtaagaaatactgtaaatgtcgaggcgccacaccagaactgtaggagtccaaatttataataaactgtctttttaaaaagaaaacatttaagtgtctagaat

SEQ ID NO: 2537 - DNA, 468 bp, Rattus norvegicus
  Genbank Accession No. AI231489
ggggcttatgatgaaagctttattctgcatcaggggacctggaaaatgaagctgcatttggggcacactacagatgagaaatgatctgtatatgatgaacacaaaacacaattatagttactcagtaccaggtactccagaccaccagtgcttaagagaaagtaaaacatgattgacaacgacttgatcattctcatcaggtgtctggtcacgggggacaacaacctcagcacttgataaattctggagttcattcaccgttttgcctcctttcccaatgactttgccagcagcaaaggacggtactttgatgtgagcttcaagtttcaccttttccttaggactcacaaagttttcttctttaatttttccataaattctcccctgagccttgaactgagcctttggtggtccattgatgatcaccatcctcactttagcatctggtgcttcggctggcgcgatctt

SEQ ID NO: 2538 - DNA, 446 bp, Rattus norvegicus
  Genbank Accession No. AI231506
tttcaatcatttaattaataccttttaatgaaacacagctttgccatgtgtctcactcaagcttcaaaggagaaggaatagggaaaggattgtttatatagacatatcaaagactcaaaagtaaggaaatatatatatatttctctcttctaacatttttatgcaaattaaaaatcagaggcttttggtctctccatttgcacaaggtcaagctcatttaccccacaggacaaagagattgtcccttaaactctccttccttctttgtactctggcccacccagtggggaaacagaagatcccaaggcagggcaagagctcctgtgacccgggaggaggaaagacaaggcagctacttccccaccctgacagctcccacactactgccagggcctggttccgaggggtcctgacagtcctggatcccggggcaaaacagtgcttac

SEQ ID NO: 2539 - DNA, 542 bp, Rattus norvegicus
  Genbank Accession No. AI231547
cactcaaaattcttcagtttttacaaaactaacagggtggagtagggaagggagcagggaggcagccgcaggggtgggtaggcggagaggcaggctatgcttctgtcttcacctgagcctggttgcctgccacattgttcggctcacccttcatctcagcatcagtgggatggtctcctgcagccacttctgtcttggccttatgttcctcctcagccagcctctcaaacatgttggcatagagcttcttttcccgggcaagctgcctgcgggtccgctgctggcacacagccagctgggtcttggcggctttgttgctgggatagagctgcaggaccttttggaagtcagctcgtgccaggtcaaagtcattcacggccaggtgtgcctctccccggcgaaacaggcccttctcattgttgctgtccagctccaaggccttgttacagctttcgatggcagctgagaaggcctgcagtttcaggtgacacatggccagattgagatgtgaggccagtcggagcgcatggaccttttgcatt

SEQ ID NO: 2540 - DNA, 561 bp, Rattus norvegicus
  Genbank Accession No. AI231566
  misc_feature (1)..(561): n = a or c or g or t
caaggataaaataagtctttatttatattcttatagtaaagggggagccttaacttgcagggagattcttgggcagtatgtacaacatacttttatttccacggaatggaatcaacaccgactgagactacaaagtatacactaaaaatcagcaaatgctggcaacagagtaggaaaaagacaaagaaatgaagcctaaagacgaaaaacccttcactgggatctgctgaccacagtcagagccagggccggatcacacagtggcgacaattccaggacaggaggaaggaaggagggctgggctgtgggtttagtaccaggtaagtcgctcttggtgtttacatataaaaaagttggctctgtttcttagaaatacacacagaagtgaagatttgatcattactttatgaatctgtcgctttacaatatcgacatcatcaaaaataggggcatttcattcagattcaaatttcagtagcaggaaataaatatcaaaacatcatcactggcccttaatacaaaacctntaccccacctacaacttcctcccagcccacccac

SEQ ID NO: 2541 - DNA, 505 bp, Rattus norvegicus
  Genbank Accession No. AI231572
gattttcaatgcttcactttattctcaaccacgaggcagccacacactaacttccgacacgggacatcacatgatttcttcggtgtgctccaaggcagacccagctctcctggagtttgcagtcctcagctttcagacgttaaagctttcaccgcagccacaggttcccttgatgttggggttgttgaacacaaactcactggacagtttgtcttccacatagtccatctctgtgcctaacagggttagctgggctttcttctcgatgaacactcggactccgtcttgaataacttcttcatcagcatctccttttgtctttgtatactccaggctgtaagagaggccgttacagcccctggtccgcacacccactttcagacccacatgctcaggcttgtctttaagaagttgttttatcttgttcacagcagagggggtcagcgtgagcgccgcccgcgtgggttgcagttttctcttgctcacggcccgcacggtggcgcgg

SEQ ID NO: 2542 - DNA, 603 bp, Rattus norvegicus
  Genbank Accession No. AI231606
cccaagtgtccctttatgggcacacactttattgcacatacatttttgtacatccaggtcccaaacgagacaacgctcgctcatctttcagaccctcacagcgcacaaaggccctggcaaagggtaggcactcgataagtacttcttcagagcatgaccattcatgcgcctacgatctttctactgtacagcaggctgacagacagcagctccagtcccgtctgctctgcagaacacgcaatcacacaggctttgtgaatcttgttcactttccagatcaaggtgtccagggtttcacaggcctttgcccgcacactgttttttgccacttcttcactgggtttatccttaacaaaggattaactttagttcacatcaggggtgagaacccggcttttaaccctaggggagcatcccttcagtttctgtcacatataaacgctgtgtgtcgagaccgaaggtcgtctacgatcttctcttctatcaccatgcctcttgctacctcgtcctcagacagcaaaaactttgtctctgagtctttggttacaataatcacaaaggactttattgactccaggatattggccaccactacttgatgct

SEQ ID NO: 2543 - DNA, 635 bp, Rattus norvegicus
  Genbank Accession No. AI231778
ccctttgtaacgaaaggctttattgctacctttaaacaccccgtgtatagcacatacaaatccccgtacagagagtcgttcaagcagtaatactgaaaaacatgaacatacacaaaaagattaaaaaattagacatttagattactagaaattttccaagaaaaatttaaaatgtgaagtgctttttagaaactacactacacacaccagtgtaaatttggtttttattaacaatcaacttgaaacattgcatttaaatgtgcaccagttacgcgccttcatcgctcactccccacagacaagtgcctttgacctccctacgctttgggctttccttgagctgcattatttcaaaccagatttgaacacggagtatttcaaatatgcatgtgcatttaaccacacccacaagatcttaaccctgcccacacagccttaactctcctgtcacttagacatgacccaaggccttaaactatcctatcctcaactgcctgagcctgcacatctgtgtccacttggacacacccacaggtttagaaactaagcctacatgactgaagagtgtaccgaaaccagaaaggagagtcagagaaacctagactaagaagagaatgcttacatttccaggaaat

SEQ ID NO: 2544 - DNA, 658 bp, Rattus norvegicus
  Genbank Accession No. AI231785
gcaaccaagtattggctttaatgaaaactaccaaagaacaagagctaaccgcaaagcagcagccagtcagagctaagtttctgcgcagaccttccctcaggccgtctctggaccatggagagttagtcactgctgttgaagcgttgggcagaggctaccatggagactcatcggatcgataagcagggtgcttgggactcaggaggcacttagatacagaagaggtaatactcccggccagccagaagattctgggaagccatccttcacagtggattgacaggttatctgacatcctcaagcatccctgcctcatcttgcctggacctgccgacgtaatccaacagcaaacagccatggacactaatctaatctctccagtctcccctttccctcccgaagcctccacaaaggctatctcagggggccatggctctggctctcaagagtagtagggctgcaggtatgtttttggaggctgaaaggcataaaacagcattcttgaagttctgttcgtcttatggcaccgactcaatttcaggtctgatttctcttccttcccctccctccgcccatggcctctcaccctgcacagacacagggcaccaagcagcctagcctttgatctctactgggatctcccagcagaagaggttat

SEQ ID NO: 2545 - DNA, 664 bp, Rattus norvegicus
  Genbank Accession No. AI231792
ccccctccccgaaatgtaacaacattaaagccattccaacgtagatctatttctacggctccttgcatatctcattgtagctgaagttagatgtttcagtaacgaaatgaaggttatctcatcaaaatggtggcacatctcaaagacgggtttcttgttcctgtaactctctgcctatccctcaaaacctaaaaccccctacggtccagagctaacaggaagacagcccacagccaaggctaaatcaccgtacccatgcacagaaagggctcccaaacaagcagaggggttagacttctggaacgggcaacttgtttatttatacgggtaagaatagggaagagaagcccccttggttagcgctttgcctccaccccaagttactgcataccaagcggctatgaataaagacaaccagctgactgcaagtcccgcagtgcatgcatcttaaaaagtctctacaacgcggaccctagggagccaccgggttgccagccgagtctgctgtgctgctggggtttggaggcgtggcggctttggcttctagctgttggctttcagtttgtggatcttcgttttcaggacctttcttatccttgtcggctgccacggggcccatgatttcctgcagtggctgctcgggctcaaggttgctgggctggaa

SEQ ID NO: 2546 - DNA, 410 bp, Rattus norvegicus
  Genbank Accession No. AI231797
gaggacaaaaacaacctgtttatttccatgtaatttatatacaagttataaacacttccttctgctgctcaaaacttttccggaaaggtctccatttcttctttaatcctgttttctacgagtaacgtgaagttactgtctgtattggagaggttgtagctgacaaacacctgtttgctggtcttcctggctaaacgctgagcaaggccggtggaagtcgtatcagaagtgtctccaaaaagggaggtgcacacagggatggagtcaggaagagcgagtccgttagccgcatgacatgaaagtggacgagctgctcccacagcctcgcactgaagttgtgaagcgacacgtccgcggcggcttgcggctcctccatcccgccagccaccgggccacagcctcctcgtgcc

SEQ ID NO: 2547 - DNA, 651 bp, Rattus norvegicus
  Genbank Accession No. AI231798
ggccatttcgggagtttatttccagacggaggaatcggcgaggggccgcctgaaaatcacaatctgtcatctgccccattattcattggcagatgtgtcaaggctttagggtctccccaccaaaggggagattctgacacagtcaaagacacttgtccatcaaatgactcacaggacctctctgccaatcctggcagttagactggggtgcccttggctctccctttagtctcctgttttgcagggtagtcccaggggcgcattcgagtcctctccaggttcaggagcggctcctcgacgctggtatccccgtttttctgtcgctcagcgaggatcatggcccgcagcagaggtgggtaggggacaaggttcaatctgtcctctgctttcccagtgaacgcagtgaaagcctcctcctcgtgcttgggtaccaaccgccaatcgtggtacatgacttgctcgatttcccgagccgtttcctcactcttccctttgaaagtcaggataccccaggccctcccgtggtccaagttctgcgccgtgtagtcaggcctcacacgcgtgaggcgccagtagcatggctcgtcgtgctgccacagccaggacttgcgggtaaccagacgacccaggccaaacaaggggaagcgggcg

SEQ ID NO: 2548 - DNA, 574 bp, Rattus norvegicus
  Genbank Accession No. AI231808
aacaagctcttattagaaacgctttggtatcaacacaataaaaatatactggttcccctgaccccactgagtcatgtcaagtaactggaaaagttagcatttgtcgtcctcagcttttttggggtggggattttctccccacaaataatgactactatttatttatgtggcttactacgggtataattatatagttttggactttaagaacaagaaatcaaagtattcagaagagacgttttcaggcatttcttggcttcttcttcagaggttactctggtgggcacaatggctctcagatcacctttttccccagcttggccattcttatccttaaagctgttaaagaaggatcctcagtcccatctccagctcctggaacacccaggggagagtgccgggcagggctgcctaagcgctcttcttgctctttcagagatatggaatttttgtggggagatttatggtttgtgttttcatgagggctaacttccgatctcttcctaggaagtggggttggtttagctggctggtaaacctgactacagggagctacgggatggtaggatggctt

SEQ ID NO: 2549 - DNA, 589 bp, Rattus norvegicus
  Genbank Accession No. AI231814
aaagttaaaacacagttttatttactcatttataaatactgttgtgtttacaggcatcatatagatgtgaatattattcccaaactttcaaacacagaatacttaatactatataacaacaaccagtaaaacaaatccatccatctcagggttgaaaaggccactcaaaattgcataaaaatacattcagttcggaaagccagtctggctccctccctctggagctcctccaggtgtatttacagctgactgaagttaatcctcacagctcagctggcaaacagttccactcggtgcgttaagcgtgggtgaagggtggagagaggaaataacacaatgcccgcactgaagaggtgaccaacatggagctgaggacacaggcccagaaggaaaccgtaagccaaagctggggtctgaaccactgatgaccctgcagagggaatcatggctctgcttgaagggaccagccaggagggggctgaggtgccgagggatcaagggatgctgactagaaggtggacatgctagatgggcgcatcctctcagaatcctgtcccctgtactggcctgctggtacctttacctacag

SEQ ID NO: 2550 - DNA, 637 bp, Rattus norvegicus
  Genbank Accession No. AI231846
gtcacaaaacatcattttattaattgattaattttttttttacaaaaataaacaatttcatgaacaagaagtacaaaagcttctggatatgcacactccaggagggggagagcctggtttcggctgcttggtggctttcactgaaagcaaatgaggcagaaaggccccgaccctacccccaccccaggtcctggctcaaatgcaatctgctcctccactctagtcttggctcatatggatgtgtgcactgctgcccatgacctggggctggctgaggagcaacccgtagggagaggccagagagccttcccacggctggctccctcacatcttggagcattcccccggcgatccatttggagctgagctgagagaacactctgtgactgactgtccccgtgcagctcctgcccactgtggcttatgcagcagcagcagcagcagtgtctggctacattctcaaactgtgaatgcagtaatggggctgcccatgggactatcccagttaagaccagcctgagccctgctcacagctccagagaggcaatcagatcccaaccagtgacgcttaggctgggagcaacagtcttagaccgaaagctggcaaactcacattttaacacttttgcatattgca

SEQ ID NO: 2551 - DNA, 289 bp, Rattus norvegicus
  Genbank Accession No. AI231921
aggcctgtgatgagtttagggttgattgttaatagtatgaggggaataatgtgtaaagctttgagggttaattctcgggtgtgggaaggttggaggttgttaatgtggctggttggttttcctcgttgggttgggaaaattatttatattgggtttattcctgggatgacaatgttagttgctataaggatgataaaggggttcgatcaggaaaatgttgctttaacaatgaataactcccctatgagggtaattagggggggaagtgctaggttggctaaccttgcta

SEQ ID NO: 2552 - DNA, 543 bp, Rattus norvegicus
  Genbank Accession No. AI232001
gcacatcactcctttattatactgatctggaaagagacttagttgttatgcccaaacgagttctgaacccacacagtagggtcaagcagctggaacatgattcagacagtgaaagacaaaaccttggacatgatcaaggggcttcacctctacaaaacaaggcaaagggatccaaacacagctagaggtacaaggagtttatcccatttgatatgaggaatggctttttttctggtgaccacttagtaaacaaagagctaagaaaactataattactatctctcaactctcctgtaacagggagccgtccctggatatggaccaagagcctgctccccagaggtcttcttctgactagattctatgaagggagtgggtgccggggataaaatactaaaaggagaatgggagccacaggtccctatgtgcagctacaacttaaactgaagatcctaaagatgtagtcagtgtggcaggtgcaggggagggtgcaggaggcaggaacaagcagggagagagggtgtcagggtaggagtccgtcca

SEQ ID NO: 2553 - DNA, 578 bp, Rattus norvegicus
  Genbank Accession No. AI232006
gcggagtctcagtctttaatctcagcagtgctcacacacatgaaaccacacactctcggactttcagatcttgttgaaggctgcaatgtcgacactctgcacatgctcctcaaacttggtgatctcctcttcctcatcactgccgaacaggtcaatgtcattgtcctcgtcgtcctctgctggtgtggctcctttcttggctgggggctccacttgacgcataggagagacatgttgggtctgtggggctgtagctcggtgagtaggtgaactcttctccagagtgctcagccggacctccaacttggaaatggcctgctgcaaatcttgcaccacgcctcgaaagttctggttctctacttccagactggcaatccgcacaatgaggtcactgtggtctccaccaggtccactggaggctccagggcctgaacttccagccaaggatttctggatgttctctctggctcttgcaatgtctcggaggatcacgctggcgccattctcctgccgagagccaacggtcacaggcccattcatctgctcgtagaaatccctttctggatcggcatatttaa

SEQ ID NO: 2554 - DNA, 650 bp, Rattus norvegicus
  Genbank Accession No. AI232021
gaaaacaagctttatttaaataaggatttaaatacattacataacattaaaactggaagggaaaagaaaaccaaaagaccagtttgttccttcacatggcactgggcagtggcttgtattgtgttgaagcctttatagctagccataagaccaacagcaccagcttggtatttgttcccttgtcgtaagtttaactgataccaggctggccttacccttcatgtttcaacatcccttggctaggagagatctgcctaaaaaagactactgccctggtggtgagctaatgtccatgacttctctggaaaggtagccctttctggattctgcctacctggtcagacaccaggggttctttttacagccagagagactcaactctaatgatatagctggggcagttacccatactctcagtcacctgggctgttcaaatggtgacactcttctagggctggggactgtgtcaagggagtcccaaggaacttctggtcagacatagcctccagtgatttgggggttcttggcttggctgaaatcctgttatttattgctttgttccagggtggactgtcagggcttactgcttaacctgtttaaaatgagggactttaagactacacagcatggctcttttcagtttattgcat

SEQ ID NO: 2555 - DNA, 542 bp, Rattus norvegicus
  Genbank Accession No. AI232033
acaataccctataaaaatgtaaatttagaaacttttatttttattaattagaactgaacaaaaagcacaataaagaagaaaaaataatcaagtgtttacttgattgggtgtgaagggaaggtaggaaaggctcagtggagacagtcagcagatggtagaaggaagctagggactgtcactggggagcagctggtagagcctgaggccacaaaatgagaagaaatggagatgagtacaaagatagctggttgcaacggagggcttcactgttatacaggtatgtgcaaaacatttattctctttaaatatcatagcctgtccccggactacattcaaaaaggtgagaacagcagaaagtaggatcaggacgggaatataaaataaattcaatttagttttcagaactgcaaccccaagggagcagagtcccttatcctggctgactgctgaggagaagaatggtgagtgaaagggaagtgtccctaagattcaaacccaggccccactggctgccactggatggggctcaggtgagactaagc

SEQ ID NO: 2556 - DNA, 560 bp, Rattus norvegicus
  Genbank Accession No. AI232047
aaaacaaaactccatttccatgcttctcaggttgtaccatcattgggcataaaaatcagtcaacatttgcaaggcagtgtcactcacagaatcacccagtgctattttacagtggtcattctctttacaacaatcaggcattgctttgtacaatgggcaaacgctataacaaacgccttccataaacagttagccctttagctattgggaaggtcaagagtcgcttgaagcagtcactggtcgcactaaacaaagtaccaggtggcagctatcaagcccctaaaaagtgtttttaaaaaacagatttacatcccatagtaagtcttagaaacctcaaagatagggcctatcatttcaaaacactacggatatctacggataaaaatctgcattcaactgtgcagcgttttcttctagatctggattaaaacctttattatttaccccaattagttcctctattaattctgctactctcggttttaaaaaggccatggttgccagttgatcttccacagaagaaaacactgcagcccgttccctgtgcttactttcctgtg

SEQ ID NO: 2557 - DNA, 496 bp, Rattus norvegicus
  Genbank Accession No. AI232066
cagaaactgtttaatgttagaattacaggcttttggcaagtatatggcaagcccatctgtccgttcccatgtccactgagaacacagcagagggggcatgccccaagctctggcctcagtccagacttcagcttgggtttgtccagcgagatgtctccagtccatgaaagcccatctggctacagcttgagttcactgggcattggctcccctcttaggccagccagcaagttgttagccgccagcaaggacatggtgttgcgagttttgtaggtggcactgcctgaggcctgggctggcgccccgtgtagagaaatctctggacaccaaatggtttcagtcgtcgagcaatggcctgacctatgcgccccagccccacaatgccaacagtgctctcggagagtccataaccgcacatccacaagccggtgttaaggagcaggacactacaatgaagtctgactcggcagccagctgagcaataggccctcgtgcc

SEQ ID NO: 2558 - DNA, 582 bp, Rattus norvegicus
  Genbank Accession No. AI232087
gggtagcataaattttctcaaactttaatcttcacaattattttcactctatacactttattgaaaaggtctagatttatttgacaaaatgattatgaccagaataaagatatcttctttttcatatatcagtaagtggctggaatagttaatttagtcatgtatcctggaaaatgagtttcaaaatcttcctctttttttttgaggtcagctactgtcaataatggacattaggcaatagatcataacacttcagtaacatgctgtgtcagaaccttgcataattcacacattcatttgctctctgctacattatgacttcatggattaaagtttattaaattccaaatatttcttgcaggagggaatgagtaaaacatcaggataatgctgtcttcatttttaaatatatattgttgttttaattgatacatagtaattgcacataattatggcacagtatgacgtttcaataatgtatagtgtacataataatcaaatgaaggtaattggcatgtcacaccagatgtaactatttcctttctttctgggacatggctattggacatagtcaattaattg

SEQ ID NO: 2559 - DNA, 612 bp, Rattus norvegicus
  Genbank Accession No. AI232088
ttaaagtgctcttcagccaagcaccgttatttgtttctaatccaaacactttggggtttcttcccatagcaaactgagtcaaaaatgaaaatttccagcataaaaactgttacaaaccaatctaattcattttgtaaagtgccactgaatttagccttcaagaattcaaagtaatacaaaacttccaatatttttgtttacagaaatatgaaattccaaaaatgggattgttttgtctagagcagctgatagcatttgtcaaagccaagaccgcacactgctgccactgtgggtaaggcaggctgctcagcaccgtccacgctgcttctcagaacaggcccaggccgggggcacagctcagcttcacggtaaaggccagcctatgatctgacaggaaaaccaactgcgactgaagcaaagacactcaagaggctctccacctgatgcaccttccctgtgaggtagcacacgctgctgccactaggacagagcgctgtgactgggtgacagattaacaggggaacacttgagtccacagcactctggaatgcagtataagacgcttcaaagcaagttagagaggaaaaaagtaaaactccacctgacaccacc

SEQ ID NO: 2560 - DNA, 539 bp, Rattus norvegicus
  Genbank Accession No. AI232103
gaaatggcttcagatcacacattgtcacagaaccagccccattggattgtcccaatccttggacgcagagcccgaggcaggcacagtggctttgattgaccacttgtggccctgagcacacaagtccctccacaggacaagtgcctttgcgcggctgctgagagatttgcggacttcagactgaagagcgaggacaaggctcttcttgggcttggctggggttgggttctgctctggatgggatctcaggggtcaccagagaagccactctgagtgacaagccccatgtcgtgtatggccctcaggaaaaaaaatgagcaccaggctgaatctggccacattcctggtctctgcccacggtgacaggaaacagggtcagatatggggtcactgtgaacttggaaacctgctctggcaggaagtgggggagttgggagagttgggtcccactcctcaagcatgaggagagccagttaccacatggatgagcaggtgcccgcctgtacaactggccacagtcactggacggtgaaagggga

SEQ ID NO: 2561 - DNA, 574 bp, Rattus norvegicus
  Genbank Accession No. AI232135
aataaaaacaaactgtgacaaaaatggattccggcttcccctccccatccacccttctgggataaacttttccaccgttgccaagagttttcacacattaagtaacagcatataatgaagctaagcagttgtagaatagcgtaagtagaatctgattaccaagcccactcaaagctgcactgtcctaccaaggctgaatgagtaagacaatgaggagggaagaaacactaaagtccatgcgcaaagacagacatttgtttgatctgctggctcagggccaaacactggatttgcttcttcaaagtcattatgaatctttagtgtaattctgggaagtttgtgtcactagcctaaaaaccaccaatagggagggcacagcaacatcacccttcccagcaagaacttatcccacagaagccaagataacatccacaggtgttttctctctgcttctcacagtcacctgcatggtcacgccatctgctagggccagcctggaccgcaccagtaagtcatagccacctctgtaaactcctgctagatagagggaatgggaattcttattctcgggtac

SEQ ID NO: 2562 - DNA, 139 bp, Rattus norvegicus
  Genbank Accession No. AI232155
cagaataaaaggttcccctatttattacaaaatgcattacacaaaaacaactgaccaaaatgtctaaaaacagcccagactcttccaaccttcatccacttgtagataaaaggagcctggtcctgctcgagggcagccc

SEQ ID NO: 2563 - DNA, 506 bp, Rattus norvegicus
  Genbank Accession No. AI232174
caaactttttttttttttttttttttttttttgccatttggatttttttttattctctttttaaatactggacagtgaaaaataaatacgccttctcatccaccagacaaggttatttcccaactccctgggagaccttgtcaacccccttcatacacacccctggttctattccaaaaccttccccatgcctcccacccacaaataccctcactatccccgtcttccacagtgatgaggccccagaaatagggggtacaggatgggaggagggatagcaggggagcccccctgaactgtcaaatctgggtgggtcaaggagcacccccaccaacaggcggagaatgggggtgttcagaggttggggcattagaggataaaggcacatccagtctgatagggaaggggaggctcccctcaccctgggggtagggtggacaagagggagggggtatgaccctgtttcacacccctccattagctcctggaggttgggggggacccaa

SEQ ID NO: 2564 - DNA, 454 bp, Rattus norvegicus
  Genbank Accession No. AI232230
aatggaggcacttaaaagttttatttgctgaaaatgttataacatttaactaaaaattaaacatgtttcatatctcctttcatgaaacagcagcagcaagagatggcaaatgttcgaaagtctcttcaatccatgttattctgatgagtctttgaagaaagaacttgaacctgttcaggtgcttgttgatatgaagtcttgaagatacttatatgaaggtgtcttgaaatttgcaggcacaaagaaactaaagtatatcatcatatcaaatgaagtaatgaccattgctatccatagaacaacatattcctctataaaattattaaagaattggtctaaaaataaaagacctggcccaataaaaacagagtcttgaagatatagttcactttttgtcatgtgagctatcaccaagtttttgtgcaactttagcaaagacacatccaaacattaa

SEQ ID NO: 2565 - DNA, 574 bp, Rattus norvegicus
  Genbank Accession No. AI232248
aggtcacttaaattttgccaaaattctggaatcattcctttcatcatttccccttaggctctgaaattcagagaggcctcacatcaacaacaattaaaatatattcaataattaataatcctagcttaaacagttcagctttaggaggggagtgctagacacgtgtgaaagcaggacactaacatctgacagggtcatcccacaggccagcccaacagtgaaggacatagcagcagcctgatgcatgacagtaggtcagccatgtgaccggagaggcttccattgtctccactgctcaagttctgcagctgacaagttcacagtgtcttccatttcatccccaccgttaagtctgtgatattgtctgactccataatgggacaggaaagaacacacaaagacacacagaggagactggaaggacagactgcgggtggtgcgaaaacacacacattcacagtacatacataacaagaaaggtatctcacaccacacgggcagaggtcactgcagacgtcactctgagcaaagctggtccgcagaaagtgaaagcgtcacaaacagttcatacaga

SEQ ID NO: 2566 - DNA, 566 bp, Rattus norvegicus
  Genbank Accession No. AI232256
cagaatttaaaaaaatttacttaaaagaaaaatggggaaagactcaaaactagaccgctgttcccttaactatgtctactgtgaattcaaagtatcagaaatcatgtactgtccccaaaggccatgtcactacaacaaaggaactctaagtcattggcatcaactgttgaaatgaagggaatgagtgggaaccagtgagaagaaaccctgacaaggacacaacgtgagcaggtgctttgggcgtcaggctcaggctgatggacagattctggtcctgcattgaaggaggatagatatctggtcaaccatcttggctccaaggggaaagaaaacaactggcaggatccaaggaaggagcaccctgcagcctacacacaagtctccacctctcactcccaggagatgtgctccgacacttcaacgtggcctcctcaggaggatttgctagcagcccagaagtgacgatacaggaaacctattagaatagcacccacgatggggacaatccaatatgcccaggaactttggcatgaattgttttttgaagggtccttgtcaccatcttt

SEQ ID NO: 2567 - DNA, 667 bp, Rattus norvegicus
  Genbank Accession No. AI232268
ccagtgacagatttatataatttcaatgtaaacttttgctgcagcatggagaccggtcatatctcattggtagatgtacccaaagccctcaaccagggcggtgacagctacacttgcttgaaagaaaattagtccttgccagccgcagcaggatcagatcggtatttctccttgccactgtggacagccacaccagtatgacaagttgacagttcccagtgtcttcaagagcctctctaggctactgccagtggcttctggtctcagagctcattgtgccgagcccttgagaccctgctggacaggtcctgcagatgcttcttcaccttgtagcccagctcctttgtcttctcctccagcaggacgtacttctccttgttgcggctgatgtgctcggggtcaccgatgctctccacgtgcttcagcttctggtgggaaatctccagctgcttctggtagtggttgtgcttttcgattttggcctcgaagtgcttaagctcctccctgaacgactccagttccttctcggtgaagttggcagactgagccaggtcccacagatctatcactcggggctcttcaaactcagtggcggggccgtagccctggtggctgaccttcctcaagcggtctaggccctggttgatactacgcaatctgtccttta

SEQ ID NO: 2568 - DNA, 575 bp, Rattus norvegicus
  Genbank Accession No. AI232272
aaagttagggtcctttattggagcagatgggaaatgggaaacagatgtcttcagggtctgagagaaaacttagaacagaaaagcccatcctgggagaaagaacagctcgtgaagttgtcagggagtgcccaggggaatggtgaaggagaggtagtccccaagagcaccccagcggggccggtagatctggaagatggtgatccaggtggtgagaacaatcacccagaagaggaagcccacagctgagcgccaaacatagcctttgatttggctctgctctgtgtaggctggagcgaagaaggcctctttgaagaaccagaaaatgttgaccaaccaaagaaaaggcagaaatgcaaatccaccaagatagtacttccggcacaggttcaacttctcctcattggacacccgctctaagttcatagttgcgctggagcctggtggcactaatttggcttgcagagcaagacccaaatgacaggcacaagatcacgaacaatcacgccccttgtacgcatgcgctcccaggaaacactcgcttgactgtcggcgaaggcaagttggcccctcgtgcc

SEQ ID NO: 2569 - DNA, 618 bp, Rattus norvegicus
  Genbank Accession No. AI232273
aagaagaataaaaacaaattttatgccatacctggggtacagaaaacattgaagacatgtcctccccatccccaccacagacccaaacacacacaatttaccagatttagtatagcacgtgcaggcaactcattcacaagataaagcaaatgtcccagccgttggcgatctcctagcctgtcatgactagaggacttgtgcccacagtcacatgaacccctacacaaaaccacagtgcgaagtcaaggaagcactgccaggacactgtacagcagatggccacttcccgacggcctctcctccaggtgagtcggaagcccacagcctgggcctctgacggatgtcactggagaaccagctggcagccacgtggtagaaacagctttcattggcacatctgtactttcaatggaaaagaaatgaagtctttaatgttaggaggctgtgctgtcctgcgtggacatgtctggctgtggtcccgctggcccttggcactcggtctcatccacacacagcggagcccgctgtctgtctcacaggatcacttgagggtcttgctgaggttagagaagccaataccaacacaggtcattagcactttgtccccgcccttgagtt

SEQ ID NO: 2570 - DNA, 641 bp, Rattus norvegicus
  Genbank Accession No. AI232294
aggattaaatgattttattcagtttcacctcaaaaatcatgtttaattaaaaataacactattattaaaaataatacaagacatgtgcattacaaagtaaagaatcggaaaacgttgagggtttagttctaaagaggtcctagacccacatcttatcaccattagcaaggttaggaagttgatttctggctaatgatcatcacaggttctataatacagaacagagaggagttttctaaccatcatcaccacacactaaccatcaacactcaataatagtgtaatatctttggaaaagcgcaaaaagatttctttagtggaatcactttggaaagagtaacaaacaggtctctggattcccaaccttccctccaccatcctgcaaaatccatgctgggttctggcgtgaggtctgggttttaataggaggcacaaggtatgcctaactaaggtcaagctgtgcccaccaccatttgtcctgaggactatgcaacatctctttctgggagccacgttcctcctcaagctggcaccaggctttagccttttccttctcctggcatgaaattcctgaggtaattccagtgtcttgtggtcattgtctcagcagtctatggagccaaagaaagggcacaaaggcg

SEQ ID NO: 2571 - DNA, 644 bp, Rattus norvegicus
  Genbank Accession No. AI232296
ggggcttttaaagtggaaaacatttattaacattgaagctctcatcatacaaggccatataaaaagtcttagcattctgattatataagtatattttctacatagttacagggttatataatttcgcttttcataatacattgcctcaatacattaggtctattaaacaaaagcacttattttcaaatccaatacttgaacaatttcctctgcacatggttcagcagggctagttagcataagatgctctttatgaagaggtatgagatctcagtattaacaggtgctgaaatttagttttttgatgcagcattttttaatcacaacacaaaagtatactgaaatatggaaagtgaggtccagagacattcctgtggaatcaaactcataacactatagtggttttgaaaaccttaaaacaaagcacttgaagtcaacaaacactagacctttcctatgaggaaaaactactcgggaatagaaaggaaggtgacatcttttagtttctctgtggtactgtgaagggaaataaactgctgttgccacgcattcatcatgacaccgagggactgtcaaaagggacatgtgccaacccaacagcacgaggcaactttatgaaagggagagttgtttagctcatgcta

SEQ ID NO: 2572 - DNA, 605 bp, Rattus norvegicus
  Genbank Accession No. AI232301
  misc_feature (1)..(605): n = a or c or g or t
ggatccaggtagattttttaaggtaagcaattattttatttccctggcctgacagcaattgacttcaaagtcccagaacctgatgccgacaaagcgaacatacagatagctcccaacggggaggacgctcttcatttgtagagatgaattgaaatgtcatgtgtgaatgcgattcctgcccctccccccaacagagtccctaaatgaaatgaatgagtaaagcccccatgaaactctggcgcccctcgttccatcttctctcgatagcagatgccgcggagggagacagctggccatcgctttgcattccagtgcgagtgagacctaagagactgcagcagggggaggacgagcggcaggtgtgtgacctagcttaccttgtaaccccgaccctccacacacagacacgctgtccctgtccatgagaaaggtgaaggaaatgctagaggactgatcctgaggctcctgaaagtccaaggttcttgtgggaagaagagcgggacatgttcaaccctgaactccactttaacgccatccaaactggtggnaatcacaaccacattgcgaacagccctattttccaagaggactncatctaaatgtcc

SEQ ID NO: 2573 - DNA, 620 bp, Rattus norvegicus
  Genbank Accession No. AI232319
cacagggcacacactttattgtacacagccgaaggggaggatgtgtggaaaccctcacaccagcaccccttcctacggacttgcttttcttcgcccttccctgtgactgagttttagcctactggattactaattcacaaggcacagaagcgaaggccagttggtgtctggacgggaaatttagaagaccaagggcactgtttcctacctccgaggtgttttccccaggacacagggtttcttggtcctcagtgtagggtgagccacttctccaaacagataacaccatcatttaaaattcaaaatgtaaatgcaacttgcgtctgggtggactcgctctacacatctctaaacacccagctgggcacagggctgaggaacagggtgtgcgttccatgtccagtggtgtggaacacttcctctgttggtatcaatgttttatatgagaaacaacccacaaaactaatcaaacaaaagcttcacctttgcacggagctcagcatgggtgtctgtgcaagaccaatcacaagcccacgtgttaggaattccctgtgctgctaaagtaggattaataatcaaaggtatcgcggggtctagtagtaaccggtatgcaggaagca

SEQ ID NO: 2574 - DNA, 533 bp, Rattus norvegicus
  Genbank Accession No. AI232320
ccttctttccttttaatcgccatattaaaagtttagatccaaaattttagaaattctcgggaaactttaagaaacgagcatgaactatgatagcccacagtctgataataagctgcaacaaacgggcggttgccaggctggggggaaggtctgtatccctgcaggtcagcggctcccctttctttctccctttccacaggggggctctggtccacagcaaaacctggggggctcactgcttcagggagggtcacccaggatccacagagggaggcccttcaccgcagagcagatcctatggggtcgctgggtctattcaccgttcactgctgtgggtggaattttaaggggaagccgtttgggtaacggctctgctcacattttttccccggggaatggttgaatggattggcctccttagacgggacgccgggcatattttctgcggggcatctaatccactcgttcaaggtaccaagggcctgggaagaggttgcttgtgtcaccagggggagagaagttcaccttgtggt

SEQ ID NO: 2575 - DNA, 657 bp, Rattus norvegicus
  Genbank Accession No. AI232339
cagtgtgatgagcatctctttactgaagtggttagttctgaggcagggaagtacaagggagtcagcgctataaacaagcctgcatgctaggccgtaagaataaataacaaccattggacagctcctacaatatcacttttcacatttctgaatatgaaatgaaaacagcattggttaaggaaagggcatctaataatcattagatcaaataatcattgattctcaaactgcaggacttggccaaattaaaaaatgacaaaagcattcaccgttactactgtagaacaagtgtaaattacttaacagatcctttcaatgaacagcattttatctttaagagacatttcagtttaccattagcaaaatacatcaaaaatatattaaggcactaaaataaatacatagtactacattgtcaacgaatggagacgtcatgaggtgtactgaatgagtcgtgatgaaggaagattattttagctttgacagtgcatagtaatctaaccagccgattatgacatgtcaatcagacagtatttctctgtctatctcatctgcaagataagacaactgaccatgacggttcttgagcaatgactgggtcaaactgtattctcctgagatgttcactttaagttttgcttcccttggcagtttatt

SEQ ID NO: 2576 - DNA, 615 bp, Rattus norvegicus
  Genbank Accession No. AI232350
ttgggatacacaggcacaggcacagtcactcgggggactggcgtgccccacggaaccaaggatgggcttttataggattttggggagcagaagcaagcatacacaagcagatgcatggttacagggatataattggtggattctaatatggcaagggtttagcccgggggcaagtttcctagctaccttcctgaaacataacgactgactcggcccccccaagggttcagcctgggggcaagtttcctagctacctttctggaacataacgactgactcggccccccaagggttcagcccgggggcaagtttcttagctacctttttggaacataacggctgactcggccccccaccagggtgtgggacctctcccggggcttttctcattgtcaggtgctcaactgcagtcgtcctgttgccaggccttcaaccaaacacatcttgcttggcagccgctgtgtactcagtgttctaacctttctctgaaccagtcatcttaagtacagccttgcaaaatggcgttactgctgctaagctggggtctttcattcccccattttttttttttttgctaactttgagtgaaatctttcactcgacttggtcaaaaaa

SEQ ID NO: 2577 - DNA, 581 bp, Rattus norvegicus
  Genbank Accession No. AI232354
gaggatattgtgaaaaatctttattaccgtctctggtggtaaaatagcatctcatacaaatagaatcacctaggtttttgaaatgaggattttaaggacagagatgtttctaaaattctgggaaaaatagatttacagggaaaatagactttcacaactcgagggacatcaccacatgatcctttatgaaacaagggtgagcccaccttttccagactccctggctatgatgctctggacacggaatgtggatgttttcagaatctgagtctatggcccatcccggacacaacaatgtgctgtccccaggaactgggaatcagatgcccagagcctagagaagcttcagaaggttcgtacgagacagtgctgagctgagctgagacaacagctgacaccagcccaggtactggctatctttactcctgtgttcatggtttaggcagcttggccccaaggcataggccaaggatagagaccaagcagaacctgccttgtaccaggggggcttctgcccagctgcggggaggtcccctggggctgctctgggcaaggggcatgcgcccccagcactgactctg

SEQ ID NO: 2578 - DNA, 629 bp, Rattus norvegicus
  Genbank Accession No. AI232379
tttaaaatcatatatcataaatcatttattgaaatataaagatctccatttacacttctttttttttttaaacaaaacatgaacacgggtatctggaagccatcttggattggaagaccctctctatggagttgctctcacacatttaccacaccaccatgttgggaacatgtaagtatttttctctttattccttctaaaatataaattttggacattcaaaagtgcaacagttaacgtgcctgtggggaatatcacagttaaaaaaatataaacaaaggcagtgatacagcttgtcatacacgttttggcagtattctccaagtctacatagcaacagatatatacatatcgatgtataacatcattttatctcacgtccctcttcaaaaatataggaccattttgtacaggttggcagaccacattttaaggacatcactgattatttaaaaaaaaaaagtcacaaattgggttcttcgggccagctttgattgtcatcataaaaataagaatagaaagcagagaaaattggtaaatttccttccagggactctgcaggaggccaaaaggaaaccaggatccagtcaaaacactgtttgaaaataaaaatgtatccctgctgaatg

SEQ ID NO: 2579 - DNA, 467 bp, Rattus norvegicus
  Genbank Accession No. AI232385
gtggtactttttatttggtctttaaactgtgcttcgtattaaatatgacctttcccaagtctcacagtatttctagttatttctgtgtaaacacactgtgacggcgagcttcagtgtcccctctaagtgagtaacttataaactcatgtcaacacccagccacctcatgtgctgcacctcagatcctatagctttctgtccagcaggtccacagccagggtaaagagaggctgggaaagaactgaaacaaaattaaaacatggccttgcctgtgttccgtgatgctatggaaacacatttaaagtttttttcatctcttttaatcaaataagcaaatcaagaaaggtcaaattctagggggttctatgctatcaggaaaaataaaaatgatctgacttctatgactgaagaatgcaggacaccagggggtgcatggaagcaaaacacttgaaccagccaagaagcaa

SEQ ID NO: 2580 - DNA, 506 bp, Rattus norvegicus
  Genbank Accession No. AI232408
cccagtgaagtcatctttattgcatattgctatttaaaaaaatgtacagtctcatagcacacacgacacctttttttcccttggttctgtaacaacagtcttgcatctaaagactaaatgggtccaactactaagctagtaagatacgagacattgattaagtttagaaattataatgcttttctttttttggcattatttaaaaaaatctttaaaatacatactcaagagagaaaagtgactacttacaccagcaccagtctaaaaagtccatttttttttttttttgtaacaatggcacatgaagttacctgcacagtctttaggaaaataaaccggaagctgggaagggcaaaggtggcctaccaggagggctacatggaagtgaggaggattctaagaaaggcaaggggacatgcgacacagacttgctctctggtgtgagtctctttccacagttccaaaactgagctggaccaaacttttcctgctatcaatagaaaaga

SEQ ID NO: 2581 - DNA, 446 bp, Rattus norvegicus
  Genbank Accession No. AI232409
aaggtgggagatgattttatttccacacagctggtaaggggctccagaagcctctgagcccagaggaccagccctcagccctgcttccttaacaccagctcaccaagcttacccaacaccccagtccccttctcaaaatcacagataagactggcatccttcccctacccctagctctgctgtagaattctctgctgcctctcctggtcttcaagccccatgagactcatgcccacccccaccgattttgtgggatgagagcgcttatgatgtggaggcagctgggaagtgtgaacaagattccagagctacagcctggaaggggttgtcctcggtgggccctgtaggaaggagcagatgatgtcagccacgatctggggcttgttcatgtggatgtagtgattgcctgggatttccacaaactggaaccgctcctttagggtgga

SEQ ID NO: 2582 - DNA, 359 bp, Rattus norvegicus
  Genbank Accession No. AI232419
acattgggaaacttttattaacttaaactggcattcttaattttgcccaagttcttaataagtgtctttttttaaatcaatctgcaggtgtttttaccaccacagaatcatgacgacttgcagttatcattgtcctgtaatgattaaaacaatggtcaaataatcagcaaggtacttctctaaaatacttaaaagatattctgaggagtgcagggcagggacataagctcacccagaaacacacaattcactctgcatggccaactagaccccaaaggtggctgagctgagctgagcactgctttgtcccatgctcctgttgtacatccacagcaggaggagatggcaaagcagctgcc

SEQ ID NO: 2583 - DNA, 509 bp, Rattus norvegicus
  Genbank Accession No. AI232498
aaatgtattaaaaagcctttattattttgggaaagtaaggtaaacagttttcctacagttttccacccagcacaaaagcagtcaaacaaaataaactggtaactttagcccttgatggcagaaggtatatagcaagttcaaggccagcatgcaatactcgagactcctctcaaaacaaagcggacaggagcttgtaaaggacccagactggattcccagcattcactttggtcaacttagaggcacctgcactcagacacatacacagagatacaaatcttaaacactgaggacatgaggctatggcagagcacttagcgtgcatacagccctaggtttaatctccattaccataattttaaaaggtggggttccctgtggcagtagtacagcttttgatactttggattgcttatgatttcccaaaaggccttttacttttctctctgtttacttattttggacccgtactatggaagctgataaacataaatttcaaagattcctga

SEQ ID NO: 2584 - DNA, 370 bp, Rattus norvegicus
  Genbank Accession No. AI232506
cacagcttggggatttaatcttcactctcctgcataaagtcagggtggggatgttgcgtccagccctagctgggtatattgactgggatctatgctcctgacagccttttgaggtgacttgcgggtttaagatccatccctcagctccatctttcttctggacttggatacagccgggtgtcacggatgggaaggaactcaatgctggggaggggactggtaaagatagcccatgttccccttccatcccccttgccaacagtcccaattcaaggagctcaccggggtgggcagttcataccattgagctggaggagccttgaagcctctggaacagtgcgctcaggaaggggatgtaaaatgccttgcc

SEQ ID NO: 2585 - DNA, 528 bp, Rattus norvegicus
  Genbank Accession No. AI232510
caagtttaaaacatgtatttaaaatacaatttataaaatgcttaatctgccgactcaggagcccgcggtgggggttagggtgaggagctgcctgctacaccagcagagcaagactgcagggtgcggccctccctcccagtcccttctgtacagatgcccaagggcccgccccctgggtcatatgaccagaagcaggaccccagaggttttcttgagtctctgcttaccagggagactggatcagccctgccggcccatccctgagcacagcacccccagatggggcagagcagggtatggcagggcaggacagggctgggcgggacaggtgggctctggaaggggctgatggcagcagatagggtgttgcctcctgcccgcaggtggggagcaccctgattgaggggactgagaagggctggtcaccagacccggacccccagctcctttggttataggctgacatcagagtagtggctcatggaaaacggttagctggaagggctgaggcctggctcatggggtcca

SEQ ID NO: 2586 - DNA, 396 bp, Rattus norvegicus
  Genbank Accession No. AI232529
aaatttgtatgtttttaatatatagaccataagaagggagcttacagaggggagcaaaaaaagacaatggaatacatacaacatgaaagcagaggggtgactcagggaaggaggtcatcaagaaggaagtggagtgggcatggggagggggtcactaaaggaggaagatgaaggaaacacagtacaatgatgcatgtgtatgaaaacaccatcatgaaaccccttcatttgtatgctaatttatttttaaaaagttattaagaattgaaaattaccaaatgcgtcataaaacaatgtctgagaaaaacaaagggatatgcttacttgatggtgtacaagatctaataggggtgtacagggaggcgaaagggattactaacaatacttgtttgtccc

SEQ ID NO: 2587 - DNA, 535 bp, Rattus norvegicus
  Genbank Accession No. AI232534
gaaatttaacacataaatatattttctaccacatgcttcctcattcctttaaagttcccctcgcctctatcgagcagcttctttgagactgttaggtcctgggttttgaagactgtgctgacaagactgagcccatccttgaggggttgctttcacctccaggatgctctgggcttcttgggctgactcaagacttcataggcagcctggatctctaggaagtgcctctgggcctcctccgtctggtgccggttgtggtctgggtgccagaccttcaccaggtctcggtaactccgatgtatttcttcattggtggctccttctggaatgcccagaacctggtgagccagctgacgtttctcatcctgaaaactgtcaacaaattcatagagcttttcccattcctggaactggctgctattgaagccaggagccccaaccagtagccaccagatccggcaaggcagaagcaagacagactccacgagacgaccgagaagtgggaaaaagttgaaccaactcaagaaagaaccaa

SEQ ID NO: 2588 - DNA, 510 bp, Rattus norvegicus
  Genbank Accession No. AI232552
ccattcgttcattttatttttcagtgcggggaactaaactcagggcttcgtacatgctatagtagtctcattgaccacattcccagtcctgctgttgccgtcgtcgtcgtggttgttggtgagacagggtttctctctgtgtagcactggatgtcccaaaactcactctgcagctcaacgtccagtaggaatacattccctaggtcaaggacacagggacagcaactcctacaggattccagaacaccagtgtaaagagaaaatcctctgagacactgaccctcacctgagcagggtaggcggcctgagccagccctccacccttcagctgggacagggccttgcggatcgtgttcagctcctggattgtggctcctcgggccgccagcagcttggtgagcgtctgtttctcctctagtgtgacaggtgggataggagcgggcagcagggctgagcccccacctgagatgagcacaagcagcaggtcgtcggcagtgagcctctttgcca

SEQ ID NO: 2589 - DNA, 370 bp, Rattus norvegicus
  Genbank Accession No. AI232611
actttactcattgtatctcatatagctgaatctgtggcaagcacatgttgatagtagggtaaccattgattaataaccattaatgccccgaacatgaatttcatgtcatccagcagaaaactgatttcacatagtcactggacattaaaatttgaccttgaatctgccatgtctgttacaggcaaacgcactacaatctgcaggaggctctgttgtgagtactgtccaggtgtttgccaaagaaggatagaatttgcttccatgcatctatctgggcttttgagtgagccctgacctcccctccccagaccacagctttgttcactattttgtgcagggaagctgggcacatggggaagtaaggtggctc

SEQ ID NO: 2590 - DNA, 605 bp, Rattus norvegicus
  Genbank Accession No. AI232643
  misc_feature (1)..(605): n = a or c or g or t
ggctttaaaaatagttttatttttcccttcacagacacacaggcctctgaccataattcatggcaccccaaattaaatatagacttaagagtatatttgtctgacatgattcaagaaagtggattttaaatgtgaatgggtgccaaccatggggactggaggagggtggtaccagcaaagaggggcgtacatcattcttacagcgactcttagacttggaatcaatatgtgctcatcatatacatatttagcccaaatcagtatgctcaggagtagaatttcttctgtctctataataaaaaggccaaagcacttccttaacattcgaaatgtttccctagtagacttggtatagtaagagaatgattgctaaacatcctcaatgtggttttcattatgaaaaaacatgtttcacataaaatcttcataatataatccagaggccaaatttgtgcatgtttaaaatttgagtccaggctagatatttggattttcccccccttccagtgtttttcatttttataaatacatacctagncttctactactttaaacatactcggaactcttttagaaaccatggctgcctttcagtagcatcagtg

SEQ ID NO: 2591 - DNA, 539 bp, Rattus norvegicus
  Genbank Accession No. AI232649
cgacatgagaacacatttaatgcaacatgcagctgtggcctgacctgggatttctccccacaatcccacaatgctatttgcagaaccccttttccatggcctcagtcacttcagggtgtagaaagcggctggccaaacgttcgatgtcatccagtgttaggcggctcaaggacctgtcataatccctctgtagttgttccaggaccctgctggcatctcctatactgaagtgacgagccaggactttggagatcagctgccagataggggtggctgaggagtcgaccagtctgtgggcagacccttcttccagtagcaccttctccaaaggcttaacaactaggttgagcttagaattgggcccaatgttgtaatctgacagtcgcttctcatctgctagggccttgcccttgaacagcagacgttgctggcgcacagggacattcagcttatccgagaccaggtgcttcagtgtagacactagctcgtcctacgccacctgtaggctgcactccctgccctggagcgctttcacggtc

SEQ ID NO: 2592 - DNA, 649 bp, Rattus norvegicus
  Genbank Accession No. AI232703
cagggaacaatcatgtttaatgtttacagaacaaatttgttctttactgttcagttcattatgaactgggatctcatttaaaccctacgagcctattctggcctcaagtagcagcatccctgggttgcagatcacaccctgtgcacaccacaaggtctccctagtctgagcttaagctgtggtagcagccacggcacagaccttagccctctcccgaatagaggacatgactgccaactctctgtactctacagggtctgtgctctgggctccgtcctgggcggcctgtggctgcatctgtagagctttctgaaggcacaggctgtggggcagcagcaagggcttctggagaagcacagtgacatcctcagggcacgtgtacccaccccaccaccaccttcaaccagtgagtccgccagcacagtgacagctgaggtgtggcctcctgagtggttgctgtggtgagcagcgctggcccatcagaatacagcctcctttctgagcagggccaagcgctgggcaggatgtccctagagtttgctgttgctctggaactgggctaccaggctgaggatctgctcggaagctttgatgttcttggagcccaggtaggagatgctgttggggccggtctcctccaggtagtaac

SEQ ID NO: 2593 - DNA, 594 bp, Rattus norvegicus
  Genbank Accession No. AI232706
ggattttaatattttatttaaaatttgctttaaatttctgtaaaacattcttcaatccattattttaacattataaattcaacttgacgtagctgaaaaacagacagcaggtaacaggactgactgaaacttagcatctatcttactgcagggaagacaaagcctcatcacacgacaaacagctaactcagcaggcatgtgcacgcgtcactttcctgtccgtgacaagttttggaaaattacactttcaaagaaccagccttacaagtagatattctttccaaaaaataaaacccagtatccaagtcctgaaaactcacaaaactagatgaaaacatgtggtggtgtcagctgcgggcgacgctcaagccaggctctcaccacgatggatgactgactgactgactgactgactgactgactggggaggtgaactcactcccagcactccctcctgagctggaaattgtcttattgctgagttatacacaagtcattttctttggcaacatcactagctaacaccaagggacaagtgtaaaggtttgggctgtcagctctccaagcactgtggctgcccttctgtgggtccca

SEQ ID NO: 2594 - DNA, 609 bp, Rattus norvegicus
  Genbank Accession No. AI232722
cgcggcgttcggagacacaacacgacagctgagtaacgaaagaggctttgagaatgtagaactgggagtcatggggaaaaagaagaaagtcccaaggagggtcatccacttcgtcagcggagagaccatggaggagtacagcaccgatgaggatgaggtcgacggcctggacaagaaagatgtgctgcccactgtcgacccgacaaaacttccctggggcccctacttctggttttacatgctgcgggccgccacatcaaccctctcagtgtgtgactttcttggagagaagattgcttcagttttgggcatcagcaccccaaaataccagtatgccattgatgagtattaccggatgaagaaggaggaagaggaggaagaagaagaaaacaggatgtcagaggaagcagaaagacaataccaacaaaacaagcagcaggctgattccatggtacagacagatcaaccagagacagtagtgtccagttcatttgtgaacattaattttgagatggaggaagactgcgaagcaattaaggaaaacaaacaacatccagtctctgtcccaccataggacgaaatgactgtacataaagtgttaaaccctat

SEQ ID NO: 2595 - DNA, 551 bp, Rattus norvegicus
  Genbank Accession No. AI232723
ccacgcacacaaagtaaataagttttaattttcaaaaatgttgagtgtaaaagcattccaagaattcacaatcacaaatgaaaatacacaacgtatgcaaaaatgtgtgttaaaacacacaaaaaaaactgtgaaggattgacttcagttgattttgaagctttttgtttatttggggaggttgtttgctggttggctggttggtcatggctgacatgatctcactatgtagcttggctgtatcctggaactcactagcctcagactcatggagatccagctgcctctgcctcctgggtactagcatgactgaccattttagttcattttaaagaaatatctacttgagcttttgctccatttgttaagacatgtcagtctggaagaacatacatgcatctgtttctgtgtatgtgtataaagagaacatgggcttcatagctggaaagccaggaatatatgaagagaaggaaacacagagcccctacagtgtgagctggccgttgtggtctcataaagccaccaaggagaaggggcagacatcagcaatg

SEQ ID NO: 2596 - DNA, 409 bp, Rattus norvegicus
  Genbank Accession No. AI232776
ttaatcggtatacagttttgttttatgcttctcactaatagacattttaaaggtagtttttttccttctaatggtagttttaaacccttacttttttctttccagatcctattagagctggtgaaataggtcattttcttatcaagaaaaacaacttctgaagacagggtttcacacatctcaggattggccatgaactcactatgcagcctaggacggttctggcttttgacctttttacatgctgggattacggcatgcaccaccatgcctagtcctgggggttgttgaggattgaacacagggcttcatgagggttaggcaaacactgtacaagctccaatacagatactatttaccaatacaggtaagtagcaaacctaaccagcaagtttttgagcctcgtgcc

SEQ ID NO: 2597 - DNA, 660 bp, Rattus norvegicus
  Genbank Accession No. AI232810
ctcattaaccttttatttttaacttaggtttacaataaacaaaaaaagctgatcattaaaaaaataccatagctgtcaatttttaaaatggggttcatgttttaaagcattaccactatatcctgtaattacatcctttatatacaagaattgtgtgcaaagtgctttcaaactataagtaattctgatttataagatacaaatggttgtccttaggagttagtgacacttgactacttgcaatgaatcacaactggttacatctttgatttgcattttatttatgtaagaaaaaaagccatcactttatcataccaacttcttttgtaatttaaaaccactccacaggtctaaagttttccataataattcagttacttgcttttttttttaatcataagcaacagctagtagatcattttaggcagataaaccaagttgtgatacacaattttaaaatgaagttacagttttaaaattttttcttgtaaagcaaattaagttctcatactttttttttttaagaaaaattctatattctggagatggattctttccctcttactgaaaataattcaatacccaatgctaatacccccagcatcatttagcatcgttaaaaacaagaacaaattaaaatgttttactatccaagctggg

SEQ ID NO: 2598 - DNA, 484 bp, Rattus norvegicus
  Genbank Accession No. AI232841
cttggaccgaatagatttagagatttattgatcagattgttttagaaaaccaatagcgaacactgacaaggtaaataagtacagatggaacatttcagggtagatttacttgctcataggaaaccaggggaggtggaaaagctgtcctgatcacatggcatgcacaccagactgcaaaaggacatccacactgtgtaacaggactgtggcaagtagctttaaagtaaggcgagcactgtgtatggcctcgaatacctgcaggaagagcggagcctttaaaaaacttcccaaatgttttaaaaaaggttagcaacatggaaagaacaccaagaagatggtgctaccatcgaagcacaactcggaacgtctgtttttgacaccagacaaggggagagatttttttcttccaaatctcacaaactcagacaggtgataacatatggaggtcccagaaccccaccgtgcctgcttctggccctgccaa

SEQ ID NO: 2599 - DNA, 530 bp, Rattus norvegicus
  Genbank Accession No. AI232957
gagacaacttttcaaataagtttatttgaagcaaaataaactactgccaagaaactttatgaaagttccatctcaaaagggtcaaaaaggggaattaactgctatgaattctttgcattcagggcgtcaaagacgcagcctgtgcagcgtgatgacgaattcttggatgagaaagcatgtagacagaagtattcctatggcagaatatttacagcactactttcaatgaagtgcttcttccataaacatttgaaatgagatgaacaccaaatcttccacttctttctaactgtctattgctattatgcttaggttcagcattggatatatgcacgctgattcctttaatgatcaagtcctctccacaaagagactgggcaaccttatcatctgcaaaggtaacaaaggcaaaagctctgaatggtttgggaatgaagacatctaccacttctccatactgacagaagaactgctgaagctcttcagcagtcatgtcctctgtacaacgtccaacaaacacctttctgctt

SEQ ID NO: 2600 - DNA, 521 bp, Rattus norvegicus
  Genbank Accession No. AI232970
ctggaaaaaacacactttattgggtagacaagtggcctgacagaaggcctcagattcacagttgactgagcaaacataggttaaggtgttggaatctgtctgcatcccgccccagcctcctgggaaacagctctgaattgagtcatgcgtgggagggttccgacccagttgggatcgatgacagggctcccccacttcacctttcccaatggctctgaccttcattgataagactgaattcttaaaggctaggagcggagaggggcctggcactccgatgtgttagtttaatagcaagctggccagagacaccgtgtgccagttgctgccacacgcgaaatggagacccctggtggagggagaaacctctcagctcccggagactatttatagctagggctccaggctgctgatctgtgacattctcctgctgccaccaaaccttggaaaggggccagtacaaggcatactcccatccccctgctgctttccctcaccccagggcaggctcttttcaatgg

SEQ ID NO: 2601 - DNA, 489 bp, Rattus norvegicus
  Genbank Accession No. AI232979
acagttttgctttcttttaatgtaaacagaatacacaaacacattaaaaaccccaccatgacatgagaccacacagagttttgtatatttacaggccatgacaatcaagaagaaaccagcacctctggcttcaggaagcctcactccacttttgaccacatccaaaaccagggtgcagaggctgtggtatctatcacttctggacaaaactcagcaggataccggaatgacacgagatacccccagagcacaaccaaggcgctgactctgttcctggccctcatgccacccctccttcttgaccaactgacgtgccaaagcagctcaggagtcagcatggcctcaagacacagctgccgatgagaagggacacaaggcccttctcagcttttcccagcctggggctacttgtgaaatgagtttcacgcagtcaatccaagggaggagggtagaaactggggaagtggaggaagagtagatcccagcttg

SEQ ID NO: 2602 - DNA, 410 bp, Rattus norvegicus
  Genbank Accession No. AI232984
cttagaaaggacatttaattggggggagggtatacagattcagaggttcagtctattatcaaggtggaaggaatctcagtgtccaagcagacatggtgctggagagagttctacatcttgatcagaaggcagccagaagactcttctgccctgggtagagtttaagcatggggtctcaaagccaaccaccaccaccccctcccccacagggacacacatcctcaaaggccacatttactccaaaagggccatacctcataacaatgccacttgccatgggccaagtatattttaaccaccatacctttgaatatcacagtaaaggctttactgcattggttacattcatagggttactctttagtatgtatgtgttcttttatgtagttggagttggcttgattgtgaaa

SEQ ID NO: 2603 - DNA, 469 bp, Rattus norvegicus
  Genbank Accession No. AI232993
gtgaaatcacgaaaatacatttcttaaaaaagctttcaggtattacacacaaaagcaaacaagtttaccttaaaaatatcaattatcacaacaatagcctacttctaattataattacttcttcaagcaacatttgtctttgtttccaaatacagcagcaggtgacaaaacctagatcttccattgcttatggtataaacatatgtctcagaccacacttcaggcagcttaacttaaaatgcatagactgtaaaatatatcaaatttgacattattcagtaaatgaaaaaaatcataatttcaaaaaaaagtattacaaaactttttatagagcacatataaaaagtagtgtctacttcatgacgtcagtgtctgtcaaccagtggcagctgggccttttactttgtacacttgaatagttgtactgatgaacactataatcttgaaacaatgtttgtttttattggta

SEQ ID NO: 2604 - DNA, 484 bp, Rattus norvegicus
  Genbank Accession No. AI233031
  misc_feature (1)..(484): n = a or c or g or t
taaaaatcactacaaaaaccttacaaaagagtcttgggagctaaaggggcccttccctgcctcagcccctgagcttcctggcagaggaggacgagaggaagatggaggaaggctcctggcagtgctggcatctccaaaaaccagaggggtggcttgggtggcaggacacaggttggggacctgaatgtcttcagcaaggcacatcagagtcagggtaggtccgcctccacccatggagtagaacaccaaggccggtctaagctcaggagaccaacacttgtctttttcccacccgggcatctggggatatgtctaaagagggcctctctagcctctgcttacaaatgtggagggactctaagttagggactagcccaacctacctcttgccaaaactatccacgagtgccagcccacaaaaggtcacctcctgggccccttgggaagcaatgaagactccctgggcctgcctnctcccaggccc

SEQ ID NO: 2605 - DNA, 445 bp, Rattus norvegicus
  Genbank Accession No. AI233054
agtagtttattgtcttcaagactacagtgtggattcctctcccggagcagggtctttcaaaggcaggggactgtcatccaggtgcaggctgctcacttgtcattctcgtacttagctggattcttccgtttggactgcgcaaactcctggttgccccatgtgtagatcagatagaacagtacaaatggcggcgccacgcgcaggatgcgctcgcgagtgcggcgcagcacgttggggatgcctttgctgaaatagtgcgggaaggcgcgctgctcaaagggcgacaagctgtaggagatcacatgccgtatccgcgtcaggttcccaaactcgcggcccatggtggcggcggccctgaggacagaagataggtgcgtggctcagtctcgcaaaaaactcccactgcccacgaccacgaccctctatacccagtcaccctcgtgcc

SEQ ID NO: 2606 - DNA, 491 bp, Rattus norvegicus
  Genbank Accession No. AI233056
aagtatttattgggtctgtatgcacacacatgagggaagtcagagagaacagcttatagcatttggttctctcctcccaccatatggatccctgggaatcaaactcaattcaagtttcacagactttttaccctttgggccatcttgtcatctccaaccgtaggctttgcatctgcaaaagcctccgtcccacaagacaggagacatgaaagtgctgggagggaagttaaagtgcatacaaaagactcaggccctgcgaattccttggaaacatagccagagagaggcaaggagcaccaagggaacggccgttgctggctctgacaatgtaactgatcccttcccttgtcagaacttccacaagggttgcaaggagtgaaaactgctggttcgtgaaccagtcatctggccttccttgacagcacctgctgcagttcttccccgcaactgagcacaggaggccgggctaccacaggaggccctacactttt

SEQ ID NO: 2607 - DNA, 388 bp, Rattus norvegicus
  Genbank Accession No. AI233081
gaacagacaatggtttaattttatttgcataaagtggtcatgaaaggttaacccattcaaagacatttttgatattccaacatcctctgccatgagtctattacaaatagatccctgcctgccacagagcagaagttagactgtcagcccagcatggtaagtaattttaatatctttccaaaggcagcttatgaacaattccacacagctagttaccagttaatggtgcatagaaatacatctgtggtggtcatggacaaccagatctagatatagtaaggatgagagtggcatttttttttccctatcaaggtattttaagccttttaggggaatttctatagtgtagaatttaactttcatattaaggggtatcttaaatatatcc

SEQ ID NO: 2608 - DNA, 513 bp, Rattus norvegicus
  Genbank Accession No. AI233121
gaatttaaagatgtttattgaggcttgagagaaggctcaatgggtaaatgtcgtctttccaaactctttgatccccagagatcaaaggtgagaactgactcccaaaagctgtccacaagcctaaaagcctctgtgacttgggggcacagctcttttcttcatctaatggggggggcttgggccttttgccattacataactgatggccacaaatctatgagggtacggctagtgatgggcctagtgcccaggcacaggcaaagctcctaccatcccttcagtgtctctgggctttttgcttagctcacccggggactaggctacctttcccggtcccacagagccccctgtccctgggtcctcatcctgagagcctctcctcttcaggaactgacggagccaggcctttcttctggcctggattctgtagcaggtaagtccaagaaacactagcaccaggcccagaaaaccatgaggacacacagggtggttgcttgaagttcccatctgccc

SEQ ID NO: 2609 - DNA, 549 bp, Rattus norvegicus
  Genbank Accession No. AI233147
  misc_feature (1)..(549): n = a or c or g or t
ggcagtttccaagtaattttattcagaattttgtgtttgtttcctgaatcaataaatactatacaaaacaatgtaaaaatggctaccattttctctcccctgctcccctcacctggggacaagtccctggacaacctcattcagggggttctccctgtagatttggtccagcaaatgaggccagccatgttttagccccttgactcacttttggagatttggctggggtaggaaagcctttaggaatgaggtgattaggttagggaaatgcattattgtttgggggggaaggagacagcgccctgggcanaaccctaccccaaagaaaagggtgtctaaaatgttcacggttccttctttttgcctcaaaaagtgacatttattcaaagagagagagagagaaaaaaaaaacaaaacaaaaaaacaaaaacaagatgtccatcccttggctcccttccctcccccctccagctgttcctgagccctgcccccaggactgaaccctgggctagggccaggtagcaggacagcccctcaaatgaggtcaac

SEQ ID NO: 2610 - DNA, 566 bp, Rattus norvegicus
  Genbank Accession No. AI233164
ctgtctctctgcatcttcttctacagctattaggtgctgtccacttttctgcacagaccctgaaccatgcatcaacttacaataactctctcagcgacttagcttaacccttcaagtttctgtaactttctcttcatatcttttccttatcttagccagattggtggggcattttccagcccctaggagaccgacccttggagcctgggggcagacctggcactccctaccttcaggcgtctgaagagagcaggcagaagtgagggccttctatccgtgtctggaacatttttttctggtctccagtaggattccgtctttcatcggtggtaaagaagacctgtaacagttactaacaagcatatcaaatgggatggtgagaaaacaagagaatcttgagaatagagtctaccgaagagggcaaacagcatttagtcacacagctaaaccaggaggcctttcttggaacaaaaaggccattgtcagtgtcagctccatggctttgcctctcaagagaaccagcctccaaatgacactaggctttctagtaacaactaataacaaaa

SEQ ID NO: 2611 - DNA, 525 bp, Rattus norvegicus
  Genbank Accession No. AI233172
gagagagatacttcattaaccctttattacaagtcacgctcttatagaagtatatgcgaacttacgtgaaaaaatcaaatgtatccaagaataaaaaacacagcacataaagtagtgtatgcattccagtgttccgcgccgcacacagcgggcacccaagaaaaagctcttctaatggcctggctcatgaccactggccggggcaaacggttcggttcagttctttttgggcggcagcaggccggccctcaggcacagtgtgggggccgcctgcctctcccgcggcccggcgggcaggagcagcaccagcttctggggcctccgggccagcggtgaaccccaggccagcccgagccgcctgccaggcagaaccctccaggtggggtggatatgcctggtcctctggggcagcagcagcagtagcagcgacaccctcagaaccgtgggctccagagccggccacagagcacccttggaagccttctacttagtcggcctttttcagaaagatctcactcaaaatga

SEQ ID NO: 2612 - DNA, 539 bp, Rattus norvegicus
  Genbank Accession No. AI233182
cttagaaagttactttattagaattttaaacagtttaggcaatgaaaccgttctaacagcaaatgcacttcctgcttacaatgaaatctatttcaattctgataatgacatgacaggtccatccaagtttcttccaacagaaaagcccacagctcaaaagttacggggggaaacatgactaagccaaaggacttcacatgtttaccacagaagtgatacacattaaaataccacataatactttctaagagaatcaagccacttgtgaaaccattagcaagcatggagactgaaacaactgcttaggcacaggactaactcaggcaccataaaaccctctgtcttctcacttaacaaataagattccctagagacaattatttgggtgcctgcttgtaaaaataaggtacttaatgacggaacggtttcttgatcatgatcatacttgggtaatctcaaggaatgaagatgaggattattagacatgattacattaacatgaaattctttatctatacactctgatttccatgtcctga

SEQ ID NO: 2613 - DNA, 701 bp, Rattus norvegicus
  Genbank Accession No. AI233194
gcctgacactgaactttaatatatttttggtttaaaagtttaaattgattaatatacaaaaggctcttgtgccagtgaaaatgactgctaaatattccagagcttgttagtaaaacaagaggatcaccatatacatacacatatgtatatatgtatcaaaatagtatcagtacagttccattctccagaccgtgaagcactagggcagttttgattacaaacacaataacaaaagccttccactttcccaagacctcttaacactgtttaccacttaactgaaacgcagtactaaaataaatattttctattgtagaaccactctccaaatttttgtaggactaccttaaaacagcaggctaatgacttttttcttgttcaaatggtatctgcttgtaaaacagtaaaaacattcaaaaccagtttacccaacaaatacctcacattaggtttccttttccctcaaaattctcaaaatgacagatgctgacaagacacacacatataaacaacctcccgagactctccaaagtaaacttgatggaaacccttcctgctcaagggttatacatcttaggataaagctacccagcattttgttttgggtgtgaaaatgccataaaatgtccaaggattgtttttgtgttcaagcctatacatctacaatgtagataccccccagaaaagaattactcctacaa

SEQ ID NO: 2614 - DNA, 537 bp, Rattus norvegicus
  Genbank Accession No. AI233220
ggtatataaactatttattaacagcaaaggcccaaagactcatttcttcttggacacacccacagtacggcccctgcggccagtggtcttggtgtgctgaccccggacacgaaggccccaaaagtggcgcagccctctatgggctcggattttcttcagccgctccaggtcctcacgcagcttgttgtctagaccgttggccagaacctggctatacttcccatccttcacgtccttctgtctgttcaagaaccagtcagggatcttgtattgtcgtgggttctgcatgatggtgatcacacgctccacctcgtcctccgtgagctccccagccctcttggtgaggtcaatgtctgctttcctcaacaccacatgagcgtatctccgccccacacccttaatggcagtgatagcgaaggctattttccgccgcccatcgatgttggtgttgagtactcgcaggatgtgctgaaacttctcggggatcactagggacatggcggcggcacaagcggcggcgtgtaggcccctcgtgcc

SEQ ID NO: 2615 - DNA, 563 bp, Rattus norvegicus
  Genbank Accession No. AI233224
tttttttcatttttagaaaagcttttatttcaaattccattttgcatattgattttttttttttggaagaagacaagtgcattttccttgagcaaaagaattgagttatgatttagggacaggatcttcattcagcactcttaagcaaagtcaaggttagggatgtgatcttgcaggtgaataaatgcttgcttctcccagaaaccgcagcagcggtggttttgttaggatcaaacttgagcttcaggatcttgctgttggggtgccatgggcaggctaacattacaggaagcttacaaggtcagggcccagtgtcccagctgactctattttgggccagagggtgcaagggccttgtcacagcctgccatgcatgcttcaatttcttccacagtccggggtacacatgtcagcagctccatgccactgtcggtcacgacaacgtcttcctcaatacggaccccaccaaagttgcgaaaacgctgtaggacctcttggttaaagaagcaggcttgggccgggtctgccagggcctggtccaggaggtggtcaatcctcgtgcc

SEQ ID NO: 2616 - DNA, 633 bp, Rattus norvegicus
  Genbank Accession No. AI233246
cctgttgtaataagaattttatttgttttgtttaaagctctgcatgctttttctgtaaataaacaataaacttttgtagatagtcttatgtgttatctttgatttctctgtaaaatcagctggctgtaataaagtgttagtgtgttaggttcaaaggaatatgtcatgcaggagtggggttacagctgtcagctgtctgatagcgcgtcagctacagaggctaatgtattcgcaggtttatagctgagcaccttcaccttttttcactggcatttcgtgtatggcatcaaccactgtaattttggccgacgctgaagcctgtccttgggaattggacgcgtggcactcgtattctccagtgtcttccttacttagaggagataccagcacccagccagttacttcatgcttttctggaccaccccgggtctgaatggccaggttttcccggtcaccaggcaagagttctgtcctttgaactccagagtgatccctttttaccttgttccagatgaggacggtggttgggattccgatgacttcgcagctcaagtacaccttggcgccagtgatgttccagatgtccttggggggcgtcactatggaaggaccttgctcgcaggtgcctttgct

SEQ ID NO: 2617 - DNA, 596 bp, Rattus norvegicus
  Genbank Accession No. AI233262
agtgtccaagcagaagacaagctgcctttattatagttgatgtcacagctctgcttgtaatagattcagccccagaaacaccccggttaaaacagcacggttgacttcaatggatagagtctttggtaaggtgaaccagaccagggctgaccgacaatcttcgggcccctggcccaggggtagcctgtagtcttacgtgaggcccagcatggcctgaagttcccgagctttatcatctggcagagagcccagggctgtgtggaagctgtcgctgtgctgcttggccaggaacgtcagtagtagtagcagtgcggccttggtgtctggggggatcctgttgtctggcaggatcaggctgcagatgcgcaggagctctgaagccacacccacaacctggtcagggttgttctggtgcaggaagctgaagaggtgacctatagtgacccattcctccatgtcttccttcaggggcagggcatgtagcagggtagctagcacctggggctctgtttttcctgccggactggccatcagcagacgggcaagagccccacagatgttatcacggactcgatcaggccggtccccctcgtgcc

SEQ ID NO: 2618 - DNA, 567 bp, Rattus norvegicus
  Genbank Accession No. AI233266
gctaaggacctttattgagcacacggcccctgatggtgctgacggagaaaccttaggctttccttcccagcagcctccgccacagttcttggctgagtagtgcctgctccctccgggcgccctgcagcacactcctgttctcctgggctcttcggatcaggtagggtatcacctcttccaggcagccataggggatagacttatataccatgtatccagcttgccctaatgccagggagacgtggtcacacatgcccagaagttgtccgaagcagacaggcccatccagaggaatgcccagctcccacatgcgcctcgttgcctggcgaatggattcttcattgtgggaagccaccatgaggtggcaccggggaccgtggttggacacgcggcgcagcatcagctccagacagcggctgtaactccgactagtggcctcatagtcaggctgggtacagtcttccttcccgtggagctgtgtcacggatctctccttgtccagataggcacctctcaccaacttcaccccaaatgccaggccagcctcgtgtgccgccttagcatccc

SEQ ID NO: 2619 - DNA, 474 bp, Rattus norvegicus
  Genbank Accession No. AI233300
tccttggtattttttttttcaagcaagaccatgttttcctaaggggctacaatttcagtgagtctcttcttccggccccaacaaacacccctggctgctaacgttacagacttgttccagcttattggtgctgatgtccaatagccttgggggacctgccttcggctctccacaaggctattttgtttcacaaagtaactcttcaacttacgctttactataaagaaaatgtatccgattctaggctaagtttccaagcgatcctggctcctaggagccaccaacaggagtacccgggaaggccacgcagcagaacttcctcaggcattttcacagccatttagaaagatgtcttcagcgaactcgtccaaattagctacaaacgcttggcaggatggacacgttgtgtctgtgggccaatattcaatccaggtggaggaatctagagggtatatatacttgaaactgaaattg

SEQ ID NO: 2620 - DNA, 514 bp, Rattus norvegicus
  Genbank Accession No. AI233316
gacatcacaacctgaagatatgtttattacaacccccatcccagcgcatgaggtcaacctgcagacactgaacatggaagtcaagggagtgggcacaagagttcctccttccaattcaccttcagaaatcttgcaggttaatagcatcttgctgagtcagagtaagatttgaacccaagaaaagctgcccctggagcagaaagaacccgtttccaaggatccagtagcagatcactgtgaattatggtcatttcttcttctgcacgtggccgcagtcatacttgccccctcacaactttgagtttaaccccaggcaggtcctgggtgcgaccaccctccacgaggaccacgtggtgctcctgcagggtgtggccctcgccggggatgaagcagacagcctctttgccggtgctgaggcgtactcggcagcacttccggttggcggagttgggcttcttcggcttcctgataaatgtgcgcaacaccacacccttcagctggggccggccctccg

SEQ ID NO: 2621 - DNA, 124 bp, Rattus norvegicus
  Genbank Accession No. AI233367
acaggaaggggaaaatctttattgcaaaggggaccttatcaaaggaaaaagacccatttctccatggccttcatttcaacttctgcttctctttctttcagggaatctccaggatgtcactcaa

SEQ ID NO: 2622 - DNA, 424 bp, Rattus norvegicus
  Genbank Accession No. AI233407
gagttctgaagatgctttatttagaaaaataccaatactgacttaaagatttttaattttttaaaatagcgccctaatcagacagctaattctgtatactaaaagtatttacacatggaatacgaaataaatacacagtaactaaaagagatagttatccatggattcatttggcaccccctctgctcatcttctgctgcagtttccgatgccttttgtaaatccttctctttctcgctttcagatccacttttggctctggtttcacccattgtacttctattggtttctcctctgctggtgtaacaaacacatctgcagtgggatcgtgtggaagaatagtctttggttctttcttccttaatttctgaacatctttgacttgctgtttctctctgtacttggcagctgtgatggaccttac

SEQ ID NO: 2623 - DNA, 569 bp, Rattus norvegicus
  Genbank Accession No. AI233460
ataaagaaatgtcttgattttatttccctttatgaaataaaggtgctgtgaaaatatgaaaggtgaatggtagttagttttctaacattaaatcaccttgctctttttaaaatgatcatattctatgaacagatgcctgatggcatagcagaatacagtaagtattattaagttctacatcaaggaaaatcattctataaaggctaattatttacttcagacatttatacatagtgactgttaccaggagaataaaccttaaggtaaacaggcttcttgacagttactaatacaaaaaggactgaaggcctcagttcctgcaaaaagcacaatgttgaatttgtggtatactgaacaaagcaaaatgagaagtctctagggagaagtaaaactttctttaaacaaatctagctttcatttttagctgagatagtggagatggaacccggggcattgtgaacgacaactgtctaccatatccctagccctgcacagagtgttttggaatgtcaaactgggtgatatttatgtcattccaagtgaacataagtatctcagcttttctcttt

SEQ ID NO: 2624 - DNA, 401 bp, Rattus norvegicus
  Genbank Accession No. AI233480
  misc_feature (1)..(401): n = a or c or g or t
cagtaaaaacagggttttattcttgaaaacaaaaataaaatttgagttgaaagtacaatatatccacaattctacatatctgaccggaacacagaacacaatgactgcatttttatgttagagacacagtttgggaaatccaacccaacctgtttaactgggaatgggggaactttgcttgaagtccaccagatccaggaggaaaaagctgttcctttcctctccagtgtgaaccttgggttcatgtttgatattacgtgaagcataagcatgtatgaggtacaggtcataaaacgctggggacctttgggagcaggaccttatggggaggggaagggacagagtatcagaacagtcactcatacatgaagcaaaatccaactganggttaatgggggaga

SEQ ID NO: 2625 - DNA, 460 bp, Rattus norvegicus
  Genbank Accession No. AI233493
aacatgacaatcttagcagtttatttacatatgcaaatagcttcacataccttctgaagaatttgaatattttcaacctttaaaagtcacaaaagcatttcagcaattagggggtggtgttggatcagagacttcatgaacgcctgctgggatgacatcatgagcctcatcaagagcctctggaaggcttggggtacctgtgcgagggtgtggagagaccacctttgtgtcaacagcaaactctccatttggctggttccccagaaactttggacagctttgggtggaagcaatccatctctcatcgtaacatcttggaaaacgccggaaagatgagaccaccacagctttcttatgtacataggatgtttggttatttgaaaaaccatcaagattggatgggatgtagtcacaggcccagagattgaaatttctagaaatgtgttgcttttgatctggg

SEQ ID NO: 2626 - DNA, 411 bp, Rattus norvegicus
  Genbank Accession No. AI233494
tattggttattttatttacttacatttcaaatgttatccccctcccagtttgccctctgaaaatcccctaacccatcttatcgccctccccctggttttatgaggctgctccccatctatccatccacttcagcctcgctgccctagcattcccctatgctggggaatcaagctttcccaggaccaagggcccctctcccattgatgccagacactgccctcctctgcagcatatgcagctggagccatggatccctccatgtgtgctctttggttggtggtttagtccctgggagctctgggagtctggttggttgatgttgttgttcttcctatggggttgcaaaccctttcagctccttcagtccttcccctaactcctccattggggtccccatgctcgatccaatg

SEQ ID NO: 2627 - DNA, 501 bp, Rattus norvegicus
  Genbank Accession No. AI233570
aaaaattatttaatccatggccaacattttttaaaaactgagacacatggtgcttcactggaaaacaatccccttgcccagtaccaaaaggcacccacagctggctagaagagcacctagtcagggcctgtgctctcctgcgggccactgggcagctatgctgaaaacccagagcagtgacaactgggaggaaacactcacccagaaggcccataggcccccaaactcccaaattcttatctccaccatcccactggggagactagggcccataggaggttaatctgcctttattgagggccagcccgtgctaagactgctggaccagccatgcccaccaccttggccgaggctcagacaatcatctccagctgccgggcatactcgatgacctgcctggccagctcagtggaggggatggtgctgtcttctggcttctgctgctggctggcaaacctgtattagttgttagggcccatcagccaaccttgttttttggca

SEQ ID NO: 2628 - DNA, 345 bp, Rattus norvegicus
  Genbank Accession No. AI233583
tttttagtggggggtttttttttcgtctttgataatatgatttattgtccattgacagagcaaacgcataaaaataaaaagaaaggctgacacagagcaatcaggcgcactcggcttgttgactttcaacaactctcatgtacgaatcgccggcggcgtggggcgtgggatgagggggttggggtgcattacaccagctacggctgtacacaggagcatccgtcacatgttcaccttcagcactttcccagtctgccgatctttctccacacagtatcagctgtcatagaactctgtgaaagtggttgctagctcataaatggaatcacacagagtgtggagaaa

SEQ ID NO: 2629 - DNA, 464 bp, Rattus norvegicus
  Genbank Accession No. AI233602
atgtggcagtttttcatgtgtgtatcaaattacagagtaccatgaggaggcagaggttacaatctgagcacagcgcaaagctgggattagtcagctgtccccccaagtccaccgggtgtccgcagcacatggaagagcttatgcggggcaatgtggtgtgcgtcaacgtttctgtaccttatttgacaattatcaggaatatatatgacatgtgtgcacacacgcttccaaattaaacacatttatataaaaagctcaagaatgacgttagcattaatctctttaaaaagtctatcatattaaattgcacccgcattataagcagaaatataaaaaaaaatcaacttactaaatactgatgaatttataaacaattgaaaaggaacttaaaagtttttactgaaatgttggattcctgtgtgacatttaagaggctctaacagactatggaaataaacattttt

SEQ ID NO: 2630 - DNA, 442 bp, Rattus norvegicus
  Genbank Accession No. AI233639
atactgtaaaatatttatttaataaaaatagttttatagtctatacagattgaataaaaagtgcaacagattatttccacttctgcataaaagtgcaaacagtacagcacattgggttttgcattccacaaacatggccacatagtagtacatgaacatagtcttgatttagacaggtaagaaggatcagattaagtgccacaaatagttaactaaattccaaggaaatattgctttggtaatgtgaacaatttgattgtatcataatacatattattttaaaaaacaaaataaaatttctcaatcacgtttcttcttgtttctgggcaaccaacatcctacagagcaacaagaaacggtgggaggagggagaccaaaatgtaagctcggacgttaaatgtaaggctactctgaccttagttctccgtctccttagtgttct

SEQ ID NO: 2631 - DNA, 351 bp, Rattus norvegicus
  Genbank Accession No. AI233688
acatacacagcatttttattaaatatacttcatgagaaaagaacaccttaaagtgctaaattccatgtaaatcagatgattttagtaagtatgacagtggaaaaaaatcaagagaggcgcaatttaaatcatctcaggaaaagagcagaagcatacttatatcttcacataagaaaacaatcatcaaaatataaaaggcaaagaaatttcatgtagaagaatatatttcagaatcccacctgttagttcatttaaaaaagtctagcctaagcacacagacactcttgctcccgatgtatgttggtcagtggacaaggaggaggtaggtgctcattcacacagagaagtgac

SEQ ID NO: 2632 - DNA, 603 bp, Rattus norvegicus
  Genbank Accession No. AI233714
actggaaacaactgttttataaatatgtggctgtatttttcttcacatccagcaaatgtattgaataggattcagatatattcttcccagactcacagagttccaagattttctaacacaaatttacatcagtaccaaaatgggcaagaaaatgaaggcacaggctcactctgtatcaataaaggaagtcaaacacagttgtgaggcactaatgacataagcatagaaggtcaatcaaaaataagcaagtagtcagagtcttcagggactttcctccctcttacatttggcaaaattcagtcttgatatttttaatacctcagagagaaaaaaataaataaataggagatggtgcattaaaaggtcaagttacctgtaattagtctttagaaataaaagagatgaaactgaaacacagacttctacagtcttagattacccttcctttgtaaggatcttgtgtgtctgtgtagaaatgccagctataactgaagatctaagatatttgctgacatggtccctcagtccttctaaaagattgtttcacaaaaacaactatcttggtttccactgtaagtcaaatttgattatgtaaaagtgatc

SEQ ID NO: 2633 - DNA, 556 bp, Rattus norvegicus
  Genbank Accession No. AI233717
ttttttttgtatttcaatatattttattaatatattttatatattaaatatatatatttccagctataggagaaatgactgagcacttaagagcatgaactgtttttccagaggactgactggagtttggtttctgacacccaaatcaggtggccgacaacctcttgtaactctagctccaaggaccccacccccacccccatttgtggttgccatggtcatctgtatatgtggcccatacacaaatacctaagtaaaactaaaatttaaaaagattatttctctgtgggtgcatgtgcatttgcacacatgcacatgcaaatatgtgtggctgccaggggaaaccagaagttcacaagtgctctcaactgctaaaccatctctctgtccccacttaggagactttacacgtctggtatttctgggatagtttcagaactaaaacattctcttcagattttaagcacagggttgggagtgtggaccagcagttgaatattcagtttgtatgaagtctggatttgatttccaggaccacaaaacagaccctcgtgcc

SEQ ID NO: 2634 - DNA, 687 bp, Rattus norvegicus
  Genbank Accession No. AI233729
gccaaacaagttttaatttattttcaaaggaaaagtaaccaagaaatcttattaaaactatttattcctgtatacaaataatacaatccgatgattctaaatgacttagtttttagagactacccaagattttgaggcaaaatcagataaggaaaaagaaaatatggttaagagaatccagaatcattttggcttcattttagttttaaacaaggtcaagagtgtacccatggaaactttgagaaaaccagtctttgaccttgcagcaaagactccagtagccagaggactcagaaaagctcgagtgctcttaggctcctgctgctttcgctatgttccaagcaccaggtccacacagcatttaagtaggaacgacactgctgatggtaagactgtgtccgaaactccatgacagctctgggaaggcagacgtcctgcggagtggagcatggatggaatcatgtaccttgagaaattctggtctgtcttagacggaatcagtcagctccttctacggctgttgtggcaacaggtttcacgtagtatggcccttcacttaggtacgttctgagcctcaaataatttgagttcccaaagatctctgcaactgtcttggaattggcgagcgcttttaccagttcgtatttcgcatcctttgaagttttgtcatgttccacagaccggtcc

SEQ ID NO: 2635 - DNA, 609 bp, Rattus norvegicus
  Genbank Accession No. AI233731
aaggactaagtaactgattttttattttaatacacagtatgagaaatgaacctgtaaatcaactgaactgtatggaaaatgaaatagcaaataaattagacccatgtttaacacagaaggtcagctaaatgttcaaacttaaggctgtcatggacacagcaattccatagtcttctttaaagggtgaagtctttcaaatacagctttgctatgaactggtccagagttcaacagcaaatgggaatgcttaacaggggtggtgatcagggacacgtttccttggtgccgctttgatgatgttgtccactcgtagaatcacctctgctgcttccgccgcactcaaaagaacctgccgcttcacttgaaagctctcggttatacccagtactgccatatcaccaatgctgccttccttcatatccagtccagcagttatacggccttcactgtgagcagctcggagctgtgccaccagatctgcactgtcatagcctgcattgtcagctatgatcgttggcaacattctcagggccttagcaaatgactccattgctacggcttcttttcctggggttctactggcaagcattgtcacagcatgagccatca

SEQ ID NO: 2636 - DNA, 547 bp, Rattus norvegicus
  Genbank Accession No. AI233740
aatgtaatgactctttattattttatctgcataccctcaaatgttaccagagctccgggtttttgacaaacatttgctcagatcaaattagtgtaggagatgtccattcacttctccaagtcacatctgctcgcaacggtctgttcctgattcagcatggggatttaaccacagccttgcccacaccatgatgccaggcaggctgggattgagaggactgcaggagtgaggtatgcatctgcaaaagagaagtctcgccggctggttcagctttcagtactctgcgtcatagggaaactcttccatgttgactgtctcaggcagcaggcaggccctccagtttctgttgaagctcaggatagtggccatctcctggtcgctcaactggaagtcaaagacctgaatgttctcctgtatacgtgctggcgtcacagacttggggatcactaccacgttcctctggatgtggaaccgaataagaacctgggctgtggttttcttgtgcttggcggcaatctctttaatcttggggtcctgtaatagtgaa

SEQ ID NO: 2637 - DNA, 578 bp, Rattus norvegicus
  Genbank Accession No. AI233753
caagttatagaaacaattttaatgcaaatactcaatagggcatcttttgcattgctcccaaaatttcatctctttctgctgctgtaggcatagatggctgaactccattttgtcttctttggatcatgacagaattccagaatcgccggcagtttttgtacttcaagaagtaactggaacacctttccctgtcatagttattttcatccatacatctggtagaagcatcagattccgataagcaaggatttatgtcagggtctctcagccgccgtgtgaccatgggcatcttgtcttacttcttacaaaggagttcctgatttcccactctcctcgtagctttgatccgtagtgggggaagggcacgttactgaacaagtctaggcccccaggcttctcagtctggtctgtgagtgttaaatccggaagcagaaattcaccacgccgtaaacctgcatggggtcaccttccgctgccccgaccggacgaatcgagtggcgtgagcagcggcaggagcatgccgcggagggtttggcgccacgaactggtggggtctgccctcagcggaatgttgtcgt

SEQ ID NO: 2638 - DNA, 581 bp, Rattus norvegicus
  Genbank Accession No. AI233754
ctcggttcaatctttctttctttattaaatatcaactcttcctgcctaataaactgaggttcactttccctttcctcaggctgcagtaggtcacccaggaactccctgtgcgtctggcctgactggctgggtgctacctacagatcaccgctacctgggtcttccttttgcctcttccacagactttgtctcgacaaagctgaggaccttgtgcgcagactggaaggggaggaggaaaaacagtctctgcgagaaggatggcaatgcctctgggctctttggcatcttcacatgttcctaggaagagctcggctctggagccctgggaggcagagggaacgaggcaggcagtgtggcctgagcttcagaccacactgtcctaaatggatccacaggtgaaagcagggctcccaagacccagagtgatagggaggccactggccggcaggctttagcagggaccggcagtacccatccatttcatcagatgcagcttcagtcatgggcctcaatgactctgctccagaaggtagtactgtccaaggatgactcccattggtcaggatgttaaagaaaccccg

SEQ ID NO: 2639 - DNA, 611 bp, Rattus norvegicus
  Genbank Accession No. AI233763
aaagagaaaatagtttatttgaagagaagtcatcaggaaccagggtcttcactgtggagatctgcagatgcagtcctatggggtctgtgctcagcctctgtgagtgactgagagtcactccgtgacgagattccgttttagttatgcatgaacgctggaggaaaaccagtgagtccagacaggtgatggggtgtaccgacggctggaaagatgactgacaaacagcaggacggcctgcaccaggagctccggctccatctcctgacccggaagtaaactctcccctctgctcaaaggctctgtccccagtctgacccactggcaggggcgggcagctctgaggccccaccccttacccctgctctcttttgccaccgagcccctgctggacgccctcaccttcaccctctgcttcccactcgtcctcagcctcctgggcgtggcattcccactctgtgctgctgtcctcatcctgatcctccttacccaaaaggaagcttctgggggaagcatcctggtgctggcgggatcgggccttctttctctttcggagcatatgatcgggatcaggcgcctgctcctgccctgatggtggcgccaggctcacacac

SEQ ID NO: 2640 - DNA, 456 bp, Rattus norvegicus
  Genbank Accession No. AI233787
acaagagcacaacaggaaccaaagtagaagagtaacagatacagcactcaggataaatcatatctttaaaataataaaaaaatttacaccttgtcctatatcctgttagtattttcatatgggcatgattgaaaaaaaaaaaaaacaacaacaaaaaagcaagcatttacaattttttttcgataaagttctttttctttcttatgccaggaatggataaattgtcaacaaaattttatactaatcaggctgatgtaaatctatttcagtaacatatcattaacaaatttattttggaaatagataaaaaatattgcccctcgataataaatctttcctttgatgcaaacagctagaacaccttttttctttttgatattctaagacaaaaaaaatggttaatcttcagattaataaattaggtcattataataattaattaattttttttaagtt

SEQ ID NO: 2641 - DNA, 499 bp, Rattus norvegicus
  Genbank Accession No. AI233801
aggatcagaatactttaataagatatcagtgtcaaaatacatttccttataaagttaagtccgtacagttataatgtcgtcagtaggaattggacaatgcagcaacggtcatgaagttgttacatggacaggaaagattactatgaaactcggaatagttctcagagtgttttagtaagaccgcaaagggaaacaaatgcctttaatgctgaggcaacaacacaggaaatcaaataccagcgtttgcacgtcagtaacccttcaagttccatcaccgtgtgcgtcaggccacaccgtgcgccgatgtgcgacgcgaacaacaccatgcctaggtaatttcaggtagattgactttcaaagttaatttttggtttgagcagtaagtcccttaggctcactgcactcttgcctgacgggcttcatgtgcactgaaaaagtttattgtaccctagtcaaacaacagcttatgttgattggtatcacaaacccaaaaggtgcc

SEQ ID NO: 2642 - DNA, 389 bp, Rattus norvegicus
  Genbank Accession No. AI233806
aatgctctgaaaacactttattacacaaattacattcagattctgaaaaatagtgttctaacagtgtaaccatctaaaaataagacatcccggaaacacaccaactgaggagaaatttaaaaaaagaatttaaatagagactttttaaaatttctctcattgcaatataatgttagtgattttaaaaaaatagaaggagatttagcagcttttcgtcgtgtggcaggttggttctcttcactgccacaggctgagaatgctgaacaggaaaggcaccaaagaaagacactggcgatgggtgtggactgggagaatactgtgttcaagcagagaatagggctatttacatccaccaactaaaacgtctccaaatgtgaatgagctaaact

SEQ ID NO: 2643 - DNA, 610 bp, Rattus norvegicus
  Genbank Accession No. AI233829
aatagaaaactttattttcaccgataatgttgccgtaacataatttcatagcagacctgtgcaaaagatcccacatcacaaatgtcaccaagagatttcacaacttcccggcaggacgtgtagctctgggcccccagtgttgacacccaacattttacccctttatgtagtagtacagagagtcgagacatcatgacacaagaacaagccgcatgaaggcagtgtgagctctgaggtcagacactcgccgtctctgaacggtcactatagtaaccacgtcttcgcctccatgtgctcagtgtaggtctttgctgttcttatctcttcagcgtggtaatgtggaggactggagagtgtcaactcatcatgagcccacgcaggactatggctactacggatggggtgaactcaacatactaagtccaagtttggcaaccatcagcaaactggctcccgcgatcaaacctgcaggcataaatttcccagagttgtagaatctcatccccataatgccagccaaagtcccagacgtagctaggaaaacccacacgttcctggggtcctgagacagctggtaggcacccaggcctgccaggcccccaaagaagaa

SEQ ID NO: 2644 - DNA, 561 bp, Rattus norvegicus
  Genbank Accession No. AI233835
gagcacctacttggtgtcaggcactttccatatgtctgtgcttattattaaagtgaccttagaggtaggcattacatcacccttacacagaaaacactgaggctcaatggggtaggcagcagcttattcaaggtcacccggctggctgaagaccgaggatagagctgaggaagaatgcttacttagtatgcttggggccctgggttctagcttcagcattgccaaggaaaagaaacaaaagaattggcatggagatgggcgtctggggagccctgaagctctcaccaggacctttcacccagagaaaacgaatgattcgggcacaggctctgagagggaagctgagccccacttcattccccaccttctctggcaaatcaggaaaaactcacctcacggtagctggagttgatcttcttagaacaagagaattactgagatgaaagcccttccccgtacgtgtgctggcaggttatcagcgtgtaatgtcattcgtgtgccaagcacatctttgccagcatagaacatggttttcccgttcgggctacactcatagcgtgt

SEQ ID NO: 2645 - DNA, 553 bp, Rattus norvegicus
  Genbank Accession No. AI233836
acatttattattactgttgcttgcgtgtgtgatgtatgtaagttgagacgtgtgggccacagagcatatgcggaggtcaggacacaatttgggggatctggttctcttcctatctcgttggggcgggtctctcttatatctactgtgctgtatatgctagggtagccggtctgcaagattctggacaattctcctgcctggtttcctgtctcccccgagaatgctggggttagagatgtggctttttcatatgcgcttctggggattggactcaagttgccaggtttgcacggtaagcactttcccccagagtcatcttactggtccctgataggtgtttttaaaagattactttgtagacaatgttttttcttttttggtagagggttagataggactgggggagctgaaggacgcacaaaagagaaatgcggaatttgggagaaaggaaaaccccgtgaggcggtctcaggagctgctaatggtccttcctggaatctcacagggtcctcaattccttaactctacctggaatcatcagtttattacctaa

SEQ ID NO: 2646 - DNA, 554 bp, Rattus norvegicus
  Genbank Accession No. AI233885
cagaaatttacttgctcagcagaggttggcttaggagacaaatacagaactgcctttgggttctctgaaacttcccattggaccccagtgactcagctgtattgcacatctgggatactcgagtccagaggggaggcccagaagcatcggtctttgtttccccagatgcctcaaatgtgcagccaggctgcaggccacactgcagctcttccagaggctgctgcatgaaagcacaggacagttgcaggctagaagctctgctgctccaaagctccagaagaaaagggtcattttagaacagggcccggctgcccttcctctggcacacaggctgctgtttggaggtgctgaccgtcagaggttatctggagcgctggttgtaaagaagaaagtccttgtcttggcagagcagacagagtttcaggcttcggcggctgcctccagcaacacagaatgcccagatgcccatgagcaccatgattatatatgctgtcaccagattcacttcatagtgaggacttagtaaagtctgggtggacaccagcaggtgggtc

SEQ ID NO: 2647 - DNA, 376 bp, Rattus norvegicus
  Genbank Accession No. AI233902
gaaacagggttccctgtcctggaactcgctctatagatcaggctggtttcaaactaagagagatctgcctcccaaatgctggggttaaaggagtgtgctagtaccacctggatgcactcagcttttgtgtgggttctggggatctgaattcagggtgtgaagcctatttggctagttcttttcttcattaaaatggtatctgtcacatatttctccacccattttcctgtttcattagtagcaattatagtctacttcatttctccttttcttttattcagtatctaggtactcagaagtacaataagatgtaggtctaatgggaacaatgcatgcagctcatgttggagtggcagtttccattcagagagctcaa

SEQ ID NO: 2648 - DNA, 356 bp, Rattus norvegicus
  Genbank Accession No. AI233941
gactgttgaggccaagtttattgagccattaggtcgctctgtgcactggaaacaacatattcaagtctgtccatccggactctaaggtgctttctgtgcctgcacccttgactgtagaggtgggcacttctgctctatgggaggctgatcttcagtttcctgagagctgccccagcctgtgtctgggtaactcaggggaacaggaagaacagtgggctggcattggttcctaggacaggggtagggggcagagtctgatcagtcactctgactgaagccagatagggctgtgggtggtgggcaggctggctcagctctgggttttctgtaggtccctcacatcagagcctcgtgcc

SEQ ID NO: 2649 - DNA, 281 bp, Rattus norvegicus
  Genbank Accession No. AI233956
aaaacatacaaatatggtacaatacaatttattttaataaaatgccaaccggtatagtacaacaaaaaaaatgaatttaatacattaaagatgcaatacattataatattaaaataccacacaggaatggcagtacccccagggccccaatgagtacagtatttgtttaatgaagtagttattcagtcctgctgacgtggatacattctagtgagggcgtggggattggatcagggccttgagcccaagggaaaaggacagaaaggtcttctacggtctct

SEQ ID NO: 2650 - DNA, 438 bp, Rattus norvegicus
  Genbank Accession No. AI233966
ggtaataacgagtaccggggtttttaatgaagattataataaatcatttttttctgaacaaagaacaacttaaaatttctgacattatgaagagaatgacttagaaatggaatggaaggaacatagtgtttcacttaattttaaagtaagtgttttggtctgagaatgatgggtccccgcagttcctcctgttcttggtaagtgggttaggccattgcctgacatctcggtttttggacaaagctatttaaatcttcaaataaagtgactcaagagtttaatttatttacttcagtgactaagccttgaaccagccactcttctccaccttggagctgatccttaaaccccagcctttgggaagaggtagacatctagaggacagggtttacagttcagtcaggatgaatttaaaaatcctcgtgccgaattcttggc

SEQ ID NO: 2651 - DNA, 443 bp, Rattus norvegicus
  Genbank Accession No. AI233972
atgatggagtcccgtttattttaggatcataaacagtggaactaggagtgagggaaacaagacaccaaccagctcccctggaaagggccagatccagagcaggcaggctgtgtctgtcctggtgacgaagctgagccagcagcctacatcagtgccttctcccaggagaagtgaggtgtgatggaaacctgaagtcgacttggcttgggatccctctgcatcaggcaaaaaggatcagagagttcacagcacacttagccaagagcaccccacctgctgtcaccgaggctggtagggtcacattctggaaagaagccagtgtcctttggtcatcactaaggctcagggtattccagaaccacctgtgatcaggtcctctgcccagcgaatgtccaccttccaggcccagttgtctctcaagtgcctttgaggagtggaccgcc

SEQ ID NO: 2652 - DNA, 530 bp, Rattus norvegicus
  Genbank Accession No. AI234090
gccgagtgagggctgtgcccacaaaaacgtttattactcactacgacagtaagcacaatgcatatgactgggaagagtcccacccagaggaacaaaggtgaggcagacagtgatactcactgcagagaactaaagaaaacgctcacttgtagcttacacacattaattctaaagaactgacgggaggccccgcatcggcgcctacacttccgatacttctgagttcatacaccgcagagacgaaaggtccgtgagatggaatctgagtgtgttcaaacgaagagggcattcaaggtggggggatgtcattattggacttcagaatcagtttgtccccactcttttcaacctcaaagcccatcttcttcagtagggacgcatttgccaacccctgctcctccatcttggcaatgaaatcttggttttggctgttgtcttcagtgagatttcgcacggcatacaccacccactgcatcataaaggggttgttgtcatccatgttgctgctgtccaagatcagaggaatgcca

SEQ ID NO: 2653 - DNA, 589 bp, Rattus norvegicus
  Genbank Accession No. AI234098
aaaagcatttaatgacatagcatatatttaacagacggggcaaaagttgagaggtacaggtcgtacaacagagcaccaggcctgagcgcccactccctgtccaggctcagactctggaggtcattcctaatcaatgacactttgattgtgcagtaagatgaaaatttgtcattacaatagttacagtgacagagaaatgcacactatgtatcaaatagcaaggtaatgaagcaaattataacagtgtggccacgcaggagcgagcaagtaaccattagagtaacattactttgtccaataaatgcttcagttccacttatacacttagcaatgatttaaagggtttattatacatctagttttattatactttgtactagaattatttcaaacatacaatataatggatttcagaaaaaaaagattgaaattacagattatttaaaaccttatcagttttctattccttcttgtataccaacattctgaaccgtcacagcaattgatgcagaaaagccgcgcacgtctgtgttagtaggtgatgcctgatacaaatggtttgggctgcaagtttatagggagctgcact

SEQ ID NO: 2654 - DNA, 564 bp, Rattus norvegicus
  Genbank Accession No. AI234105
  misc_feature (1)..(564): n = a or c or g or t
gaaacttgcaaaacgaaaacaaaaacatcaatttcaagtcaggtttaaaatgtcttccctatcccctgctccaacaaaacccagccaagccagcaggacaggttacattaatacagggagatgaagtgaatggcgaaggacgagttagataaaggtgctgtagagatcacagagccaggggcatcactgactggcagtctcctccagagcccttggagggtagccaatctcagcagcattcatctggcttcatagagagaagcagggaggaagtgaagcctcctcaacccccacccccaacctcagttccgtttcctccttgtgtcctttgacccagattttggtcttactgaggcccagtgttccaacaatagaaggaggtaggggcaaaggactggaggtctagagcgtgggtatcttcccaagattcagtcctctgtgccacgggagacctttccagagaggtgagataccagatgtagctaatgagtgcctgggctatcacacgagagacccggcctgactctgtgcaggtaccattacgggcacggnacccatgcgggt

SEQ ID NO: 2655 - DNA, 610 bp, Rattus norvegicus
  Genbank Accession No. AI234107
tagaatttattgaacacagcagtaaatttaatacactggaaggtctttttgttgttgtttttcttgtcagaattggcacatgataaaaagatcttaacttactgctaaattaacactccaaaaatttaagttttaaatcatgttccataaaaattctaatagtgttataaaaatattaatttatactaacttacctagaaaagtgttagaaaaagaatctcatattcaaaccaatcatctaagaagtaatacaatacaattatgcattcttaaaaaggtactaatttgaatacaatgtagaagggagaaaagtggacaaaagctactgaatttacactcactgtcctatggggaagttgcagacaaaccagatgtacactaggcattttttaatgtatattttaaaggaataggaaagctgtttatagtatttttactgtctagtcaaacctactatgtggtgaactgatcattcactacaaccttgagttgatccaacctacctttctcatttatagaaaactacaaaagcttctttaactagtgtactcttcccatcaggagtacacctgccatctctgaagggtcactgacaggaatcaaagggagt

SEQ ID NO: 2656 - DNA, 556 bp, Rattus norvegicus
  Genbank Accession No. AI234128
gggaaaaatttaataagcatcaaatccactatacatcgataatgcaatactgaaattgtgaaattttaaatattgttttctcaaaacttggtgatttctttttcctgggacatgtggagacagaactaagcattcatgtggccagtccagatttagctgacactcatgtctaaagagctgttcacatttcatctctacagtaaggtagaccgggaactgcttgtatctgactctcaacacagatttcatgagacaacttataggaatgtggaatatttgaggtgcaaactcagaagctctacactgggatcctgttttgttcagctttaactcagtgcattgatcttgaggatgcagcgagtatgttctttcctaattcctttgaaaaatatttccgtggtaaaattggtttcttctttaactctaactgggtgtttctaagaaagattatcagctttgtggttggttttccacttggtaaaaatctatcaaaaacatcctatcataatttgtaaggaagaagaattgtttgttaaaggctgcagggtcaggaaag

SEQ ID NO: 2657 - DNA, 549 bp, Rattus norvegicus
  Genbank Accession No. AI234147
ggatccaggtagcttttattgggggatttgttgatactgagggtgacccacagataggatcttaagtttgtaccacagcagatttacacaggactccattcagaacttcctgaggaagtatgaacccgcgggctttgggatgatcaaggtggaatgatctccaaggaccaggcctgaccaaaggacatggatggcatggctctgtggagccagctggtagcggaggagtgtgtcagtccctgttgcagagattagactggcagcaaacgatggaaacatgagggcccaagcccaagctggggacatcaggacaggtattgtagcacatcttcgtcaccagaggcaggtctgtaaagctgatgggagaccgggtggcaatgatgacacagtgggtggtgttccctgggcagcggaaaggatgagagcatcctccgaatcctttgcacaggtggcaaaacatgccctgtgttacagctgtctacctgcctcttcctgtcctctctgcatctttctccctctctcttctttaagctttcttccttggattct

SEQ ID NO: 2658 - DNA, 434 bp, Rattus norvegicus
  Genbank Accession No. AI234218
actggtagcaaagcaatcttgaagaatcaaaatgtgagaaagactgaaacataaaacaaacaaaaaaactttaagaaattttaaagcatccagacaaacttttctctcccaaaggaagaaaccagtgaaaacagtacgtagggagaggaggtgcttatgggactttaaagattcacaactctgtggtatggcctgtacagcatagacacaaatcagacatcttattcacaattctaaaccaggaagcttaccacattttagaaactaagtttcataaaaatattacttcccaaaaaaatttgtataaaatattcttctattcaaattttcccaaagggtttatgtagctttttgccttaaagattacagtacaacattcaaaggaagaatttttcaaagaactatctagctgtgaaacctacaagaaatgtaga

SEQ ID NO: 2659 - DNA, 375 bp, Rattus norvegicus
  Genbank Accession No. AI234248
gggaatagttgggaggaaagcggtagggtaagggtacttaatactgtgagggttgggaggataaaattatgttttgggttttggtggagataattgggcttaggagttgataaaattggtataaaattgatagtggagcaattttttgtcatgttagtaagattaatccaatgtgtaggggaattccttgggtgacttccggtagtcagtagtggaatggggctagtccaagttttatggctagtgaaatgagtattatgttgagtagtatgttattggtttgttgttggagggttcatattcctgattgtttgtatttgaagatgatgactagtaggataattattgaggctgtagcttgggttagaaaatatt

SEQ ID NO: 2660 - DNA, 417 bp, Rattus norvegicus
  Genbank Accession No. AI234258
gctaatgctctgaaaacactttattacacaaattacattcagattctgaaaaatagtgttctaacagtgtaaccatctaaaaataagacatcccggaaacacaccaactgaggagaaatttaaaaaaagaatttaaatagagactttttaaaatttctctcattgcaatataaagttagtgattttaaaaaaatagaaggagatttagagcttttcgtcgagtggcaggttggttctcttcactgccacaggctgagaatgctgtacaggaaaggcaccaaagaaagacactggcgatgggtgtggactgggagaatactgtgttcaagcagagaatagggctatttacatccaccaactaaaacgtctccaaatgggaatgagctaaacttcccttgggggttggagcgctacctt

SEQ ID NO: 2661 - DNA, 474 bp, Rattus norvegicus
  Genbank Accession No. AI234283
aatccaaggacaaaggtttccaaattcaatgtctggagctgtctttgttagtcagagcttaagggtgcaggtttctcaggataaaagcatgatgtaggtaacagagaagagatggattgaacttcaagcatgatgtgggttgtctcttgttgctaaaatcaagcaggattagctcagcagcttggtagatagacctcagtacaggctacagaaaagcttcaagaattcagatatacagatgaacccaatgaaaaaaacaaccctttctcagtattctaaagcattatataaatctttaaaattcctatcactcacattttaagaaataaatttatactttggtaaggcactcctggaatacagtttagaaacagttacattttgagctagggtaagccatccctttgtgggagggatggtgagtgccctgcccactcagtctctcaggtctccatgaccgtgggggttcacctt

SEQ ID NO: 2662 - DNA, 425 bp, Rattus norvegicus
  Genbank Accession No. AI234292
acgataaaaccagacacttttatttgttcagaatgcttgtttttagttagctgaggtaaaaagtggtttgtattacaattactctgtcaccatccaaaagctcaaactccatattcagaccttacaaagcacccttgtatgtaaccacaccacccatgacagctgcctccatggttttctcagaccatggtctcccaagaaagcgagcatgtgaaaagtaacaatgttattctcattttttgtagtttatgctttagtttacaaaattcttagaattttatgctattcaaactattctcaaattatgcatgcaaattttaaatgttttcttgttcatgtctgataacagacttttctctaaaactttacaacttaaaaatcttttctttgaatcgtgagaaagacatggaaccttctaggttaca

SEQ ID NO: 2663 - DNA, 395 bp, Rattus norvegicus
  Genbank Accession No. AI234326
ccagccctcactagctctttattctcttattctcaagcaggaagtgtgctctcatgctcgttccagttattcaaaagggaggaataatactttgaagttggcatctttaaaacaagccagattgatctgctttatttttaaaataggagctatggttaaaaaaaagaaaaaagaaaaaaagccccaagtgcaaagaaaatatgtctggtagcggaaatgctctgcggaggttcatagcagaaaagggaataacaactctctcttcttgtcctgggtatctatctccagtgatggaggattcaggcatccagagaggcatctgggaaggagatgccaaggctgtccaacaatgtctgacagacatttttaccagtgtgtatacaacctgtgatatc

SEQ ID NO: 2664 - DNA, 501 bp, Rattus norvegicus
  Genbank Accession No. AI234496
gaaggaagtgatcagactttggtttattgtaaaacttagcaaagtgtttcatataatccctgacccctcactctgaaaacaaaagcagaaacaattattgcttattttccccctctactttgtctgtgctactgtaagagaagggagaaagattattacaataaataaaaatagagatgtaacagagaaaaataaatcagtctagatgagaagtattaggagcaacagaaatttcattaagcagtttaaaaataagcttctttaaaaaggttgccttattaaaataaatcacaccaaaaatatagcagcagagaagaaggatacatacaagttaattgcacatcagtcccatgcaaaaacgtggatcattagccaaagcagtagtactcagaatccagcttgggatgcttgtgcagagcttgagagtcctctatgatagagctgtcactgaactgatccaagtctgaaggggtctgatggcctggtacatcatctgccaaa

SEQ ID NO: 2665 - DNA, 443 bp, Rattus norvegicus
  Genbank Accession No. AI234497
actagcggagtaggtttattatggctaccccgaattccagagcgatacaaggagcacggagtaaaaatgccgctggtgtctcggcggtttacaatattggtttagtccacgagtttaaggcaaacatactaatgcatctgcttctcttcagagatcatacgtataaagcttacataaagtctgacccataacttctacgttcattaattcaaagtaagtctcattaagatgctttacacgaatacatgaaagaactaaggaacaggatgcttaaaaaaaatcagaaaggcaacctttaaattgcgtgaacaatgtactgagaatgttaaaactggacgagcgattcctaggtaataaggcctgcaggcacagaatcgccacatacgagataaacacagttgagacaggctacttaaagaaagagagggttcaactttgggctt

SEQ ID NO: 2666 - DNA, 417 bp, Rattus norvegicus
  Genbank Accession No. AI234515
agtctgagttggttggtggccactgggagacatcagtccaggggctaagctttagattctgacaccgaagagtctgttcaactgtatttgttagctagtgtcctgaatggagttcactgtccccaaccaggaccagcccagggcaggatgtcctggacctcggtaggagaaaggctcacatcccgggcctgtgcagtgatacccgggccagcaaaagcgaacagagcagttgctgcctggtaaataaacagcatagcctcacactacctacacccgcactcgggggcagggtaaagcccacttgttattaacaagacactggctcacacaaacgggctgtctcaggagactggaggggggtaaaatcagattggcctggcaagactcccaatgccatttctctgctggtaccccata

SEQ ID NO: 2667 - DNA, 437 bp, Rattus norvegicus
  Genbank Accession No. AI234527
aacagtttttcactctatttaattggcatttgtcattgtggacagagtggtttcgttctttgaagacctttactcctgagagctctatcttgcctttggaatgctctgtagctgctgctgtgattggacccttgcaccatccactttaaagcacgctgtcactagaacttcaggacggtcctgaccacgtcaacatagtggccatccgggggtggcttcctttgacttccaggttgccggaacttcttaattgtaggaatgttgctgattcttgtcttaaatgcccgcagcagagggaagtccgacaacacaggagcactgacttcttccaccatcaaaatggcttctagtagctgtatgtctgcccaactgagttggttgccaacaagaaatgcctctccatggtcttttaaaatcttttcctcgagccgaattct

SEQ ID NO: 2668 - DNA, 343 bp, Rattus norvegicus
  Genbank Accession No. AI234599
aactggctccttctggttaggggggggggggggggggggggggggaacgtaggatgggggagggggcaaacagtgcgtaactgtggtatagtatgcgcacacggtctagccggaagcacaactactgggggtagcaaagctggccaccccaataaaggtgtacttgcgcacagttcattaggttggttcggcctggccaacgggtgtggcaggacgaacgggtaacgcctaaacccgccccacaccgcccccccctagctggcaaatgggagcatgtatgtgtgtgatcggataattggtgtgcgtggttgtggcacgtgtatgggttgcgactttacgcttg

SEQ ID NO: 2669 - DNA, 406 bp, Rattus norvegicus
  Genbank Accession No. AI234615
catcaaatggctttatttccccattgtggggaagctgtgcatagggtctgtggttcctgcaccccaggaccttctggcctcctctgcttgtggctgggcccacaaaggggccaacattgccagctcagagcttgatctgcccaaggtcaggctgctcctggaaggcagtccctctggcgagacagcaacccctgaacatggggtctacggtgaggacaaggccaccagttgtgtagcttgaggcagactgggcgcagctctcggaatgaaccctctcaggatgcaaacacctagatgtccaccagggacactcagtctttggacccagtggggcttggagggggtggcccccctggaggcattaaggcagagtggctaagggcctcagccattcaagtcaggactc

SEQ ID NO: 2670 - DNA, 413 bp, Rattus norvegicus
  Genbank Accession No. AI234666
cccggtgtggaagctcggcctatgccgggagccgcggagccggggagccccggagccaggagcggaccgccgggtccggaggatggagccgaggccgcggagacccgtgcgaccaccacgacccctgacccaaaaggctggctcgctgggttggggcttgaaggggctgagttggcggcggtttgctttctgtcatttgtctcaggccgaaaatagtgggatgcggtcggggtccttggttgatggcttccctccctgtctgcccgcattcccccgtgttttctcctttgatcttgggctggacggtttggtctttcaggcccggccgagggcaggacttgggacccttcgttatcttgtttattgggggttagagccccagctaacaaagccaagaacagggtcggtctgcc

SEQ ID NO: 2671 - DNA, 556 bp, Rattus norvegicus
  Genbank Accession No. AI234677
atgtttcatatacatatttatatatatttcatgtacaaagttacattccgaaccccagggattccataatagaaataaatactgaaataactacatcgctaaatgagcttttacgcatagaaacgaagccttggcctctaaagacagcaaatgggacattctagaacccaatttaatgaggcaagtaaagttctggatttctagaatgaaaacaaatttaggacacaaacagttaaaacatattcaaatattgagaaatatatgataaaattattaataaaacttcatttttaagagaaagacaattagtgttacagaatagcacaaccctgttagaaaagcatttataatttcaacatttatttccttttttcccatcttataaagtgggatgcaatcagcctcttttccaacatgattaagaagaacccaaatctggccgagtgctttggtaatagtcctaatacttactaggaaacagatctccatttccatggcatttgcaagacacaccttctctggaggtttgttacaaaggctgcacattaagtctcct

SEQ ID NO: 2672 - DNA, 349 bp, Rattus norvegicus
  Genbank Accession No. AI234748
cacataatcacttccctaatatacatacaacagaacacatttgtaatatttaacctgtcaaaccttgcctgggacaaacaagattctcagcatcgtttattattttacatatggataaatacagttctcaataattgccatgaatcaggactgttgaaaaagaaactgagtacattccgtctggggttatgtgtacttgtttatcttaacacggtcttctaactgttgatttacaagtgagtgtataactcatctctgggaggtcctgaaaagaccctgagcagcttacgtggttatttctagagctcttgaaatctgcagagttgacatgagacctaccaccaccagc

SEQ ID NO: 2673 - DNA, 499 bp, Rattus norvegicus
  Genbank Accession No. AI234810
gaaggcttcatgaataatttattccatttgaagttttgttttttgttttttttttttaaaaagtataaactttttcatttcctcaatcacaatttgtacaactcagtgttatggcattcggcagcaatagtgtttgttccttattctttttttaaaatttgtcatattaaaaagaaaagcaattggaccatgttaaatgtcactgctaaacaacaacttaaaaacgccccttcataaagtgaccaagctattctgagagggttgatgctgacatgtccagtaatgatgttacaatttgtagttttaaattcagtaactttaaggtccacaaatccagtttactttaaaaactaaagctattttaaaacttaaaagaatatctcaacctgaggagtattttaggtcccaaatccagttttttaatttatactccacaaaagagagagagagagagagagagagagatgggttgcaacccttggcctatgggttcccaggc

SEQ ID NO: 2674 - DNA, 620 bp, Rattus norvegicus
  Genbank Accession No. AI234819
gaaggtggaaaacaatatattaatttattcccaagggaaaaaaaaaacagaaaacatccgcaaaaccaaactggacacagtagatacgggtactttccctgccagctcaaatgctgttctctttccaatagtatttacagtaaggaggtgaccgacaatgggcgtgtaaacttctccagaaaaatcgtctcattctccatgagcgatccagtgtaaaacattagtcttcaggtgctctcatccgaataacaaaggagaaagcggttttagatttcaccttgactaagtacttcttatatctcaaccctttcctacccgatacaaccctattttatttttcagtagaagaaacaagaaagtttacacgaagtaattccctttaaaggtatgtaacattcagcaggtacaattacagcacaagaatgaaactgtggtaagtgacgtcattaaagcaaatgggtttttcccctgttagattaaataaatatttctaaatgcgatagagcgagcaaagacaaatcacattttgaaaattatagttattcatttgtgtgtatgcgtatggggtgggaggagcggcagatgtccgagtgcaaggacaagtgtgtggaggttggaaa

SEQ ID NO: 2675 - DNA, 448 bp, Rattus norvegicus
  Genbank Accession No. AI234828
gcagggatactttggatgagcacagagtttatttaaggagtaggggcaggcaaggtggctcagtagcaaatgccatctccctctgacatgatcacagacacgttgacgttggtgggtttacccgacagacggtcgatggtcttctgggtgaagctcatgggcaaggcctcgtggcccaccatgcaagagtactgggcaccctgcttccaggtttcagctgacacacgcagcacgcttgtcaccaggtaagtgatggctccttcgcctggctccctcatgggctcaaacactaggtagctttcagagggcagctcctcattcccttgcagccaacgcaccatcacatctttagggttgaatcctggcaccaagcatgtcagggacacgagctcattcagggccagctccttcgacggcggcggtagcaggtggacctggggtgggaagg

SEQ ID NO: 2676 - DNA, 575 bp, Rattus norvegicus
  Genbank Accession No. AI234843
cagaccttttagagaacagctttcactaaacactgctggaaatgacagatgcccaggcgaggcaggctgtctcagagcctggtctcctcagtggacaagctggatggtgaagaagcctctgaaaagcccactgtccctccatgctcagacaggcccactttcacacactagcctaactcctaccttcttcatgcagcaccatcaccactaccaacctcacagaattaacatgcagagacgtgtctgaggatggactagtcctgaccagggccatgaggctctagccatgcaccctggaccgtgatgcgcaggacagatgaactggctggcacaagctagcccagaatctttggccaggtggaatgattcacatactgccttcacggtgtggcccctgttggtatctctggccacatcttcatagacactctgcactccaatctccagccttgtgcagccgtaagtcaacatgtcacttaggtgccgcttcatgcagtaatcaggtctggtctcaatggtaatccctatgcactttgtgaggcttctctcggaatacttgattgcctcctcgtgcc

SEQ ID NO: 2677 - DNA, 469 bp, Rattus norvegicus
  Genbank Accession No. AI234949
cccaaaaagaaaaccacactttattttcctgttaacactaagccatatattcacaaagtgttccaagtactcagtcaggtctccacctgccttaactgctcactgagcaagtcaaacaacaggactccaccggggactccaactagagaacagcaacattactaggctatgtataatttatgaacttagtataggttagtctctcatatctaccaagtttattaaaattactaaccccaatgatttatggtgacagtaatataaacacccaatttcagtcaatgttctattcactgcatacatgaacttctcagaagataactgtgggctcaggtacagtgatgactgtgaccgctggcacagcacaggttcagacaggcgtcaactatacacacactctcagtttgctctcacttcccaatttttctggggatacttgtcttataatacaatacaaatcattttttta

SEQ ID NO: 2678 - DNA, 316 bp, Rattus norvegicus
  Genbank Accession No. AI234962
aaaccccagtccgttttattagataaacaatgccattttataatcttcttaacagaaggaatgttttccaaactttcttcttcctttaccttgaaaactgctgcatgaatcacacaaggcaggaggggcctggctaggtctgcaggcttctgcatggccaggtagtgcagcaccttctcagcttctcgggtatcatcaaacagtctcctttggcgtcttgctggaacaggcttagcagtttcccaggcttttacccacatgttgctggggatcttcatacgggcacttagctctccctttaggaccacattgccct

SEQ ID NO: 2679 - DNA, 516 bp, Rattus norvegicus
  Genbank Accession No. AI235059
  misc_feature (1)..(516): n = a or c or g or t
aacactggcacctccacttagatcgggaggcgccgctacccaggagagttttatctaaggaatgaacatgggacagagaatatggcaagaatagaacctgggagttttaagctgacaaaccacttaggaaaagagtggngcgccncttggggcnnantangaattttnntggtttggtttcccctttggcttctccagttcggaagtcacgaacgcttccaagggcccacgctgaacacgcacagacccgtatggctgtcaggctactcagtctttagttggccattagggaatcacactcacgattttcaaaatactaaaattaggttaactaccacgatgccacccaggaaaccaaacacacggaagctacgcgcgctgcgtggcctctctcgtgtgaagaaagtagcagtttctagtaacaaaagccaatactggcgggtgacagggagggctgacgtcggtccactttctaggcaactttaaaaatccatcaaaatcttacgaaaataaata

SEQ ID NO: 2680 - DNA, 535 bp, Rattus norvegicus
  Genbank Accession No. AI235094
  misc_feature (1)..(535): n = a or c or g or t
ggatcaaaaaaagtttattctgaatatttaatttaaaaaaatccatacctataaggtgtgctacagaattccagatgataattcatatagaaaacccaacctaacaacggaaaggcaaggattctacaggaaagctcatggggagaaaacgggcatcggtcctcatgtgtcccagaggtggggacgcatctacaaggacatgctgtgctgctcgcttgactgtgtataaccagtgtggcccagcctcctggtgtctcagacactttgaaagcatcttagggacagttgatcaaggatgctggggaggcacccaggtggatcagttcactcagtcctgtgttcagccacattaatctatcaactgactataattgaacatatttggcaaaaagaacacagctccccacagggagcatgtttctggaggcttgcanggagaaggtatctgtctgcccagccaggtggctgggcacacagctcactttggctgagcaggagtcatgagcaagttcaagactccctccccaagtcttcc

SEQ ID NO: 2681 - DNA, 526 bp, Rattus norvegicus
  Genbank Accession No. AI235217
gagaggctgagcccatgcctcctctgggtgtctttattctagctgggatgtgaatacaggtcagaacaacatggcgtcagcatcagagcccttccgcctgcttcaacagggggagggtgcacagagggggcggacagctctggctcaattttcttggccagctgcttccccagctccactccccactggtcgaagctgttgatgtcccagatgatgccctgaacgaagatcttgtgctcatacatggcaatcagtgctcccagaatgaagggtgttagcttggtaaacacaattgagttggtcggccggtttccttcaaagaccttgtgtggcaagagtttctccagttcttctgggctctttccggcagcctggagctccttcctggcctcttctggcgacttccccttcatcagggcctcagtctgggccaagaagttggccaggaggatcttgtgatgcagaccattccgtatggagtgctgggtctgaacagggatgaggaaatcacagggtatcatcttgg

SEQ ID NO: 2682 - DNA, 611 bp, Rattus norvegicus
  Genbank Accession No. AI235219
caaaactgtcaagatacatatattactttttattacacgtaataagtaattttgggcttaaagtatataaagtttcacatttttaaagttaaaaaactctttaaagttgtggagcatttaaaaaggctgaataagtgggatatatcttacaacacaggtttacaccttaaatattcacatttcagaagctgtctgtaaagattaaaaacagggtaacaagtatttacaagtggcaatgattacgatcttgtctttggaagcagaggttaacgggcagggaccggagggctgcacagtgaggttcagcggtccacggcacggctgagactactgccatctctggagtgatcactggagcaggcacagcatcagttcccagtcactcctcctgggcagggacgaccttcaactcaggatggaggagcagcacttgagcaccgcgtcccttgcatacgggatgtaggacagactataccaggtcattgacaagaactgcaatatgcagaagagtaaggccagccccttcttccgccaccagagagcaacacacagggtaaacaccaggcacaacagcataataattgttgcaagcaatcttgttgtttcaaaca

SEQ ID NO: 2683 - DNA, 583 bp, Rattus norvegicus
  Genbank Accession No. AI235223
aataatttttttagatttattttttatacatatacactactgtcttcagaaacaccagaagagggaatcagatctccttacagatggttgtgagccaccatgtggttgctgggaattgaacgcaggacctctggaagagcagtcagtgctctaaccactgagccacctctccagcccaagtggaaacttctggtttctttggaaagtcagttgagtcggatgatgtcttgctgaagcaaacacagatgaaaggatgtcatgataaggtagacacgtgagaggacacatgacaggagaacttctcttggcttccctgctggtcctgctcagtcctgctgactcatgccgatttggtggaagcctggcagtttctgctggcttgtggcaccgatgatgattcctgtttgcaatcctgatgctactgacctggatggctgctgtactgtcaattagagattggagttgcccccaggaactactacacagcaaacagctcagcctccttgcttcttctgaactgaccagccattgctgattcctgtgaactgagctgcagattaatttgccccagagaaccatttcc

SEQ ID NO: 2684 - DNA, 486 bp, Rattus norvegicus
  Genbank Accession No. AI235224
caccatttaagagaaagaaagatggaggaaaggtaaacagtgttcaggcttcagcttttgccaggggaaggcttcgggtcatcgagaccccaaggtattgccaggtgcacaaatctggattccgtggcaggcaggcaaagtgatcgctctggtagcccttctcagagcccatgaggatctgatctgtccacagaggctctccatggctggggtgtaggcgaaccggaaacctgtggcatttcccacagcgtcgaatcctttgagcatcttagtcatcttgatctcataacgctggtataaggtggtctcgatgatttctggggaacccatgaatttagcccttataaccaggtccgagttgcagaaagctgtctgtgggtgggttggggcacagctacaggctttactggaagctatcaatgatagcaacaagaggatgccagaggccagagatgcaaagggcgccatcgtggtatctctagcgtg

SEQ ID NO: 2685 - DNA, 623 bp, Rattus norvegicus
  Genbank Accession No. AI235234
aaggggaaatcatccatttattgtttaaagatcgcaagacaacatctgaatttctgaagcacaattttaaatgctttactttttcaataaagcagagtataatagaaaagaaaaacaaatcagtttccagtaatatctattactctattcagaattaagtcttccacagacaggttacctggaaataaaagcctgttacaataagcaaagctttaaccagaatggctacttgtcgtgccagaaaaaagctcattcctataggaggaatgatgtgctgtgtaaatggccacagatctcagccttagcggcactggaagtctattatccaatcccgcattgagtagttcagtgaattttgaaaatcagtttacctgtaaccatgctggcaatctttaactgatatttattcagttaaaaaataaattaagaaatctcttaactgatgttccttgatttacattactaaaggtacacagttcatcacaatgcaattctgctatcagaattacatgagactctttgcttaggttttaattagcagtaaggatcacaaattcaagttcttaattatcaataatttgtcagctaaggtacattcaggcaagagctgcaactacagaata

SEQ ID NO: 2686 - DNA, 442 bp, Rattus norvegicus
  Genbank Accession No. AI235277
gacagtggtggtgagagatttgattgagatgccttatggagtagtcgcattctgaataaagcaccacactgtgtcagtccgttcccacactgctgctaacacagctggtttgcttagggagtgcccaacttagccagatcaagggaaccccaagagagcaggggcaaatcctgcctctggtgccaagcctcagggcaggcaatcctggagaacactgccagccttgggaagcttgggagacctctaggctgttttcccttcttttcaaatcccacaatttcctgacggggagaagctgtaattagcccagaccaggcaacagatctcagctagaggtacagctgcagggaaaaccccatggaatcttgggaaccagtgtttttccaattacaaggaccgaggaataaactttttctgtgggttctattgaaaccctcgtgcc

SEQ ID NO: 2687 - DNA, 619 bp, Rattus norvegicus
  Genbank Accession No. AI235282
cttgcgggcgctcactttatttttatttttttttttttttttttttttttttttccttttctttttttttccttttttacaattttatttataacaatatctgtgttatttagttgtaaaggaattcagcaaaaattattaaaacgttcacgtccccaaaatggggctgcccacttgcccttccttggtgtgccccaattcttcctggccctcaggggaggggagactgggggacagttaccaaagaatgtgttcagccctaggagccacagagggggcactggagaggcaaagacctgtctggaagggatactgagcatggccatcccagacgtgcccctaaaagtgggagctggggcttggggtgacttccctcaactaaaaaatactcctacctcagctagagccagatattccagacaggttcagagagaactccacctccccagaactaaccccaggaaaggaaagctgggacactggagccctgttgagtgtcttgtacaggctagaggctgtgccgccagattcccggggtaagggaacgtatgtggactccttcatacctttgagccacagagccctccctgccccctcaaggcagcatggggggagggga

SEQ ID NO: 2688 - DNA, 600 bp, Rattus norvegicus
  Genbank Accession No. AI235291
agcaagtggccgagcttcagcagccgcgaccacccttaactaactgcggccaggccctcagcgagcggcggcgatccggcttctctcagccgcctttgcgccctgaaacgccaacaaagccttggttttaggttgcctgccgcgctcctcagatctgccgggtggaacagccccggaggcttccatcctcttccagaggtgtcggggcttggcccccgcctccatcttcgcgtctcaggatggcgagcagcagcggctccaaggccgaatttatcgtcggtgggaaatacaaactggtgcggaagatcggatctggttccttcggggacatttatctagcgatcaacatcaccaatggcgaggaagtggcagtgaaactagaatcccagaaggccaggcatccccagttgctgtacgagagcaaactgtataagattcttcaaggtggggttggcatccctcacatacggtggtatgggcaagaaaaagactataatgtgctagtcatggatcttctgggacccagcctcgaagacctcttcaatttctgttcaagaaagttcactatgaagactgtacttatgttagctgaacagatga

SEQ ID NO: 2689 - DNA, 364 bp, Rattus norvegicus
  Genbank Accession No. AI235306
ccttaaaacttggtgagggatttcaaacatattgcagtcaggtagcaattcactgtcactcggcataaaacttgggaaaaggtacaagtcattacccaaggctggcccaacctaactctgtcacgcttgtgaagctgcacccctcagccatcttaatttggtttccaggtacttcaaactcatggagtggtcctggacgggacatgggttctccactcaccacagaggaggctcgtctataaactaaactttcagcctgccttataaactttatgtgattaataccacaacccaatgagggttaaatcctacaacggcaaggcccagccccagcctcctgttaatgaggcaggctgtgggcacc

SEQ ID NO: 2690 - DNA, 571 bp, Rattus norvegicus
  Genbank Accession No. AI235349
acaaagtcaatagcttttattaacatgatataaaaaattagtgtgatctacagaattcccagagagtaatcttaaaacattttaatatgattcttaaaatcttaacagatatgttctcaccgccactgaattttcaatacaaaaagtttacaggcgccgtctgctataaaactacagcgttgagatggtggctaggtagttcgggccccttctcggccgtccaccgcgcaccctgtggtgggtctgctgctagactcatgtggattctgtacatggttataacaggattattacagctccagcatgttttaacatactacaccacagttcgataccatgagcaacagggctacaccacgtagtgcttcccgatgtgagataggagggtagaaccagttagctggactcaccgaagcacaagtccaggacaactctagaaagatctagctgtctctatacgattcttaaacatctccatccttccaaacccctaaaccccaacaacccgataacattaatctttcattagttatataaaaataatcttagattcatgcttgacatcaaactc

SEQ ID NO: 2691 - DNA, 452 bp, Rattus norvegicus
  Genbank Accession No. AI235362
aatagcttaaattgtatatacagctaaataaaaccttgcattaatgactggtggaacttgtcacctaggatcagggctgagctccttttacttgctcagtctatagacttaggaatagcctgcggtttctgggattaggatgctgaaatcattcaactagagagcactgggaggttggtacctctctaccttaggtctgaggtcagacagggtagccaggcactatgtatgaacactgtttaacattgtttatccagtttaatggtgggttagacatatgacttgtggggggagtgccagaagtggaaggtctgcattttgtcttcaaacacttacatagttgattccaggtcacagggtgattccccaaccctacctagtacagcacttagtacctaagacattttgtctgtctcatccactccagtccacgcctcgtgccgcctcgtgcc

SEQ ID NO: 2692 - DNA, 432 bp, Rattus norvegicus
  Genbank Accession No. AI235403
  misc_feature (1)..(432): n = a or c or g or t
gactctttaatgggtcattgtgacactgatcgtcagcagcgtgatatatctctcttcacatgggaatgtcgacagcaaatcaatcatggaacatcatagagccggaaggtcacgtggggtcggtaagagtactctacatgctaaagtgacagttatcctcaaaggaacgccagaatgtgtgtagaccaccgtcacctctgaggagggctcagctgtgcgcagctacccagttataggaagtgtccaggatggggtctcttcaccttgtccaggaacagctgggggagcgctgaatgttcccaggatgccaccctccaccgcaaggcacccagccctccacagctgcagggacaagcccatgatgtgtagtgacanactgaggggcatacattggactcctccactgacccccacaacagaacctcaagacag

SEQ ID NO: 2693 - DNA, 361 bp, Rattus norvegicus
  Genbank Accession No. AI235405
gagaacagaagtaaaaacatttatttttttttccatctttaaaactccggtcccacaagggcagcagtcttgacccttcataaaaaaaaccttttaactgaagggaaggttaagtctaaaaagaaactaggaagttcactgaacagacagtaatttcttaaaaaccactactcctggggggcacttctggctgacaaactccctctgtcacagtctctgaaggaaaggaaggaagcatccacaggtatgttcccccagaagccatccgggaaagtcataaaaccaggtatgcaggctgccctcccaatgctgcctccagggctcagggcagggaaaagggtgtgtcagaggcctcgccccg

SEQ ID NO: 2694 - DNA, 538 bp, Rattus norvegicus
  Genbank Accession No. AI235446
cacttttttttttttttttttcactctacatttttttgtctttattttttttttaagtaaagaaattccattgaatcgaagataacaaaattacagtttttgtttgtaatgatctttgctcaccaccacagattcagaagtaatgtgaaaacataaaataaacaaggacgccattgcttagtataacttcttaataaaggtagatatcctcatatttagaaaaagttgcattgctaattgcaagtccgaaacacctgctgctggaggagtcaaaggacccagcagcacaggggcttacggagcatgaactccaaaatacagtatttccagggcagcatctggagttccgtgaaacccacagagaacaaaacaaaacacattagaatcaggaatgtgaaagtgatggttctcaaaaaaaaaaaaaaaaaaatcaatctggaagcagaccactgtggtcagtgggagtctacctgggaaaaggagggaggcgaaccggcccctcccccgccccagccctggtcaccctcgtgccgaattc

SEQ ID NO: 2695 - DNA, 630 bp, Rattus norvegicus
  Genbank Accession No. AI235493
tggttcactcaggatcaaccacgccaaccatacgggctccaatcatacctacctgaaaaacgcctacagcaagccaaagctctgcgagcccgaagaggaacttctccagcagtttaaacgtgaggaggtgtctccgacggggagtttcagtgctcactacctgtcgatgttcctcctaactgcagcctgcttatttttcctaatattgggactgacttacctaggaatgagagggacaggagtacccgaggacggaagactcttaaaaaacccctttgatgaaacatttggaaaaatacaagcaagtgaaaaaaatcttatgatgagcacattatacaaacttcatgatcgattggctcagattgcaggagatcatgaatgtggccgttccagccaaaggatgctttctgtccaagaagcagctgcatatttaaaagatttaggtcctgagtatgaagatgtatttaacacttcactgctgtggatttttaaaaatgggaaagatgttggaataaggtgtgttggttatggacctgaggaagacctgacaaacataaccgatgtgcagtttttacagtccaccagaccacagatgccgttctggtgccgtttccgccgttccctcgtgcc

SEQ ID NO: 2696 - DNA, 634 bp, Rattus norvegicus
  Genbank Accession No. AI235497
ataagtcttttattgtttccacagagcccaaactgtacttgttatcaggatcttgtttctgaagctaggaaactgaggtctcattcgtcaggctgctggacggttcccttctcagaaacatagatgccatccaaaaacttcctgatatccttgtttttaactgttgtggcttgctgaatcagagccgctgaatttgaaacaagttcaatatcatttccttcaaggattaactcatccttctgggcttgagagacagaacaagcaacacctgtcctcatccgaaccctccggatgtatttttcacccaagaaatttcggatttcaaccagagacccattctcctgaataacgacgttgatagggaagtgagcatacacagacctcatcttgtaacggaagcccagtgtcacacccttgatcatgttctgaacatgactgcagatggttctgacagtggccagttccttcctgttaccccaccacttgtcaacacggagccttttctttttctttccaagaagactcagctctacattgatgtgattgaagtccctcctcagagttcctctggggcccttcacaatgactgtgcgccccttcagagtgatgtcgacattttctggaatgtcgacag

SEQ ID NO: 2697 - DNA, 566 bp, Rattus norvegicus
  Genbank Accession No. AI235511
gacaattgaataatgccatttattgcccccacatcccttcttccaccgccaggacagggaacacacaggaccccatcctctcagtaagaccgtgctgggaacaggaagctacttcactcctctgctactgcaaacacaggagggagaggaacgtcttgggctagaaaattgataaggacccaaggggcagaaaaaataatggatgtgagggatcaaaacagtatgattaaaagaaaattctagaagagaaggaagaccctctcgatgcataaggccaggattgtctccattccttacacctcagcccgacacctgtagttggagtggtctttctcttgagggtctagtgccaattgattctcgcagttctctcagtctctggctcccagaatgggaacctaaaaagggctggtccgccaggcggtagggcgggtcagcagagaggctgtgggcagtcctgagaacccaatagctgatagctgcgggtcccctcaaacccaggacagcacggggtacagagggagacaaggctgctgctcctttcggtcttgttctcccctcgtgcc

SEQ ID NO: 2698 - DNA, 384 bp, Rattus norvegicus
  Genbank Accession No. AI235585
aaagaggcccaaaacaactttatttgtatatcaactttggctcccatctgactagcccaggatgagggcagcagaggccagccaaaaccagtcagccaataaagacatcgcccaggatccagagcggcccactgggagggggtatgtccatccccatgaagccactcaggcagatcgtctttccagcctgcgataccttgagtatgtacttctctgggtgtagttcaaagttttggcctcctagcttaaaggtgataatgggcaggctggacaccttctcacaagggatcatatactcgccctggatgagaggcactgccccaatggccttctgtagttccttcacctcgtccacaggccccaccagaagagacgtccctgtgt

SEQ ID NO: 2699 - DNA, 530 bp, Rattus norvegicus
  Genbank Accession No. AI235611
tctcatgttgtatacaaaccaaacttgaggattacatgcaagcacagtttctgaataagatcaaaagggcacagtggggatcaaataaacggttcagagagatgaactatttttagcagaaaaaaactcttcttaggcaagccacacccagagcatctcattaccaggacaaccttggccgagtccactcttgaccatcacttgagcaagattagggtagtaaccctaaaactgaggaatgttcagcatgactgacaaacacacgtggtctgcctagccacgcttgaaattgaacttgtttgatgtgctggttactttgttacacctcacgagtagaaaatggtggcagggtacaatgagatgaagcctgcccctaccaggctcagcaactgtcagctaacatgacaggcaaagccaaagaaagggggctcatgagaactttggatctgtgtaaaataggagaccagatggctaatctcagtaagagacgctgatggtcccacataaagaaatgactgacttcccaggga

SEQ ID NO: 2700 - DNA, 494 bp, Rattus norvegicus
  Genbank Accession No. AI235675
cagaactgaatttgttattcatacatttgcaatgatttaaatacaatacatacaatttctacagtgcattagaagaacagggcagcagcgctcaccaaccagcttctgttcctagacataggggacaggccttaggctggcagagggacggctgttctgaagtacctggcactctgggctcctggcactcccaagtccacattcaaggcaacttgagtacaggcttcaagggagggaagcagggaaggccgcctgtacccttgcccaccgggcctggcactggctccctcttccattggacccaatttcctcctgatggcagacctgatctggagcaggacaggacacaagagtctcgtgcagcactaagttctctccagcactccagccaacaggctgatgtgaagataactgtgaggaccctggacccctggacccctgctggctcctgtgaggaggaggcagggattctctcaaacgtgggtctgaggcca

SEQ ID NO: 2701 - DNA, 442 bp, Rattus norvegicus
  Genbank Accession No. AI235738
aggcctttgtgggggaagtaacgggtcctagctaagtcagagaaagcagggaaacaaactggcatctgcacaccgtcttcaagtaaacagagtccctgacgcacccggagagtgtacttttaaggcaagaggaaaaaacaacccactgtgacagcttataaaacgcacgggctttggccctagagtctgttaaggcacaaaacctggtaggcagctgttgtcggtggcctgcacctcagaactggatttgtaaagaacagtaggaacatttaaataaaacaacaggccatgttgataggacctgaagtcacaggataaggtcgaaggggaaagtccaaagacgccggtctcttgtctgtgaaagatctgttgcagttgcttcatcaatgatcagtatccggtttttcttcagaattgccctcgcaaggcacactaactgtct

SEQ ID NO: 2702 - DNA, 441 bp, Rattus norvegicus
  Genbank Accession No. AI235739
gaaaacaaatcatggtaagaatttactttgaagacaatgatagaaagttagtgttaaaaatgctaatgttcatgttttttgcagctattgaagctacaacctgatttgggtttgctattttcccggcttgtgtagagtcccattgcagggaaggcagtaagcctggtaggcctgtctgtgaactgaggtgaaaagcgagggaaggtgtttgcgagcatccaggtaacaggcaatgacatggtccttcaatacagaatctcctagacaccagaggtttcctgctctcactgtagaaagtcttctaccaacctgttgaattcatccgcaaagcgcaagtgtaggttatgcttgccctctggcatcaggtgcaaccatctggcagatgtttaaactggtttatgccgtccacccacttctcacaggttttggcaaagtagtcat

SEQ ID NO: 2703 - DNA, 471 bp, Rattus norvegicus
  Genbank Accession No. AI235842
tgtgcatgcctggggttgctgaccacagcctttttggtaataaaaggcaattaaacacaaacaaactattcagtaatatccaactgataaaacattacatagtcagtaaagaaaacaaggaagatggtgagacgaaatgtgaaaaggcaaattcacaaaggcatttcaacagtgcacagctctacacccaaatgctgcacaggaatacaatcaaaaacactgtgtgccctctcaaggaaaggggtgtccttctattgattaacaatacaaaggccctcttgtgagtataagttcttgagactgcagaaaaaatgaaaatacatgtctctgaaaactgatgttctcaagacaccctactgacctcactcagaaacccgtttgcctctactgaaaaaggtgccacctcacccagggtccagttctcctgagatacacaattaatggtgctgaatggcttccctgaatgccctg

SEQ ID NO: 2704 - DNA, 526 bp, Rattus norvegicus
  Genbank Accession No. AI235886
cggagctggggaccgaacccagggccttgcgcttgctaggcaagcgctctaccactgagctaagtccccaaccccagtgatacatctcttaatttacagtttaatggttgaggtgacattttaacaaacaaatatgtaataactacttactggttttctatctttttagccttttggtcttgtctgagattgggtctatgcagctcattctgtaacgttacttaatcatcagcagatgcacttgtggggctttactgccagatgcgaagggaatggaatggctacgaatgattacagaacgagccgaggtcacttaatcaaaggtcacagagagagagagaagccagaaacaaaggtcaaggaagagctgcagctgccagagaggacctctctcaaagaccaagtattttacctgtttggaggtgagttcattacactgcgtcaggttcctttaatggtaagatctttaaaatgagtatgtcaagtatcatgaacactggaaagacaacaggcgacacctgtggaa

SEQ ID NO: 2705 - DNA, 516 bp, Rattus norvegicus
  Genbank Accession No. AI235895
acacaaacactcttaaggctgtagtttattgacatgaataaaacgaagtatccagagatcattatacgctaacattagagtaagcactgtcttcagagaacatgatttgtctcatggtgcagtggctgtagaaggcaaggctagaccttcaaatcaaatgagaatacatgatctttacattaaggagaaagcattataaaagtacaatctgttaaagtctagaagacgtattgaatttgctgaagaataagctctttatttacctcttcaaagaaccaattattttcttcacttccttgtgtgcatccttgtcctctttggtgacgataggcaataacaatgccaagttacagaatttccaagcctcccgagattccccaagatcaacataacacttggccacatacatatagttggacacagaatacccaggttgcaattcttcagtcttaaggaagttatgcaaagcttcatgaactgttgaagatggtatttccccaaatagagtagcagcca

SEQ ID NO: 2706 - DNA, 465 bp, Rattus norvegicus
  Genbank Accession No. AI235898
ggattacagagcacagcggcattgggaaacatttactaaaaacatgttaagagcagataccaacaagggaagtccagcagttctaaatgggctgtgagggtcagcccaccaaaagccagaaggatgtaggacaaagctagtgctgccgggtccgcaaggactttctgctcgacttggagatgccagcctccctctccttctcagggtcgaagacttctggtatgtcgtggggccagtagtcattacagtgggggcagcgtggctcggcggtagactggaagtacttggccacacaaggcaagtgcatcctaattccacacgtttcgcagctttgaccctggataaggaggctgtggcagatgttacacatcttcacggcatctgggtagctctctcggataaactgctccatctccaagatagcccggccatgcaaggtgaactccccctccttcttaatcagcc

SEQ ID NO: 2707 - DNA, 164 bp, Rattus norvegicus
  Genbank Accession No. AI235911
aaggacaacatttaattggggctggtttacaggctcaaaggtttagtcccttatcatgaaggtggaaccaaggcaccgtccagccaggcccgggccaggagcagctgagagttctacaccttcatctgaaggccactaagaaagactggatcccacatggttag

SEQ ID NO: 2708 - DNA, 538 bp, Rattus norvegicus
  Genbank Accession No. AI235935
ccagttcaaagacaaaaactggcttggcagcacagtgctggacagtgcaatccgaggcctggcctcccatccccaacacaggtgagggaagggagagctaaaaagctgaaagaggaaaccccacagaaggaaacattagtttttagttcacactcctgcaatcccctagcctccataaaataaactttctaaagtaaaagcagcagaaatggtgtaaacgctatcggaaccgagagtaactttgctccttccagatgtggtgcaggtccctctgttgaacaccgcttggctggaagcagaattcatcttgcatgaggaaagcagtctttggcctgtctcaggatttctccagcattgcataacaagcagatttcaaaattcattttcttctccaactgcagcaaaaaaggcaaggagagacctttttgtttgaagactctggcccagtcctgtgagagttcgattccattagaacaagcctttaacttgctctgtttctgtgtcaaggtctatatcgtaaaagcagggtcgggtgggc

SEQ ID NO: 2709 - DNA, 670 bp, Rattus norvegicus
  Genbank Accession No. AI235948
aacagtttttttattattttctgcacatttgtacagctgtaaactcaaggaatcatccaatagttgtatacatctggagaaccattaataagcaccttcagtggtttccacagcttaagatttaccatgtaaaacattttagaagggatctagtaaaatgaataaaagttataaaagttgtatatcatgaggaacgtgacaaaaaaagcaaaaaaaaaaaacccaaaaaacaaaaattcgaggctactttatgaggttgcatgaaagagtcacatgttccctaaatcttgtgatttaaattccaattatgtaagtaaagactcccttccaatttaggttcccagtccaatgtaagcagggtgaggtggaggtaggagatagggttggagggctgactattggcaaatatgttataggctccattgctcttccatagaaatccttctagacctttgctgaagccaaccacggcaggtacttggttttcatccttcttcgagaatgttgtaaagaactgtagaccatcatcaggataaaggaaaatagcataggagctggaatttgaggaggccagaacagcctggaacgtgtttctcttgccttcctcaacaaggctcccactgggccctccttagggagccatggattcccaagtgacaaccaccacact

SEQ ID NO: 2710 - DNA, 673 bp, Rattus norvegicus
  Genbank Accession No. AI235950
cactgtcaccatttattaaagttttataaaaactcaggccacatgggagaaaaaaggtacatcccacaatatgaacaacactgtctagtgacttctcccccttgctctgtggcactatggtaaagcagctcctcacttcctacctgtcagacagcatggacatgttcctaaactggggcaggttgccttttctcctgagaaatcttagcagggtaaaagttacttgccagccagtctctctgtgtgagaaagttccttctaaatttcatcaactgagtagtaaggtttcttgaccaggcccagagacagctacagccctgctttttatctggtgtgcaacggccatgggcatgtgaggctttcagaatgtgcttgaccctttcctatgtatccatctcacttcatatctgctatctttcctgtgtccagacagcatgcagcccagtttaggaagacttgggtgggaagaggggttagaggcaaggaaacaatccttgtctcaagtctggtgcacttcatggaacatgagctcacgggggatggctgtttctgggccaaacttggttgctgcccggcgctcaaaggcagcaacgttctgctttacaacctcatcaaaaaacatggtcgccagcttggagtggagcagaaaacgaaattcaaaggaaatcgagaa

SEQ ID NO: 2711 - DNA, 587 bp, Rattus norvegicus
  Genbank Accession No. AI235951
aaagaggactcataataactattttaattacaggtgttaacatattaacctaaacttcactgtcacagaaagacatcccataaaattcagaaaatattcaggttgtggtgaggaagatcaagccttttgaagacttcaacgcactggatggaatggctcaagaatttcagcataagttttcttctctttctcaggaaaatcttctggatgtaattttatatacccgaacatgtcatggtccctcacagcatacagatagttttgacgttttaaataaaaatatccagcaaagaaaaaggaagtaacatacagaagctggcgatgcaaacctgctttcatcacaggtctcattcgcatcatgttgtccatcaggcccgtgcagtagcccaggaagccgatgtagacaagccgcgggtcgttcagcttgggcgggggcagtctccgggcctcatccggcaagaatcttaagggctcatggcccggccggccgttcatcatattgatgcgggttccacgtgaggtctgacctcgactccaactataagaaaaaccacgactacaaaccccgcgacctagctcctcgtgcc

SEQ ID NO: 2712 - DNA, 506 bp, Rattus norvegicus
  Genbank Accession No. AI236021
  misc_feature (1)..(506): n = a or c or g or t
aaatcattcaacggggatgctgcgttgcttttttaattgcatgggtagttttaaataaatggagaaagcaccttctagaagctacactagcaagaagattccatcaagcatttacacagtaaatttccaataattttacaaagattcttgatcttcacttgaactggacataaggaaggacaggcccctcaggttgctgtttctctgcttgtagaaggaaacaaaagaaacctgtggggcggggaggagagaaagaactggtgactctcatgtctacttcaggacatgtgaagaggccggtgtggagctgcacacctggtaaagtccagcacttgggagtggggtcaagagggtcacaagtttcagcttagcctcggctacatagccaggctgaacgataactgtcagatgactttccctatgatttagagcatgctaccacctttaagataatgagaatctcanaagctgtagtattggaatacctttgaagacctcagacagct

SEQ ID NO: 2713 - DNA, 484 bp, Rattus norvegicus
  Genbank Accession No. AI236036
caaatttcacaaacttcttagagaaggaagctcttctgtggtctgggtatagaaaagtgttttggtatcaaaagcttcaaactgccagatttagtgaaaacttttgttaagtatccagatgttgggaccacaaagacctgctcttgggccaggtcactggactcctgaggttcacctgaggttccaatggagcacaaggaaaggatggttggctgggaagagctccatctaatccacgttgccacacaccagcctttatatcgctttctgctcctggttaggagtagcttccaaaggaaaatgggatctgtgtgggtcataggaaggtcctctgtctcagtccatgatactactagaaacgctggcaggagcaggaacagaataagtcaggacaaactgaaagggtttagaggaacctggcagtatactgggatttaactggatgccaagcaggcgaggcttgaagttctgccttcttcatctt

SEQ ID NO: 2714 - DNA, 182 bp, Rattus norvegicus
  Genbank Accession No. AI236039
gaatgtaaacagttttattcaaaaacagacaggtacctgtttgcattacagaatttaaaacttggtttacactctttaaaaaaagaacaaatcctcaaattcaagagagcttaacattcacagggcacactctatagacatgaaaccactgctcactgcctcaaacttgattcctcgtgcca

SEQ ID NO: 2715 - DNA, 454 bp, Rattus norvegicus
  Genbank Accession No. AI236066
accagttaatcaaacatgattaattttaatgtaattactaaagaaagatataccattttattatgacactctagccatacatttttgaaaatatgcttacgaaacagtaaatgtaagataatgattcagttagtaacactttcacgagtcattaggactgatattgctctgccataaatgaattgaataaccacttcaaatacaatcaggattaatttgatagatttcctttgtgtctgtgtgtgggtgggtatataagacacatacaatgaatgaccaaatactactttaaggtttcagtagagaaatgaattcgatgtctgtaagttaatcaaatgtctcttactttgtgacatgttggagagactgagtcactagcttgtcactggttaggtgcacagcttcaccaaaaagagcttggatacgatggtggcatcctagtgacaggtgaacg

SEQ ID NO: 2716 - DNA, 687 bp, Rattus norvegicus
  Genbank Accession No. AI236084
attagcatcagaagagacttggacggggtgcgtgctcaaatgccatctaggatggttttaagaacaggggggtggggtaacttgtgctactccctaggagggtgggggtcttagtgcttctcggtttcctgagggtccccacatctcctaggatggcacattacagctcgtagcttcctcctcctccttcttcttcctctggaaaccggcagctacaagcatcttcctcttgagcagttctaaccgccttcttaaatggttgcttgaatatgtgggggaacttcttcctgagccatttgggcacagagaaccagagaatgatgaagatcaggaacaggagcagcgctaatgtcagcgccaggaacaaggtaagaacctgcaaggggcgctctcctgattctctctctggagtagtcacagcactaggagtggtactgggagagaggctgaccacagggggtccacagaccacgtctttctccttggtcccattcttaagcacagaccttccgtctagagagcagttcgtccagggtcggcagacgccggcgccgtcctggtcattaaacgttcccaagccacagtttttacaaccctgctccgttagttcctggccgggcctgcagtccttctcacacctggtacactttggccccaagcagtggaatcccttcacgcacttacact

SEQ ID NO: 2717 - DNA, 675 bp, Rattus norvegicus
  Genbank Accession No. AI236097
ttaatggcttgttttatttttttaaaaagctgatttttataactgcatgtagagaactagactttataaaatagtttcattctttatgcacgtggattaccttaaaatatggagaaccaaatcatttctttggtttttatctcatgggaaaaacgacgcacagtctcatcacatggctttgtgatatttatattccattgcacagatatgggctgtacaaattagtaacatgagttgtttcttaaattccaaacagttgtctaaaatcttattacagcagaggcctaggatattaaaacatcaaggctgaaatcctctaaagtagttaacacaacaatgagaaggtgaccgcaaatgctaacaggctaggcagcagggctatcggcatctacaggcaagtcaccgcggtcctcttagcgatgcaaaggtctattctttaggtacccttccctcatggaagtgcagaagtaacacaaaaatccagattagtgatgtcaagacagttatattcttcctagtatgtaaactctatggaaaagcaaatcttatctaggaacccatacatctgctaactcaaatgccaaagacaccacacttagaaaaaaggaaggttttggtttcttttttttaagataatggtttttaattgaattattgagatgaagagacagtgaa

SEQ ID NO: 2718 - DNA, 548 bp, Rattus norvegicus
  Genbank Accession No. AI236106
tttgaaacaaccacactctgctttattgggtgttccgtggtcatataacacagacttcttaaggaataataaacacgagacttgtattttaccataattatcttgccattaagacagtggttacaaaatataaaacaaaaatttgaaaaagaaaaaagaaagaagtacctttctggctacacacatgatcagctttagcactgaaaggtccccccttgtgggtcacaatcacaggttcaagggttaaaaccatctagcagtaaattctacaatgatgtagagcatcaagtcactgcagtcactcagttctgagacgctgttgccttaggttagcatttacacatgacattcatttcacagacacagaaagcaaaccaacaggtaaacatgcttacacggactgcggaaatcttccggtttaaaactgttgtgtttgtcttgtttctttttttttaagaaaatgctcgaaaacaaccaagaggcccgcggccccgtacaagaaacatcgggagtgaatactgaagagctgcaagtttctccctcgtgcc

SEQ ID NO: 2719 - DNA, 675 bp, Rattus norvegicus
  Genbank Accession No. AI236120
gtactgttatcttgaacctttattttttgaaaaacaggtatttcatacaatctttagcatgttaatgtaaagtaggcaggtgttttgtttttcaaaagatgcattatggacattttcaggaagctggtgttatttactcaacttttaatcttaaatacaagcacaaaattatatccatcagaaggcattacaacttaaaaaaaagccactgtttgtacaatgttactaagacaaggaagattcagttcaactcaacttgttcttaaataagggtttaaaaaaagaacacgatgtcattgccacctgacattccaggtggaaacttaagggacttgtaaattggaaaaaataacacagaaatctgaaacaggagctaaaacacactgtcagaaaaagggaaaaccaccactgctaatcagcctgttttagaaaaataaaatgtttcaggactatatccaattctttaccatcttcaaatatccagctgatttgaggttttaacattagcactagaacttcccagtgagccccaattctcaagttttctctacatggctgccttgtcaaacccaagctgtttgctttttgtaaataaacagtgatgttatctaggcccaaaagcaggcgaagtacagtaactgcctcctcttaaatctttgcaaagcactgtgatgc

SEQ ID NO: 2720 - DNA, 612 bp, Rattus norvegicus
  Genbank Accession No. AI236146
atttaaatcagttttatttaagaatttccaagagtgacaactcttataaaaagcatccaagcacaggacacagaactgcagcaaacagcattcttatgaatagctaacagacatgagaacttccacccttctttgagacacctgagctcactggtgaactctgcttccaagttctcctgcaaagcacaccacaagctcagtccatgttcgcagcccatcagcttcagttcacgttcccacacttccagatcagtaacagaggagaacacacaccatacagcattcacagcagttgacagaggggagggaagtacaagtatttcacttaacacattcagctactgtgggtttcctaagaacaaaactcaaagtcttccaacagacgtggatgtcctctgatgcagaaacactcgtacgttagttatctgctatcattgctctctgcacactctcgcaccaaagccacaggattgagggacacatctctccaagttaaaaaatatccattttccaccaccaagtctttgcacgcgctctctccttttctcgctcatactagcctttcatgcctcggcaccaccatcaatcccacacaaggtttcaaaagttcaa

SEQ ID NO: 2721 - DNA, 447 bp, Rattus norvegicus
  Genbank Accession No. AI236152
gaaaaggaaacatacaaaaatcatgtacaaaaaaaattaaccaaacatgtacagaaaattcattccagtatatctacagcagtgcatgtacagtattttacaggctgggccgtccctccccgctcccagactcctccctcttctgagacttcccccctccctgactccccatcttcctccccagcgctttgccctggggactaaggctggggtggcttccgccaatatctcccaccccccaaatgaatgccagtggtcacacgtgctctctctaaacctatgcaatgggatggatggggactgggggagtggtcccggccagagcacaggattcacagtctggacccctcctggacacccccagatgaaggtgaggcaggcattgctcaccgtccgccggcggctcagggaagatggctgggcactgggttgaaaaggctttcacat

SEQ ID NO: 2722 - DNA, 337 bp, Rattus norvegicus
  Genbank Accession No. AI236188
acaggaatttgctaaaaattttattgcatttactgagaatatcacgttaccccacagtaaaaatgactatattctccaaagtacaaaccactcttcattaaaaaggtcttggttatctatattaaatatataaatcacatttaaaaaatcaattataaattatattattttaaaagaaaacaggatttctcaaaactaggaaaatacctacgttggtcaaacccggcatgaccttttcacacagtcagctatatacagttatggggtaagctggcaccttctgtgggagagaaggggaaggggagaaggggaaggggaaggggagtgcgggaggggg

SEQ ID NO: 2723 - DNA, 535 bp, Rattus norvegicus
  Genbank Accession No. AI236223
gccaattaaactagttttattcaaagtaagtctacattaaattacaatattaacaatctgtagacacaatgaacttaaaatataagaagtagaaatagaaatctatttggtctttcagagaccacatcatagaactcataaatgaaaatttacaaatatagaaatgatacttaaagagtaagggtttcaatatggggacccaaaaagatgtcatatcttaaacatgcatgtttcaaaaagggagaatcctttaataatttagcataaaattgagttatataaacttggtatattccagaaaatattgctttaaacacttatacatgatcaaaattcctttggtagcttttaatcaaaatgaaacatgctactttgtaaaatataaagtacttttaaatgttgcaaaagtgtctgtcatcatcaccatgccaacagcactatggagccttgttctctctgctcaacctcacgtgcacacacagtatgtcaccaggaaccaacaagtcctttgccttttgacaaacatatcgaaact

SEQ ID NO: 2724 - DNA, 503 bp, Rattus norvegicus
  Genbank Accession No. AI236227
gcaaatgcctttatttggactactatgttgctaccagattacatcacttttcagagttagagtaacataatgatcttgaaaactatagcaaatagcttgacagagcaagaggacatcaagtccgacatactttctcatttttgtgaccacatctccttgttacaggtgtgaaacttaaacatctattgtacactttagcattctttgcttatcaaattcccatctaaattctgagcccactctcccctcaaagtgtcatattcaacagcattgtagaccaaaaagagttttgtgataaagatttccaaacaaagaagtatgtatcagactgacttattgaagacaaaatatttcattccatttgagcctgggtatgagggggaaatgcaaccttcgggtccactttcctccacctataatttatgcctttggatgttttacttacatgaagaccccttttaaaaaagtagcaaatcagcagacgtgttggatgtaatcaaaat

SEQ ID NO: 2725 - DNA, 117 bp, Rattus norvegicus
  Genbank Accession No. AI236243
gaccacttttcaaaatattttagaggccctatttttaatccaatgggtttaaaaccgagatttgagcccccaatttcaaaacattggccctaaaataaaccggggcggtttgatgtg

SEQ ID NO: 2726 - DNA, 508 bp, Rattus norvegicus
  Genbank Accession No. AI236262
gggatttaaacccaatgcactttaccactgagctgtaatcctaagcctttattatctcagtgctgtttcctcctagaacaaagctaagcactctcccaataacatttagtcaagtcttctgacaattttactgacatttcttctaataacccctatgatctgctcccatcacccttccctgtgcttgtgataagctggtaattttgtttacagttgagtaaaaagcaattctaaattacagtaaatttgctggctctgcgacatagtctggcctctgctgaagaaagaaaagggaggtggaggcatgaaggactattggtaaaggtcaggcactaccagaagcccagcttatgtgtcaaaagcaggctttgggactcatgtccggcagatgaatcttcaaggcttggagaagaggaaggctacttcacaaataccacagagtttggatttctagaggccacccaggccaagaatacatccctgcagtgcttcaccacaccctcgtgcc

SEQ ID NO: 2727 - DNA, 504 bp, Rattus norvegicus
  Genbank Accession No. AI236280
catgtgatgcaaaatatctacagtaaaataaaattcaatttctcagatagcaatgacgtacctgatacacacctgaaatgatcatcaactcaggagcgacaaagcagcctgacacttgcaatgcactatcagcaaatatttgacaatcttaccttcgtgtttctttcattacaaagctggaacatgtaacattatcgaacatctgtcttgtcattatcgctttgttaaaaaatctacttttggtcacatttttaacttcaacaatcccattcaaaccacctatagttgttaaaatccaatgtgaaggacaactatgaatttactgatgtattcactctccttcccaccattaagaacagctgcctttctgactctgaccttatgtgctctaaacagcctaggttgagtgatgtgcgcgcccaatgttcacaccccccttacagcataacctgatgtcttggagagaaaccaatgcctttgagacaacattcaggtgttgctcca

SEQ ID NO: 2728 - DNA, 499 bp, Rattus norvegicus
  Genbank Accession No. AI236302
ggggcagaagcaaagttctggtttattgtccctgtcccagtgacagatgtggatttgcaggtgttggaactctctttattgacaccaactcacagcttcctactataaaactccagaatgttcagcaagcagcagcttcatgtcctttgatgaggacaaagccatgatttgtgtgggtggctaagtctgggaaaggaaccggcagacagatggctttcctcgggtaacacgctactttaactcccccggtaggtggtgtaggaccatgggctcagcagcagaggtacgtggaacttctgggtctcctttgtaatagtgaaaacaacctctacatatgggtaaaagctctcttgaccccgctctttccagtagcgctccgtgtcgaaggacagcttataggtgcctggcttcatctggctttgtgtcaggagcccaggacagcgaccatccaggtttgtgtagcttgttctcagctccatccactgctgactgggggcct

SEQ ID NO: 2729 - DNA, 522 bp, Rattus norvegicus
  Genbank Accession No. AI236307
aatacaaaacatcctaacagaataacttttaatataattaagtttacaaataaattttgttactatcgaataaataacattcacttgactcttaattggattattctctattagaacacagttattttcttcagtttattttaaactgccttatgatttcaaagaaacatcagcttttgcttactaaataattttttcagttggaaagtttcctgtgccaaaatacttgcaaattaatgcatttttctaagccttctacttagtcccttaatgacatcaactttttttaaaatatgcaactccaagatctttcatatacacaacaggagttggtttcaaatgacaggaaccatggaagacaggaaccatcagtgcacttagaaaactgatcaagcttcaactgtacttttaaagattctatcttctccaagctgtggaaatgttagagctcttcagtttccttcagcagaccccttgatccccagttagagacagatgcaggcaagttagtagtcctctttc

SEQ ID NO: 2730 - DNA, 552 bp, Rattus norvegicus
  Genbank Accession No. AI236338
  misc_feature (1)..(552): n = a or c or g or t
cgccttagcatttacttctatcccatattcttggaactgtcttcaccagagctcaacgggagatggcaaagatgctggctctccctccaagaacagctgtggagctgcctgggaagattcacacgtcaagaaatcgggaagatgcggcaagggtgggcagccgcctgtagtcagccagcatctcttagaacgggctgggttgcagcccaagtctctcacagaggtgtaggcagtgcctgcacctcctccaggcacttgtcataggcctcctgatagtcttcatggggcttcaccatgatcacacaagtgggacgttcgatcctgtagctgcacccaagtccgtcttagagggaatatagacgtagggcaagttctggtcctcgcacataactggaagatggcagtacacctcaatcggcaacgtatctcctgccaagaccatgatccctttctcgcccttgttgacaaatttctgaacttccttcaccccgcgacgaatctgcttctgctttacggccttcttgatgcatttgtnaagcttgcgcgtcaggc

SEQ ID NO: 2731 - DNA, 278 bp, Rattus norvegicus
  Genbank Accession No. AI236360
cctactcaggctttattcaaagaccaaaaggtttaggtgcaagggagggaaaaagggcctggtcaaaaggcaagcccggctggaggcggcttaacggttcttggaggtcagcacattgctcacagaggcaaggaatttgtccaaaaaggcgtgcctggcgggtgtgaaatctccagggtgggggcaagccaaggtcaccaccaggcagtggctcaggaacttgaagttgacaggatccacacccagtttgtgggcatgcaagtcgctcaaagtggaca

SEQ ID NO: 2732 - DNA, 403 bp, Rattus norvegicus
  Genbank Accession No. AI236460
agagtagaggaaaatctatattcattaaactaaaaattattgtctattcaagttactcctgtggctactcggggcacatattttactgagagaagaatagtcaggcttctatggaagtctgtcccaggggtgagtctgtcctgagtaggatatgaaggaatcgtgtattagtgggtctgcagggaaggtattgtcacttagtgagggcaggaaatgggtggtcacttagtaaatctacagggaattgaagagaatttactggatctgcaaggagggatggtaacttcctgattctgcaggataggtatggtcaattaatgagtctgcagaaagggatgatcacttactgtgtctgcaggaagggatgcttacctctgagtgtgcagaaaggaatggtcactta

SEQ ID NO: 2733 - DNA, 321 bp, Rattus norvegicus
  Genbank Accession No. AI236473
atgctacgttcaaaagtatttttttttgagaatacaaaaagtaatccttggaaatgagaatatataacagaaaagagcacaataacttaagtgttaaacatctgtatgaaataacttgcaaagtttgacaactatgcacacatagaacatgcgggtgtttaaaaaacagaacaaacaaaaacaccacccgattctgtagaaccagcatcatttcaccagcgggagagcaccaagcaaggcaccattggaaagacaacacacttggaaagtctctataaataaagcaaatgctaatctggtcgaaaaatcggtgtctttggt

SEQ ID NO: 2734 - DNA, 490 bp, Rattus norvegicus
  Genbank Accession No. AI236484
caaaccagtgatttttattcctttgctctgaaaagctgtgtgtggggaacgtaaccaaggaaagttgactagaccaatggggctttgagaccttaaatcttaaaagcagaaacaaaccaggttcccaccacagtctgctcagacacagcaaacttggtggttctatattaaaaggctgttaaatagggagatggcattcatctaccgcccttgggaagtagagggcagtataaacacttcataccccaaactattggcagcagtttcaatgttatcaaggtaaatgtggaatggagatgttcttaaacatggttaggacttaagtctaccacactaaaatcatgattacattttgaaagaaaatgcacaaaaaccaaacagcaaatattgagatctttttcatttgaatgtaatcttaatgctattaaatacacaaatatgctattttttattacccaatcctaattatctaaaacacacatttgcaaac

SEQ ID NO: 2735 - DNA, 440 bp, Rattus norvegicus
  Genbank Accession No. AI236565
  misc_feature (1)..(440): n = a or c or g or t
gacgtcagaaattaaggtttaattggtccgggttaagttctgggctttggaattttgaaaaatttccacgtgactcgaaggagcagacaagcttgggttccactacgttctgaggcttgtgtcaggatgcagagggcaaaactggaatgtgaagaacaggccaccttaagtcatgtcgggttaatatttgggacgtttaagcagcgcttcctgtttccctaagacacgaaccaggagaccagcgctagttacaacaaagcctggaagctagacgcgttcgttcgggcctgtgtgggccccgccccgccgcgccccgcgctccccagcaggttcatctgctcctttcctgactgcagcgctagttacaacaaagccttggaagctagacgcgcacctctgcaagcacacgggnggaggtaacctggcccgccgggtgtgca

SEQ ID NO: 2736 - DNA, 439 bp, Rattus norvegicus
  Genbank Accession No. AI236566
caactcccacattttattgggacaaagagggaaagaggcagaccattggcacaggcttacccaccaggggtgtccaggcttccatccagtacttaacacagcaggagcacatcttaaatacagcagcaagggctagagacagaccacagtgaggagaccgcaggtcctgagggttggggcaaaggcatgtgtactatactggcacagtccacttgggtgaaggtagaggtgggatagatactgatttgcagataggaaggacagtgttctcttgtgcagatggagaaagaggaatcctgtggacaggaagtcctttttacatatttgcaagagcagatttcacctcaaaggtgggtgttgagggaagaaggaaagtttattttaactgtccacagaaatagatatgggaaagaaatgtggggtttgcagaaaggaaaaa

SEQ ID NO: 2737 - DNA, 526 bp, Rattus norvegicus
  Genbank Accession No. AI236590
tttttttattttttcacaaaatagaatactttttattataaatttcacatacagaagtacaaaccacaaataggagcctctcgattgacatcctcagaaaacctaaaatacaggtacaggagacactttcccaagggtgctttcaaatgctcaacatcaatcattgaaatgccccacgagctcgtgcaaagaggcctccattcctcctccagacactgaggggagacccattttctttatgactcaggaccctggggtgtgtgccctgagagggaccatgacattgtctctgtgttaaagaacttgagaggaatttgcaaaccgcactgctggggagaaaacaactgatcctgcagctgggttgtggggtgaagccaaactgcttctcctttttttttttaaatcttcagtttgctaaaggcccaaatgctatcacattaggggcctttctagactttgctttcaatgattggagaaaagagaggagaaattaacaatgccatcatcttttgtgggggtgggggag

SEQ ID NO: 2738 - DNA, 625 bp, Rattus norvegicus
  Genbank Accession No. AI236601
agaaatgacaccacagggtggactttattttaaagctcacaaggtgttcacaatgatcacatgatccacacgtctcccgtgtcacacctccacgggacagtgcatgtatggtgatagttacagccctgcttcgcatgctgctacggttcactagctgttgtattcttggtaataataaagcaaatcactctactggacagacttaatttggaaagcccttatgcagatcagactcagtctcatatgaacaaccccggccacacatgcggaaatgaagagcaaatgcagaagaacacagaaaaccccttggcaagaacagctgctgcagactgagcccagcgctgtcagtgcagttcacgtcctcagaagacaaacgacctccctcctcagcatatgagcagcaatactgtacagagctcagtggggtcccaactccacaggagcctgtcaccaaagtcactctcatttagggtcagagactacagactcaagctttttcttttttccctcataatacacaaaatgtctagacagtctttaaaaaaaaaaaaaaaggaagaaagaaaatataaatagactcagtctgtcatacagaatcacatacaatggcaaacacatttcatga

SEQ ID NO: 2739 - DNA, 598 bp, Rattus norvegicus
  Genbank Accession No. AI236608
gtaaaaatgtttattcacaatccttgaaaggttaccattccttcagaaaattctttatgaacaaaaagccaagaaaattacaacagtagcttatgccaaaccaaaaatatacatctgatgtaatataaaccttagaaagcatgaacacaggcaatgtgaacagagtgcctttaaattatttccatgacacacctacaatttaaatcttaagatagatataaataatagcataacctaatgcatatttacatatcaaagtatatttatttgtatgagatttaaaaatgacaaaattatagatgtcatcgtatagcagttcaaatattgaaagggccacataagttttcacgcacagcaagaacttgactatttctacctgaccgccctgtactgctgaaagcatgcaccatcgctgctgaggagaggaaaacagcaagggagacagaatgccgtgtgcttcccaaagtgacactcagtcctcagccaaagcaaggaacgcagttaggaaacacttcccagccctggccttctctacagattcagacatgggtctttaatacgccgccattttagttccatcccacacagcgccttgcac

SEQ ID NO: 2740 - DNA, 587 bp, Rattus norvegicus
  Genbank Accession No. AI236611
tcaataaatacttgctacatagtcatatccccaatgataaatcaactgttctgagttaccaagaaatcagatttataaaatttttgtaagaaaaaaattattatgcaccatttaagaataaagctgtctgaagagctcaaattttacacacctgtggaaagttttaaagattagtgaaaacacatatcagtatatgcctattctataacatcaaatcttagcatgtgcctattccgaacatcgctcattgccactccctcccacttccacctctaaattaagccctgattatggtgcagtgagcccattatgggacccttggcatcacccagtaaaattctggttgttgctgggcatgtggtacacatctttaatcccagcacttaacagatagatgggtctctaagttctgaggctagcctgatctacagactgcgttctagaatatccagggctacacagggaaagaaaccctgtctcaaaacacccctcccacttccctagtttttcttgtatttggctgtcttaacaaaggggtgtaaatgctactaatcattcaacacaggccagacccaaagacaagccag

SEQ ID NO: 2741 - DNA, 458 bp, Rattus norvegicus
  Genbank Accession No. AI236635
acccatagttcggttttattcggagtaatggggggaaaaaggaaacttctgctcatagaagaaactcagccacaggtctgatctgtactggaactacacatgcagtgaggacaaggctgtgtttgtctactgatctctaatattaacaattataaacagagcagtgcaactagcatttggaacaacccttctagtgttacagtgacaggcacagttcacttctcttcacaccactggttctctttgcgtacctgggcctcctcctcttcagtaaagtcatttttgatattgaaggttttacgaatctcctcaggcgttttccccttaatcatattagccacagtcttgcaggtgacatcaagcaaacctttgatgtctaagtagtttgcagccagaataagttcaaaaagtgttccttggtcaactttcaggaattcttggtcccaaacagggaatat

SEQ ID NO: 2742 - DNA, 530 bp, Rattus norvegicus
  Genbank Accession No. AI236683
aatcagaaagtgaatttattttgaataaaccactcaactttgtgagatgacattacctcaacttttctttgaagaaagacaaggatctggtcagttcatgaaaacactgtctttctctaccctttgcagggcaaaaacaccaaactaaaccaaaccaaaccctcgcctcctgcctgacctctcagatgttctgatgttaacgaaggacaagcaccgagggtgcagaacaaaggtctccacaggtgaggtgccagctacaggttggcagagcctcctgcagggccaaaggtcagggtcacagctgagcagtgggaggacggcagctgtgcagttcagaaagtacccaaggggaagttaggctgcagagctgaaactctggtcctatgtcatggcagtgccaccaaaaggactggatggaaaggtctggttaccagcatcacacaccaccctgggcctgcagcaggtacactcctggctcacaatcagctcccattggtattctgggttcattcaccataccccaaaacact

SEQ ID NO: 2743 - DNA, 430 bp, Rattus norvegicus
  Genbank Accession No. AI236707
acggtctctaaaaatatatatttagagagatagttttatacagttttctgaaaataattgtttggaaagaaacaaaatacaacgccgtttgggcatcacaaaggaagctgctcacagaggggtatttacttcgtggtcccaaacacggattccaaaggtgaagtatttggcaaaggggctgcagaatcagaagtaggttagctcatcgtgcttttctttgtcggtctggtaagaggacaaggtcaaaggcttgttctcatgagggaggggttcaaacaccctcaagtgcacacatttttcttctgcgtctcggtcgtggccggcattgtggcggatggcgcgccacacatcatcttggcaagcactggttagaatatcacagagaagctacggagagagccaactaggagacctgggtgtccctcgtgcc

SEQ ID NO: 2744 - DNA, 519 bp, Rattus norvegicus
  Genbank Accession No. AI236746
ccatgatgaattgccaccagtgcaacatcttatttactatacatttcaaaaaaattcacatactaaacaaaatttcagttgataaatggaattggatgattgaaaatctttatgaatttcataatacaatatgtggctagctgaaattgtctatcacatagcatttaagatataaaaggcctcatgctagtttgttaaacgcaaaggctaccagacaagcacagagctggatatatccatgaggcttccagatgacgcacaggaagagtggcatccatagtgcaagacgagggggacggagctgtacaagtgacacttgactcagagtggattagtcttcatgcctggactgaaccccacagctcctgtaatttagactttaaacaaagtaaaaagcaaaacccttttctgtatgaaaaagaataaactcaattttacctttggcaaataatatccccccaatgtatatgcaactcaaagaactcagaggctctctagacaagcttctgatcaacacag

SEQ ID NO: 2745 - DNA, 165 bp, Rattus norvegicus
  Genbank Accession No. AI236748
aaacattcactcccacaaaaggggagtggacagatttattgaattcaaactgggaaaggaccccctggatggctggactttgggcccacccccaggcccctttgcccaggatgggggcctgcaaaggatgaggcacaaaggcctgcagctacccaaattggaggg

SEQ ID NO: 2746 - DNA, 652 bp, Rattus norvegicus
  Genbank Accession No. AI236753
cactacaagtcattttaattctaacacttatgtcaacatttacagcataaatcactcatgttataaaagaatcattccttcatctagaatgtgattgaaattagatattggtaaacaggcaatgtaaatacctcagtgtttgcctctgatagtttgcaatgaccaagacatgatactatagcctcatcaagtgcaactttgtacatgtctgatgcatatatgttgtgtacatgttgtggactgagaggacatcttcaggcactggtcctcacctcctaacttgagataatcttgtttgctgttgaatgcatcaagctagctggcccatggtcaaattttcttcctgtactaaaatgtacggcagcaatgggataaatcttaggttaacagtatattcagatgcactgtgtatagcaataaaaagctccagtgatgttctctttctaaagacacactgtccttctggggaggtgggatctgactctaatctggcaccatgtctagctcattttacaaaattaacctttacaaagatctacatcagcatctagaagagtcaccaatcaatgatcaagaaaactgttatttgcttttctttctttttgactgggtaatttccttaagctacattattatgggctaactggaaaac

SEQ ID NO: 2747 - DNA, 420 bp, Rattus norvegicus
  Genbank Accession No. AI236761
gctgtctagcatgatctgcatggcctgtaatctttgaaccactttcgtacctcatgtttttatccagcactcttattgtactgtgtactagtctgtgaacaatgtcaaataaaaaagagcgaacaggtcgtatggtggagctgagctagtgtacaatgcaccagttgtacagaaacaaaaatgaagtgagccatcttttgttcatttaaaatggtgttttgaatttcatatgcagaaaacgttttgttacattgcagattttaatgtatttaataaatgcaacatgcagattaagtgcagtgtatactgagtatttaaattaaaatgtacatttcataaatacagtttcaagagaaagcatcattttgtgtatactaacacattaagtgtatgtcagaaattgatgtacaaatatatatt

SEQ ID NO: 2748 - DNA, 655 bp, Rattus norvegicus
  Genbank Accession No. AI236772
gaaagtgaaagaggctttattttcaatatcatataagtcattccatttaatatttatagtgcatagttatgtatgaaagcatacacggaaaacattaaaaaatacccaaggatgcgcgtgcacaggcaaagaagacagcctttgtgtctatagcaagctcagaggtagcacaagagagtatccatctggtaacattggaaatcatgcaaacaactgagtcaaggcatggcattaaggtgacatcagcatgagttataattccctgggtacaaaacctatatattctttgggtttcaaaaaaattaaatgaatggcctacttttatcttctggacaaaaaaacaaaaaaaaaaaaatctctaagagcaaagtgcacatattgtcctaaccacatacatataaaatattcaaggccacagatggaggtcgctagatgacaaaagaggatactgagaggtaaagtaaccagagagagatgcaggagggaaaggcccctctgcctccatgggggatgcaaaggcttaggcactggaacacccaacgtggaccacactgcctgccacaaggaactcctcactgagctgacgtcaccatcatcaaaccgctcgacaggcggttgtaacttcctttacatttcccatgggggacaagcatgg

SEQ ID NO: 2749 - DNA, 571 bp, Rattus norvegicus
  Genbank Accession No. AI236773
gacactggctttaattcagtacattaccaagttaggcccacggaaataaccatcatggctgaaaggctgtatgagaacagacacggaaatggacgagcacacggttacggagcctggtttaatacgtgtttatatacacacattcacatccttacatacacgcaccaggaactcaggttcttctcattaatttagtttcattaattcccttctgggtgctgagatttttttttaaagcaattacagtatccaaagaacaaaatgactataccatttgggttacagatgacaacaggtgcatttggtgaactttgatttatcttctgaaaagtggctttgtttgttgagacgggcaggattcagctatgcataccaagtctcagagacagcctggggaagcacaaggttcagacaatccaaataacactcctgtgaggtgtcctcaaaacacatctgaggataccctgttctcaaagtattttcttccgagagccacaaaggccagagttactatgtaaatgtctatagttaacgaaagtgaccgtttcattttttagagcaacaattgttt

SEQ ID NO: 2750 - DNA, 504 bp, Rattus norvegicus
  Genbank Accession No. AI236777
  misc_feature (1)..(504): n = a or c or g or t
gacagagaagactcacccactggctcctagtctttgtcccatactaagtccttccctatcctggggcatctcccacgactacccagcctctattacctgattctactccctagacggctctattcctagctaattggagccccaaacccagccctcagcagtgggggcgtgtgctgagcaccaggcagagggagctgaggccagctccaaccttctccagttccgagcaggacacaggtaccagggtgacgtcagagagcttttgcagagcctcctggctgttgggcaggtccccacctccgcggtgcagaaggaaaggtgtggtaccaggcaacccaggacgcagaaagagacagtcactcgctgcgtcatctgggagggtcagagaggcgtaggggtgatcagtcagtgctgccattgccctgacggctttttgggcagcctcactgcttccagccaccaccgtgcgaggtcctcccatgccacagaggccgncctcgtgcc

SEQ ID NO: 2751 - DNA, 642 bp, Rattus norvegicus
  Genbank Accession No. AI236778
ggagaaagatcactttaatttctttgaaaatggaattatataactaaatatacatttctaaaattaaaaacaaaagccagtgtaatactattaacactttgttaatccagtaatgctaatgaactaagttaattcaaagaaaacagaattttattaattagtacattctttcaaaaacaatgtgttatggcccaagaactagtgcacatttagctgacgtttcaggactctgctgtactaatcatacatacccaaatactgaacatctcgacattacatttctgccttagccatttaagtctaaaatatgcaaaacctcaataaaggggttctaactggctagcagataaaagcgatgatgatggccttcacagttcagcaaaaaacgactcctataatgactatcagggacatgaagctttttagaggccgttagatccaaggtagttaaaacttgacaatttttgtctataaaccatttgcacatatacaggttaaatccctgataaagatctgaaatgcttgggactagaagggtttggatttcagaatacatcagattttagaatttttatgtagcactcatcagctgaatatccctaattttgaaaatcagaaatctatccttttttaagatttatt

SEQ ID NO: 2752 - DNA, 348 bp, Rattus norvegicus
  Genbank Accession No. AI236794
aaccatttggctagaaattttatttcagaaataagcattcagggtactttaaagggattaaaagttatttatggattactggaataaatacttctcaaaaatagttactctgtaaatacacatacaaacttcagtgaaaaactccttgccacaaacaagtgatctggatcaaaatctgatgtcacagggaagctgaacgggggcatattccctgctgggtgttaaaagccattggttctttgggatggaattcttcacaagtggaaaggccttggggatgaaagtgggctggaaaaccctggaaggtagtgtccggagacacacaagcctttttcagttcctcgtgcc

SEQ ID NO: 2753 - DNA, 428 bp, Rattus norvegicus
  Genbank Accession No. AI236795
attttgcatacttttaatttcagaacaaaataaaacaaacaaaaaaacacaatacacaacacccaaccctgctattctgtgggaggggatcttcctgccttaaggcacaaggacaggatagaagagattcttgtagacatgagcagagagccaggtgggtcagggccagtcaaggctgttgggggagccacagggatactatacagagggcgggggcttcccaggagcctttaatccacttcttccatgcgagaggcatcctctcctctaagtactctgtctggtcttctttgaggtgaaggatcactttggtaccccggccaatgggctcaccgtggtctgcacggacagtgaaggatccaccagcagaagactcccaggcatactgctcatcatcgatgtgcttcgtgagtgtttcttcaccacct

SEQ ID NO: 2754 - DNA, 448 bp, Rattus norvegicus
  Genbank Accession No. AI236818
gacacaaaggaaaaaggactggatcggtttagcctttgagtccaagactctgcccatctttctcccatcaggttagcaccaagtgcaggttttcgaagccttcaaccctagcaggctttcctcttatgcaacctttcattttagagaaaattttttaagatgaaagacctgaccctggtggcttgggaggagagaagggtggctgtcaggattatgttcctggagccaccccttcctgaggagcaggcaaagctgaggcaggagaatgcaggctctcacccaggttcatgcccctgcagagctgccatgacagagagaatggggatgtacagggatagggagatgagacaggacattacaaagaaagggcacacttgggaaagtgaaggactaaggagcttgcccttgctgaacctagtgatgtgggtgggaggatgggtgtgtgggg

SEQ ID NO: 2755 - DNA, 527 bp, Rattus norvegicus
  Genbank Accession No. AI236834
aggaagcaaagatctttattttttttttaaaaatttatttattaaaaacagcaatttctagctaaataatataaagcatttaaattaattatttcaaagtatgtacactctgtataagtaaacccgtgagactgtacagatttaaacaaatattcactcagcagacaaagtgggtcagtaccgccctcccagcacttggtaaggtgtgtgagtgttttcagaaacaaaaaatcaaagcacaagagcccgaacaagtcctgctgtgagcgtgagactgctgagccacagtgtgtgccacggttgcgtcctcatttctttggaaaggctatctgaaccccaatgcacatatgatacacagaactggatatcacagtttatcaataagacatgtatttaaaatagtacaatcttccaaactcattcacttcatagcaaagaaaaatatggcccctcttacctttgagtttcccaaaatatagagtaatatgctctaccaagcaacagccaccaccaacttaagctgggct

SEQ ID NO: 2756 - DNA, 481 bp, Rattus norvegicus
  Genbank Accession No. AI236863
agagtagaggaaaatctatattcattaaactaaaaattattgtctattcaagttactcctgtggctactcggtgcacatattttactgagagaagaatagtcaggcttctatggaagtctgtcccaggggtgagtctgtcctgagcccagggttctctgtctcttccacagaggctttcactaatcagcctacccttgagattcattgacctagcagcacacacatccaggggtcagaggccagggcaagttccagacccttgctcttttgcagaaatgttgtccacaaaaggaaagaccaaagttgaaaaagacactctctacatgctgatggaggagtgtggcagtgagagagggaggggacatgagagtggcaattgacaaggacagtcagacagtcagtcagaagggctcagttgacatggtcacttcctgagtaggatatgaaggaatcgtgtattagtgggtctgcagggaaggt

SEQ ID NO: 2757 - DNA, 390 bp, Rattus norvegicus
  Genbank Accession No. AI236907
  misc_feature (1)..(390): n = a or c or g or t
cggctgcctgggcggccaccgcggcctggttggcttggtgctgcgcagctttgattttggcctgcaagtgtgcaggagggtgaaaatatttgcatttctccctcatgcaacgcccctttatgtaatccatacaaacggttacggtgttgtcgtttgtgtcgatcatggtgctgtctgccgggtgtgcaaagcggcagtctgtctctccccgggcacagtttcctcgctggaactccctgcatacctgagacaacaggaaagagcagagagctgcagaagaaagcctgtggccaccgcaccaacgagggggaggtgggcagaggaccaggagaggcaggagggggagagaaggaggaggagggagaggangatcangangacnggggggca

SEQ ID NO: 2758 - DNA, 443 bp, Rattus norvegicus
  Genbank Accession No. AI236936
gtcgtaaagaaaaattttaaaacctcaatttaacaaggggaaggggccaaagagcagacaagtttttttctgtgtttcactagagagaatggaaggacacagggagcctttttatgctaatggtctggagcagctgaatcttccggaagctccctgggggacacggatggctctttaatttcgtcaacttttgctttcctcaaaggaaaatctaatatatttctttctgtctctagggtatcaataaggtataagggtttaccttaaaaatcatcctcatgccaagtggggaaggaggaaatctgaagatattctaagcagttggtttggggcaccaaaatttgagattttaattaagaaagccagaaaggctcaaagaataggtcttcaaatagctctggagaaggctacgaaagcagggagagtaacaatcaccgcactct

SEQ ID NO: 2759 - DNA, 446 bp, Rattus norvegicus
  Genbank Accession No. AI236947
taaatattcacatatactgacttctgtagagcggcctaagaacagatgtttccctttaagaagtttcaaagaagcagctgaggaactgagctccgacttcatcatatgcgaagaggctgctaaaccgttttgatttctgccatttctaaatctgttaagatacaaaaaaattcactttcgacttcaggagaaaaccattttggttctttacatgttagctgaagggcctacacataagaaagcaaagctgccgtcttagggatggacatgacagttccatagaaagaaaaccaaggagctatttctcaagtctttccataatggagccacagtgactcagggactcagcactctagagcttagcccaggactctggctctacaagcactagcatgccgaagacaccagcagcgaacaatctgcccaggctctaaacctgaaaaaac

SEQ ID NO: 2760 - DNA, 382 bp, Rattus norvegicus
  Genbank Accession No. AI236972
caagttaatgattttccttttatttagaggtcaagccatggtctctttgcagcagatagagacactgagcatgagttttggtccatttattatttccacctgtccacctgtccatctgtccccagcccgaaatctcacagacacttttacttcaagctaccttgggccggcgtctcaggaaacagcgctgatacatgggacggaatgtttcagagcacatgacaccgctgtgaaatgacactagactcagtcaaggctctgtggaagccaacagcagcaaacttgctagaacagtaagccagcaggaagggaacgacggtgtgccctgctgccgacgccacggtgacaacatgaccatgattattcttcatcatggctggga

SEQ ID NO: 2761 - DNA, 469 bp, Rattus norvegicus
  Genbank Accession No. AI237002
taaatacacgtgtttttttgttgggtcacagggcataggtggtgctgtacagagctggtataggcgtggggtggtgttacagtggcactggattcagcttatgtcattcagggcctgtgtcagctgctgcacgggctcccggaagttggtgctcgggtttttgctacacagcatgaagccgatctggccactgggataggtgggaatggtacagtaggcatagctcaccacagggaagagagacttgcagaaatgcctcatctccttgatgaggtccaggtgcagccactggcactcgccctggcaacagaggatgccatcttctttgagggctgtcttcatgagctggtaataggactccttgaagaggctctcagcagggcccatggggtctgaggagtcggtgatgatgacatcaaaggcatcttggttctgcttcatgaactcaaagccatcgcccacgtggaga

SEQ ID NO: 2762 - DNA, 496 bp, Rattus norvegicus
  Genbank Accession No. AI237007
aaaagatttatttattatatataagtacactgtagctgtccccagatacaccagaagagggcaccagacctgattatagatggttgtgagccaccatgtggttgctgggaattgaactcaggacctctggaagagcagtggggagctcttaaccgctgagccatctctccagccctaaacatttgtttttatacttaaagattttaagttttgcaagacaaatatattgtaggagcttagtagcacaagtttctgttggtactggaaggacttgaaaagtaagtagatgctctattatttatttataaagttttattaatgacaaatatttcatgattttatgggacgttagatacaaagttttttacttcagtgtttgaaggacacttgttcagaagttatccaaacatatgggaggttagtttggcatacatttacagtattctagaaactggctgtcaagtgtgccagtaagtggaggcacttgggctttaca

SEQ ID NO: 2763 - DNA, 436 bp, Rattus norvegicus
  Genbank Accession No. AI237016
tcaaatctatcattaagacaaaaaagtaaacaaaagttaggtctgttgcaaattttatgattttttttttctcttctgagggggaaaaaccgtaatagtaaaaagaacgccactgggtgtacagtaaagcaccacaacacgcgttacaaacggggcttcctgctgctgctgctgctgctgctgctgacacaggggcacggtctctccactgctctgtgttaatcaggacttcattaaagtaaaactataaaatctcctaggttaactaagtcagacacggtctggaacgcagtgcttagcaaggacaatgccagctatcagtgctaacagaaaacattgtagaaggccaaaaacaatcaaaccggaaaccaaaaccttatttcccctagatgagcagaactgaaaaggaaaggagccccacctcccccctcgtgcc

SEQ ID NO: 2764 - DNA, 444 bp, Rattus norvegicus
  Genbank Accession No. AI237026
acactgccattcattttgtattttaattcaacctactggtgatttaatttacagatctcaaaggaagtgtgcactcaaatatttgaggacgttaacatatcaaccactgtttaattttggaatgttccggcttacttgacacaatattttaccagctaacaaatggttagccttttttcacttgactaaggaaaaataagtttcgcattgcctcattcaccttcttatgtgcatatgctgggagactggatgtttaaaaaaaaaagaaaccttcctcatgttcctttctacatctaaatctgtttactgatttggagctgctaagaaacctgcattttcctgctaaatcaactggatggctggagcccaaactataatgtaacagaaaaaattaccaatttgttttcatgacagtcttgagaatgtataaaattgttctggccg

SEQ ID NO: 2765 - DNA, 528 bp, Rattus norvegicus
  Genbank Accession No. AI237047
gtggtctaaaggacagtttatttaacgcaagggtgacaggtgttgggggaggggtgagggggacaactctaacataaacgcacacaggaggtacctcaagttaaaagaacacggcagtggaggaagctatgtttcacacatatacaaacagctgagctctattatttacagccaaaccttacaaaatagcatttccggtcaacactgaagccagtgttaattagtttttgttacaaaagattaaagctacaaacttcacattttctttttaaattgtacatcagcaacagcatttcagatttttttttctttccaagttggtctgagtgcaggctggtggaagagacctcccgtctaaacacagagagcatggattccaaaaacgatgcgtgtcatccaaataaaaatacaaacacggtccttagaaaaggctgagaacggtgaggtgaggggtgtggtttgagggggaacaatttcctccaagatgaagaatggcagtcttttagggaccaaaaggtatgctgggaa

SEQ ID NO: 2766 - DNA, 540 bp, Rattus norvegicus
  Genbank Accession No. AI237051
agatgtggatttggaactatcaatacagatgccaagttactacacaaaacatccacaggaacttttccattttttttgaatcgttcacaaacatttcctacataattcaacacacaacagagaaatggtacatcttttttctttcattgtgcatacaatggaaaaacaagtatatatatatttttacaaagttcaactaacaagacgctagcagttgacagcttaagtctataggtgagaaattatctaacaaaaataaccaggatttattcagcatcagccacttccataaccaagtgttactctggttaataaagctcattgcccaccaggcttctggcacatactcagatgcttactcttgtagtattgctccccaccgcagttccccacgactaacagaaaactgttgaaaagtagtggcaaacatttgcaaaaacaaacaaaatcgcaagcttattataagcatgaatatgtgatggaaatttatcaagccaagtctttccaaccattaagaaatcacccaaactgaaattttgc

SEQ ID NO: 2767 - DNA, 504 bp, Rattus norvegicus
  Genbank Accession No. AI237070
aagcagcttttatacttaaaactcaaaatgacaacacactgtacaaacataagacgacataaaataaaaagctatgaggaacatcctgtcgtcagcacacgacactgaccaaacgcagcccgcactgtctccaacagttcccaagggctgaggccaaggttcatcttcagaactggacagaggtactcgaaggggcagcttgtccatcaggtggagcttcagagccgggcctggcacggtcagctctcttctccccagtgattgtgacccctagatggactcgccgctgagcaggtcaccaggcagcagagtgttgagaggcgtggggctgccgatcactctggtatcatcagcactgggtgggccccacaggctgctcgagtactgggggaccccaccccacagcagctcactgctgcctttgccactcaggcatggggtgttccagtgggcagtgtcgctgcgcactaggccatgggtgctgcccgaggtgcccagcctggg

SEQ ID NO: 2768 - DNA, 448 bp, Rattus norvegicus
  Genbank Accession No. AI237091
aggaaaaaaaaatattttaatggtcttttgcaacctcttttcaaggtgaggccccttctaggtagaacccctttgtcaacgcttcttatcgctcaagatggtctcaatccagtggaagtccatcgccttgaaagctaccaggaccaagagcgtgtctgggttgttttctatcttagggtcgaagtgggccgactcaggatagaagagacgtatggtggtcttggagcccacgtctccctcataaccggctacaggagcattgtttaatctgatgaccacatcgtacttgttgataacacctcccagtgagctgttctttaaccggtgcccattccccaccacaacacaccgacgacactcgatgctctgtatgctctcgggtatagagtagctggtgatggccaacacccggagaagaagatcttcacttcctttagtcccaaagggc

SEQ ID NO: 2769 - DNA, 459 bp, Rattus norvegicus
  Genbank Accession No. AI237092
gtaacaaatagactttaatgtcactgtcacacatgggtggaggacgacgaggtcttgtacagtgagactggcctgtgctgcccagggactttggggcagaggctgaggccatgtgcccttccggggaaaacactgatgtggtcaagggcgggcaagggggcacagctggcccaggagagcgactgtcctgccagggaaggaccagtgtggataggaggcagctgcacaggacaggacagaaaggtgacaggacagccacagacgacagtgaccaacatgctcagcaaaatggcaacaaaaggaggctccagtggtgagcagggatggcgcccacagggtggtgggtggccagtcatgaggcaccaggagctcagctccagctggcttgtccctgggggaggctgggagacccttccttcccaccctggatcagaatgggaccagggaaggggttctgtg

SEQ ID NO: 2770 - DNA, 451 bp, Rattus norvegicus
  Genbank Accession No. AI237159
gagatcgggtcttccgcaggaagtcaggatggcctgggtggacttacaggtatatgccattatgcctggaccagacatcagacatttcagaccaggtgctggtttgcatgcacaggaatcctgacaggatggcaccgctctcacaccaaccggaagtgaaatcttaacattccaatgatctggaaggtcttggctaaactttagaaacttttgtttttcttttagccactagatttttcaggaaaaattcacctgctttatatgaagatcgcaccaaagggccacttgcagtgtagtgaaatccaagttcatttcctacttcttcccagtatttgaacttctcaggagtaacgtactcttcaaccttaaggtggcgcttggtcggctgcatatactgcccgagagttaaacagtccacatcggctgcacggagagcttcctcgtgccgcct

SEQ ID NO: 2771 - DNA, 471 bp, Rattus norvegicus
  Genbank Accession No. AI237189
gaagtcaatctatatataacagattaagatcttaattctacatacatatttagtgttttatctacaaagcaacgttggtaacctttgaggtatgtgataaagtagtctgagagaaacaacaaaaacattcactctgacagttaacatttttctaaatgtaacaatttgaagtttctaatccactcactctaacatacagccagatacttcctatgttcctaaacaaacaaaacaagacaagacaaaacggaacaggaggtattactctgaagcccccttccccagggagagtagataggacttgtgaagagaaacccttccctttagccagtatttttattccctacaggcttcgcaaaagcgttgttaacaatgacatttggctttggtgacctgagggaaaggcaacattgacttaaagacaatggatattcaataagaataaatatatgtgcgtgttctagaaagacc

SEQ ID NO: 2772 - DNA, 581 bp, Rattus norvegicus
  Genbank Accession No. AI237403
taggaaaaatatttccctttgcaagatatagaaactacaatctttggaaaatacataacgccccataattgttacaatacatagccttgtataccacttgaacattgtttaaaaattataccctgtaaaggttggtataagaaacattgtcagtcacatatcctgacattcaagtacttaagacacagttgaaataaaatgaacttccagagaggttcatcttccactgtcccagaaactcctattgtgtaagttaggcagtggctccaggagtgggactaaatgagaggaggctgctatagaaaccggttactgcaggcctccctcccatcatcccccaaacccctctgagttctaaaggtctgatgactgtattttctaggatgctggtagaatggcaccattgacggatatctctgcggggtcaagcgcgacagtgactaagctaaataaatgtttaggatgtcaggtggcaaatatgatttaaaaccaccaaagttcctcttaggagctactggagaagaccctttcatagctgaattaagaccccagactccagcccctttcttcagaaaaactgt

SEQ ID NO: 2773 - DNA, 602 bp, Rattus norvegicus
  Genbank Accession No. AI237404
gcctggctacctcgagtgtacagttttattaatttaatactctatatgaagtcaagtattaaaaagagaaaccaaccatgctgctgtggggtctttcctggtctggggtctaccaggaagcagaagaataaggagaggggttatagcagcgacaccgagaaaagcctcgaacggcagccccatggccactacctagaatctcacactcattaaatcctttggcccaggcacatggataagtggaggcttcctacactctggcagaggtgccaggagaccctcaggactccaggaaccgcttagaaacaaagtcaaagtcccggaaggcagcttgttggcgagcagagagggaacggcgggggactggtggggtcagggttggaggcaggctggtgaactctccctcgaagtaacgaaggtctgcagggccacagagggtaggcacgaaggggggctggacagtgcgggcaagcaaggcctgccagttggtggtcctgaagaatggctgaaccttgatctcctcggcgtcccgctctccagcccctagacgcttctctggggacttctggaggagcttctgaatgagctcgaggccttgagct

SEQ ID NO: 2774 - DNA, 501 bp, Rattus norvegicus
  Genbank Accession No. AI237525
aaaacaatcacttaaattataatcacccccaaccccaaacaaaaaacagcttcatgttttggccctgacaggagcgacaatgggcctcccaggaaaagctgtttgataagaaaacaggaatggaagcccatgggccctggcttggcctcaaggtacccagaagaggctgggtcccctgtgaaggctgcttgcactagggactttgaggctttggccctgttggcaagaacagttagttactgttgctgggtatcagcctctgggctttttgaaagtacaggagcgtgagaaacctgtctgaagatgataaagcagtaactgaagtagtgttaggtaagcccgctggtgttgtccagccaggctcggcagtgatctggggtcagagtgctgtggcggctcaaatattacctcagtcagggtatgtgaccagccacaggccatcagcaagacctcagtgtcctgcactgagggtgacttactgtttcagtaccaaggtacccc

SEQ ID NO: 2775 - DNA, 472 bp, Rattus norvegicus
  Genbank Accession No. AI237535
aaggcaaggtctctgtcattagggctgggagagatggtacagatcaagccaaacagtgaaaaataaggcaaactgtagcttcgggttttgagcctggcaccaggaaggcctcttcttgaggaagagggggcaggcagtggcaaatcagcagacgagatgcaaatggagtaacaatcacagttagtggggtaacgagatcaggcggtaaacccttaaagcaacacccaaggtccacgtctttgcatgtgcagggcacaactccagcagcagtttctgggtttgggggtttgttacttttccgactttccccaccccctaaaagacacgaagacgagctcatgaagagatcaaggaagggacgtcttctggctgcgctgggcaagggttgggtgacttccgggagcacttgtctaccttccctgtggctggccgagtcctacaaacgtttgtaggtgcccaggagcgctttgca

SEQ ID NO: 2776 - DNA, 540 bp, Rattus norvegicus
  Genbank Accession No. AI237580
acaatttacagattagttaataattatatacaaatataatctccgctataaaatctacactagttacatgtaaaatgatctgaaaccaactcaaacatctcattccaaaaaaaaaaaatttctcattccgtctctacttttcttaaattataaaaaataaaatctgacggttttgatttcaagttagataagggttgccacatttcagcactcggaagtgtgggtccccacctgtacagagcctcacatgctacagagatctctaaagcaccactgcaagactgagtgtaagtgttcagctagaaccgccatgcctgccttgcctcggaggtgttctttccttgggattcgatgacaatgacagtaattttgtttttctccttcagtttagacccttctgtctttgccaccatttgaccatctctgcaggcgtgattattttaaccagtcatttattcatttgatagtgagggtataatctggaacaattttcaaacatctatacattgacaatgtgtagatatcccgtcccctcgtgcc

SEQ ID NO: 2777 - DNA, 189 bp, Rattus norvegicus
  Genbank Accession No. AI237595
cagtgtggcctttattttaaataccaaagcaaatatgggggtggcatccttgggtacatgcctagggaaacctggtgaccccattgtgcacacaggaaactcccagagaccttcctccttcgaatgaaatcataacagtctctgatgatttcattcgaaggaggaaggtctctgggactgcctcgtgcc

SEQ ID NO: 2778 - DNA, 610 bp, Rattus norvegicus
  Genbank Accession No. AI237609
agaaagaggtcaaagtacctgtatttttaataatttcttgacatggtaaaagaattttacattacaatccaaggagggaggggcagaggaacaatcaaacaaaaaggaaaactgagaaacacatggtgggcaggaaggggttcggctggaagggatctgagggtgggtaggcgtactgcccaatgaaaatgcagttggtttgttactgagcactactcatgggaagagagcatcccaactcctgctctatagaacgctgggagtgaaagtgatgcacccagatggaaaatgactgggaattggaagacggagaggagtaaagtcaaatagacactgagtcactggcaggctaactgcagagaccaactctcacttaaaaagctgggggctggtggggttaatccaaacgctgtaacaagtgatatctctggaagattcaagaggaggcaactcttctatgggtttgaccttcgcagcatatttatacacacacgcgaacacacgcgaacacacacacacacacacacacacacacacacacacacacgtgcacgtgtgtatgtgtacccacacatatacacatgaattactgctttccctggaagcacaa

SEQ ID NO: 2779 - DNA, 673 bp, Rattus norvegicus
  Genbank Accession No. AI237618
agtaggaatctattcctataaaagtctttgtgtgaaaaaaatggtagaacagcagggaaactcaaaaagacttgagctcaccactttcacagttcagaagattgattttaccaagaactgagtgccgagacttcagtgtgtcatcttcagatataaggtcttagtccagtagtgctgtattctttaaggacaaaagagcaatagctataggttaggaggtcactaagctaggacagggctccaatttgcaggctcagaagcctggacatctaattatgcaacggtagaaaccaatgccctggcccagaacagctcggttcccccagggcaggtctatatataattctggtttggtgtaattgggttcttgaatgtgttgtttcccaggcccaggctcctgcctgccactagactgactacctgtagtcccaccctgtctctcagaaaagaaggaagccaggcaagacagcagaggcccagggcaggggagtgaaagggccaatttaatgaaactacaaactgggaccaggccacagttcacagtgataggaggccatgcagtgtgtgagaccaggagagggacagcagcaggttacagcgtccacatgggcatattcacagaccattcaagaaatggacaggtttgggcttacacccagggcacgactcatgt

SEQ ID NO: 2780 - DNA, 604 bp, Rattus norvegicus
  Genbank Accession No. AI237636
ggccgcgagatttttttttttttttttttacatcaagagtaactttatttaaagggaactcacacgagacaatgtatttaatataaacttaagtatttagtaagttatgcacatactgtgctgtcctccagaagacaactgctcacaatttccacccagctgctaacttaccttacatcacctctaagaaaatcagcctagagagccctcttgaagatggctttctaatatgaaatgaaaagggcaaggcacgtaaaaggcagcccaacatcagtgaggccctgggcctattctggaaaagctaacaaagcgctgtctaaagtgaacactcgtaaatatcccgcaggtgatttacagggttaatggtctcagacaaatcaatcttctacagaagatgaggtgactaggccagtacaaaaaccattcctgaatatatgcatgagagaaattgtgtgtcaatgcacaagatggccatgtgcatacaaattacagagacatgaaggtcacttctgtgatttttattttagatgttctttaagagtgaacggcatttgttgaaatcgaggcacaacaggaaaaaataaacatttgagtacaaaccctc

SEQ ID NO: 2781 - DNA, 503 bp, Rattus norvegicus
  Genbank Accession No. AI237684
aagctacaaagcccctgcgtcatttattgtccccaaatcagcaagaaggtgcccagagcgattccaaggtccacctgctccatcacaccttgtaacagggtggtggtgttccttatgggaggcaggctgacgaagcagcccgaatcagcctggccttgggagtcataagtctgtgggctagtctcaacgaagtctcagtgctgtcctggcccatgcagcctcctagggcctgtgcacttcctccagtcaggttgacatcagagctcacagaaccatatgttctctcttgtccttgcagcctgtcatcaccatctcaacatcatctcaggttcctggtttcaaagacagtctcttcctcgctgtcctgagaggccatctcttcatgctcctctgtgttggtcaggagcccataccttcttcgctgtggcttctttagtctaaaggcccggatgaggaagtaaagcgaaaccaggccgcagagcccagtaattacgtagaacaag

SEQ ID NO: 2782 - DNA, 597 bp, Rattus norvegicus
  Genbank Accession No. AI237698
gagattcctcttttttccttttttattcaacaacacttctcatttttttcaagacatacatttggctcctgccatttctgtttttcattcggtcctaacatgattagggatgtaacatgactgcataatacaaacaaggaacagatgttctgttaaaaaagactgctgtgaactattcttaagactttaaaaggtcttcatgactttacagacatcttcacacaccttttggtcctcacaacaaccctgtgaggtaggaattaacatgatcattagcagagcataaaataggaaaatgagatatacccaggcatacaattagtaatctgctactatcttagtgttgtggaccttagggtttgtgttaaagcacaaagcatgaagtcctgtaaaatatgctctgtttattcccagagaggtaacaacatgggatattgaatctttattattactgcattttattatcattctcttgttatgaattttcttctttattataacttatacaaaatatctccatttctactgcaatatttatttcccagtatatatacttaaaatataaaaggtaagcaaatacaaatagctttctagaaa

SEQ ID NO: 2783 - DNA, 405 bp, Rattus norvegicus
  Genbank Accession No. AI237718
  misc_feature (1)..(405): n = a or c or g or t
cggagctggggaccgaacccagggccttgcgcttgctaggcaagtgctctaccgctgggcagttttttatttccaggaggaaggaggacatttagagcagggattctcaatagagcaaagtttgcagaatggctcagggctccaccgagagggtctgggaaatggccgatacctctaattcaggtaagaactaccacctggctaaacgagacaccaggaagaagcaggcaagccctaggctgacgctcccaggtcatcctccccttcatcaactctactacacctaaggtagaactaggtggcttcactcttcagaagggtcattactagcctacgtaacagtctctcaaatgacactntctctagagccattatggcaacctgtgctgcttccactgagaaagc

SEQ ID NO: 2784 - DNA, 452 bp, Rattus norvegicus
  Genbank Accession No. AI237724
aatgatccagccatttaataggaactcacgaaggcaaaagttccagggctgcccacctcacccctccactaaatccagatctacattggccagaggccatctgtgcagccagggagaccagacccagctggaaggtgcttcaagagggaagggtatggttaaaagaaaatggggacagggtccccaaagcaaagtctttacaaaagggggttctcctccccacaaaaaagtgtcacataagctcaaaataaaatataaagtaaaaatgctgcattagaaaagtttgcaatgttaagcctttacaataggagactggccctcaagtgtcaaacatccagtataagtccatggaagtgcagcctatacctaaaatctatgtaagtgttgcattgaaaaagtaaaaaattcaagatggcctgtatgtagtgctttggggcccatgtggaggcaaa

SEQ ID NO: 2785 - DNA, 262 bp, Rattus norvegicus
  Genbank Accession No. AI237782
caaggcctgctgggaagcagcgtagctaagatttgtcacagccttgagggaagcacctgtccgcggtgctgcacataggaaagcggcagaagcaaagtgagcacggagagcccttggcccagtggttaggaacgcagcgtggctgtgcttctgtgtgggtgagcttgagcaactcctgcatttcttcttcggtgagtttctccttgcatcgtagtcgtaattaaaggaatttaagtacaccaagtacccaaaactgttcttg

SEQ ID NO: 2786 - DNA, 511 bp, Rattus norvegicus
  Genbank Accession No. AI237813
caactattaaacttgtttagtaaagacaattttgttcatacaaaacaacagtttacaacagtctgagtgttgaacacaccatcaaagacatgggaggagctgcagacatctgggccctgccccaggcccagagatgcccaggagcccctcctccaccaacccctgagggagacacccctcctccagcaggaggggcatggtgtgcagtggagtctgagggaccttcgtagattgcatgatccacgggtggttcatgaattctgtgatggtcattctctgggtgggctctgttttcagcagattccgaataagcatcttcacttcttctgatacttctgaccattctgggttaggaaattcatactggcccattcgaatgcgagtcttccccacctgctcctcctcaatcctggggagcccccacccaggttgagtagttagagggtaaggtggctggtgctggaaatcgagaagaccacacgtggtcctgcccttgccaaagggaggttgg

SEQ ID NO: 2787 - DNA, 487 bp, Rattus norvegicus
  Genbank Accession No. AI237820
acaaagcatatacattttaatcacctatgactctcttaattcccaaagactattaagaaagactattaagattggttacaagttagttatatgaacagaaatgtattctacaatgtgcataaccaagtattttaaaaattcacgattgcaaacttttaatggcagagtaacagcatcctgagatatcttttttgtgtatacatctatatttctgaatgtgtgcatatgtgtgtgtggatgtggaagccagatgtcagtcttggctgtcattcctcaggagccatccaccttgctttttttgatacaggattgagcccttggatctggggctcgctagttaggctgagttggctaccttgtaaatccagagaacaacttgtctccaagttcaaactcaggtcctaaggctggtgtgactccattactgagttttgtcctaggctcctgaggtattctttatggtgaaatgatacactagtgtttttgt

SEQ ID NO: 2788 - DNA, 528 bp, Rattus norvegicus
  Genbank Accession No. AI237835
gcccagccctatctaaacataaaataaaactacaggactgaaattaacaacccattaaaatcggcaataagttatgaaaatcataaagcttttttttttaagtaattaagggtagttaaattatttaaagaatacaaagtccgaacagcttggggtaaggtatccagaaaggcttcccggagcaaagcagtggcccagagggaaaccttcgagtttgaaaggagggagcacatgacatggagtgcgggctggaagtctcacccagaagataacatttctgcaggtatttgtgagagcaacagtagcacctgcacagtgggattgtggggaggaaactgcctgtagaaaatgcagatctttacattaaatgagacaagtgcggaacataactatgttaactaggatagtgtgcctaccacgggtatcagacggttaaaagctggtaaaagggaatggtcctaaagaaaacaaaaacagcattgccttcgtctacccagcccagacctcatccgtcctgcgcactgaaaa

SEQ ID NO: 2789 - DNA, 563 bp, Rattus norvegicus
  Genbank Accession No. AI237855
ggtttctatttatttcgatataagaataaaatgtaataatatatccaaacattgcacaaacagccatgttgttatttatcaaagttcaccagaatatgtatactagcctaagtttggtagccaaaaggggcttaagataacaagatacaactcttttatcaaaactctcaaaatggggaatgataaagaacaggacaaccacactgatgtcatctttgttcttctacatgatattctcttacgtctcccaaacaagtgacaggaggattgagggacacttccagaatggctaccatgttccaggttctctgtgagatactttgtgaaaatactctcccatggtggacatgatcaatggcaggttttatataacaactcaagagtcccccagaagttaaacccaggaaatgttggaccatggaaagagattgaaaggagaacttttaattatgagaaaaggatccagtaagaatacacttaaacagatcaataataatatatatctatatgggattggacaaaggtttcatgagaaacaacgacattacttgtattctaaaagg

SEQ ID NO: 2790 - DNA, 350 bp, Rattus norvegicus
  Genbank Accession No. AI237880
ccagggatgcggctggcaacgtttatttttttagctttgggctcttgtgcattttccaggttttctatgctttaaaaaaaccccacatttacttttacaatcagagaaagacaacatttgtacaagaaaggaacacagttgaaagacaaataacagtgggaaggcacttgtaatacatacaaaagacaaaacgggtagttattagtgatactttgagctcatacacatcaaaaatagagagtattgcctccatgtaacaatgagcagagttgcagaagacaaagggcaaatctaacatgacaacggactccatcctacaagttatcggcaatgaaaacacacctcgtgcc

SEQ ID NO: 2791 - DNA, 584 bp, Rattus norvegicus
  Genbank Accession No. AI638960
ttgactcagaagcagacgtttatttacttaaaacatttcacaattatattgacaattatttatttaaaataatattctaaatacttacaaaaataaatcaagtattgcttctagttttcaagtgtgacagcatttgccatagaaaatagaagggaccttttgaataaactaaacgctacactgaaacttcctcaagtttaataactacacactatttcctctgatgacttgtgctttataaatgtccaaactatttctgtgcaacaaacaggatcacagtaagactgaatgtataacaagccatatacattcatttttacacaaaatgtcagtactctggcccaaaccaccatcatccccaaaatgccagatacaccattatacagaagtacatgtggttgtgaagtttttaacatccagtcatcaaagaccagatatttattattaaagtatactcagctaaaggttgctaggcaagacattttttacttacattaaatcattagtcaaatcattaaaaaaatagaataaacttcaaatatgtctcaatacattaagttaatcccaagataaacatcagtgtc

SEQ ID NO: 2792 - DNA, 463 bp, Rattus norvegicus
  Genbank Accession No. AI638982
ttaaactaaccacctcattttattgaatttttcatggccaagaaacaagggaaaggaagacccagggccaggagcactcattctcttctaggccatgttccagtttcttagcttccatccactaacttctactacaccttctcatagctcttgctggtagtaacacatgctgtgcccacgtcctcaacatttaggagaaagtgtacatttgagtgatagaaagcaaatgtcattctagctcatgctaggtaccctgaactcacatatatatcctgctcataccacaggctgctcctgctgatctcagcttagcagtgctgacatctgcaactaaagtgaaagggtaagtgctgagaatttgtgacccgaaacgtgtttgcctttccgtcttccgagccatcgtgcaacatgctgtgttctccatattgcctggttactgggagtaaaaggatgcccaagacat

SEQ ID NO: 2793 - DNA, 419 bp, Rattus norvegicus
  Genbank Accession No. AI639002
ttggaaaaggggagtttaaaaacttttttttaaaaccccaaaggggaagaactttgcagagggggggcccctgattcccaaaaaggcccgggccataagggtggaaaaaaaaaaacttgaaaaaaggacccctgcaaaaaaaaagggttaagggtttttgttgaagggaaccttttggttttttaatttaaagccccccccaattttgcctttggttggggaaccgccttttttgttaaatttggccaaaatttccattttggccggaaaagtaaaaaaatggttttttgaacgttaaaatttttcccaaaaaaaaaatttggaagcccccattgggaaacaaggttccaaaagttcttgggccttgcccctaagtttataaacacaaaaaggggaaatgttaaaaggttcgccccttt

SEQ ID NO: 2794 - DNA, 358 bp, Rattus norvegicus
  Genbank Accession No. AI639017
ttgtttattaccaaacccaacatttattgagagcacagaaaatcagttggcagaggcccaacttcaatgagcgaactgaggccaggctcagtggggtaggccagccctgaagtcactcactcccagtgagaaaccagctctgggagaggggctgtaaaccttccaggccttactggggtcctccgatgggggaatgtctgaggggcagtgccccggcctggattttaacagtcctcaggtgttgatggggggcagggagctgaggtcagggagcagctccgggtgggggtccagacgggccaggcggctctgctccagggcgatggcctcagctgaatgcttgcacttctcagagcca

SEQ ID NO: 2795 - DNA, 448 bp, Rattus norvegicus
  Genbank Accession No. AI639029
  misc_feature (1)..(448): n = a or c or g or t
ttacaaaaacaaactttattttgctatctcacaagtcagccaggagattgccatggtatatgtccctgcttctggtaacttttaccagacacaaacaggatcccttcacgtcctcacgggagctcaggctgcctctgccatgctgggggcttcccaaagcagccagagagatttctctgcaccacctcagcctctacagaagttctggctggggaaagactcgctgagcctccgtggctaaccaggctttctgacccaagatcaggcacggtggccctcggctgggcttgctgaccgaacatccagacagaggtttctcctttggcagggcctgcctcagagccaggtcccatttgctgcacagtccaagaagccatcatctcaggagccttccccagacttcactgaaggctgtacagccacctnctcgatctgccagcgacacatg

SEQ ID NO: 2796 - DNA, 520 bp, Rattus norvegicus
  Genbank Accession No. AI639045
ttaacttttaaacctttatttcatgtaagcaagcttaacaaaaagttctttaagataccattttaaaaagttagaagaaacaaactaagttttattttccaattctaattttaatacagactgaacaaacaaacaagcagaagtgggaaaactaggtgtataagcagacacagatgtaccaaatgtaaaacaatgagttattaacacaactatttacatgcacatttacaacaacccttttatataggtttacttttagttagttggaaaagatttgacattagataaaaacattacttaaacagggctgaggtggtacattatagtaaaagtattagaaaagtgaccctcacggtataccaatattaagcagatggaaacttgaatgacaaatacctagtaaaattctctagtaaaaagtcaatgcaccatgcaatgaaataaaaatgagtaagccatatgaagaaagcagaataatactgtaggatggcgggtaatgaaattagtcaagtgaagcaaa

SEQ ID NO: 2797 - DNA, 278 bp, Rattus norvegicus
  Genbank Accession No. AI639058
ttgcaagctttctgagcttctgcattcagaccacacagaacatgtaaatatttatacacagaccggagaactagcacacgccttacagcctgtgtgtcccctgccttcctctctcttctctcttaagaagtgcggagtgtttttttttcttttttgcggatttgcctagaggtgccccaggcccccgctcctagagagggtgacctttctgtttctccttctccttgttctccagaggggcaatgtgagggtgatggagccgggtcccttctggtgcc

SEQ ID NO: 2798 - DNA, 498 bp, Rattus norvegicus
  Genbank Accession No. AI639076
ttcggagctggggaccgaacccagggccttgcacatgctaggcaagcgctctaccactgagctaaatccccaacccctcttggtctcatatttatggaagaaaaattcatattttatgagcagctaaaacatacctgcttatatgcacttatatattataatatgtgagatttatatatatacatataattaattatatatcatttacctgcatatatgtatgcttgcgagatttttatatatattacatataatacattttatatatgatgtatatccatacataataaaatatatgatttgtatatatttatatacaaatatataaattatataaaatatataatatagttatattaaattttatgttaatataattaatataatataaaattaagtgtaaatacattacatataaatataaaaattacatataaatatataaatattaatagatattttctatattttcctcctctatttaagtttctgaggttt

SEQ ID NO: 2799 - DNA, 267 bp, Rattus norvegicus
  Genbank Accession No. AI639079
ttaaaaattttcccattgcaaaaaacttttttttaaggtctttgaaaattaggaaaggaaagtcatgtccaaatttcaattttccagggcccgccccgaaggactggttttccctgaaattgcccctggccctccccaaggggggatgtcctccaggctttgctggccccctgaggaaaaggcccaaactttccccccctttgttggggcacatgtcctggggcaactttcccctccttcacaataaaaaacctggggactcaaccc

SEQ ID NO: 2800 - DNA, 416 bp, Rattus norvegicus
  Genbank Accession No. AI639093
ttgaagtttaaaattttttattttaaaaatagattcataaagtgcaagaaatgttttctttcccgtgctttatatccatcttcgacaagctgagcacaggctgttagcgaagacaaaactattttctttctgaggtctggaagcaagccacgttcctgcaagccgtgcaaggacgagccgggactcagggcgtgtagtcgcgcagctccccggatacgggctgcacgaggcttggagaagaacccaacgtgctcaggccaagtccagctttttctgagtcgtcgccagcttgtcctgcagcctccgcttcctccagtccaggtaacgcctccgcaaccgattcgcttgccagccaaggaccactccagaggcgaaagccactagcacggacacttgcagcgtcctctctcgtgccg

SEQ ID NO: 2801 - DNA, 508 bp, Rattus norvegicus
  Genbank Accession No. AI639102
  misc_feature (1)..(508): n = a or c or g or t
ttaatcattccttaaagcacacgctgagttattactaactaggagggatatttgaattatattcnnnnnaaggaaagctactaacctggctgagaaaacgtcaaagaccttacattgacttgaagctgtatggagccaaccacagcggatgccaaaggagtttgctttgctgtctgcaaattaagatcttttttctaaaacatctgagacttccaattaaatgtcagccaaaataaattcccagatgtacaaaatgtgtgatttgtccttaaaaaaaaaaactggatgtcagctcaccgtcgttttggtcaacagtcaataaagtgctttacagacactttggactacgtcgaaagacattatccttgctcacctgatatagatcagtttaaaataaaaaacactagagtggtaggttgttacaaatgagatacaattttgtggggattaataaaatctaaaatgagaaaattatgtaaagactgcttattaaaaaaagctactttta

SEQ ID NO: 2802 - DNA, 413 bp, Rattus norvegicus
  Genbank Accession No. AI639108
ttattaaaaaaaaaagttttattttggtttacgtttccagagggatgaatccatcaaggcagggaggcgggacagcagggggcaggcacagaagcaacaggaagttgaaaattcacatcttcaaacacaagaaggaagcagaaagggggggtgaggagaaagcagtgtttgatatttcctacacacacatgtcaacattcaccgttcttagaccactgagtcaggctctgacatccttctgagcctcacaagggaatggttttgccattcccatgaggccatgcactgaggtactaaacatggctgtggccatgtcaacaacatagccccactctggacctcactctagacactgtaaagaggacaggaggaccccatgcatgtaactatggggaaagctatcattcgcgctg

SEQ ID NO: 2803 - DNA, 398 bp, Rattus norvegicus
  Genbank Accession No. AI639117
ttggattggagctgctttaatctgccctcaccctcccagcaggaagctccttataagaaacccaagtcctcgtctttgagcttctcctttagccagggcagcacctggaagagattgatgtggaagtcccgggcataggagggcaccaactgttgccgcctcgggtctttgcagacatccactactccccagctgatcacaccaacttgaatgaagcggcttctcttgtgaacaatgagagggcccccggagtctcctttgcatgtgttggggtcagcatagggatctacccctccggtgcacaggaacctgggggtgaccacctcagaggcaactttgaccttctcatagccttgggcctttgtagcatctctctcacaactggctttcttttcccc

SEQ ID NO: 2804 - DNA, 457 bp, Rattus norvegicus
  Genbank Accession No. AI639120
ttgccaagtgaaatgtgtttattggccagttaatcattgtggttaaacatttgcctaagactacaaggcggcaaagacttagatcctaaggaaggaaagaatcatgttcacttttaggttcagaaaggcagaacagagcacctgaggccagctgtgacatcagaaaagccggagagagggtgccctcaggcacacgtccaaggtggtgagcctgagcttcaccatggtgtgcctgggcctttccctagaaaggcttcagtacagtagctgggacatggacatcccactgaggctctgcatccctgggcagcgtctagggtactgtctcatgccccaggacagtgccatatcatgatctggcatggcctgtgtgggtggacaggcctgggaggtgacactgcagagtgaagggctccagttctggctgttgtgctaggttggcagtctcactgggcga

SEQ ID NO: 2805 - DNA, 393 bp, Rattus norvegicus
  Genbank Accession No. AI639167
ttgatgctgggaattgaacacagggttgtaacgctctatgacagctacagcaagcacgtctcatcctcagctgttcaacttaactgcaaggccagtatgttcctgtcgtctcaaagctgcacctggggaagcatgagcgatggcctcagcctgcagcaagtggtggtcatgcctgtgcacaacaagctggagcggagattggtggggcttgcacacccctttcatccgcattgctttaaatactggacacagcctttgcacagtggcccctgtggccacctatgaacactgcaagtgtagtaaccggatgtgtgtgggcaaacaccttctaaaccacaccagtgtacccgatagccagagcctaggatcacagtatagagaggtgactcaggg

SEQ ID NO: 2806 - DNA, 447 bp, Rattus norvegicus
  Genbank Accession No. AI639176
ttatttttaattttaaaaagtcttctattttgcaatgatcaggtgatttctgtctaagtaaacaagcaaaccccaaatggagagaaagaaaacaataaacagtcaaccagaaaatcaatgaacaaagtagttaaaataagtaatcatcttccatgtataatcttaaatgcaaataaacctgatttaccaatgaagaaatgaaaacttgcttgctggattaaaaatcaagatccaactatctttagggtatttgttttaaaggagccacttttcaccagcaaaagaaaatgaacatcaatctgctaagcacatgaaaactggaactggcatacgtatttttgtcaattttaaaaggtagttttgatgggtagagccatcttagatgacaggtcactgtcactgcttttttacttttttatttctttgacaaaagacctgctaaaagca

SEQ ID NO: 2807 - DNA, 379 bp, Rattus norvegicus
  Genbank Accession No. AI639195
ttggtttggggggcaaaaaaaaaggtttaaaaaaataaaaggggggggggggggaagggggaaaaaaaaaacaaaaatttcccctttggaaaagggaaaaaaaagggggtcaaggaaataaaaaaaaattttcatgattgggcgaaacctcattttcgaattaagaaaaaaaaccatcttgatgtaaagaaaaaaaaaatatttttggagaattcgggggatttaaattaaaaaaagattttgtgggggaaaaaaaaaaaaattttccacccaaaggtaatagaccttctcatgctgggggcaaacaaaggggggggaaaaaaaaaaaaaggggggacttgtgttttacaaaaaaaaaaaaaaggacaaaggggaaaaa

SEQ ID NO: 2808 - DNA, 357 bp, Rattus norvegicus
  Genbank Accession No. AI639197
ttaattttaataatttatttttttaataaaaacgaaaatgatataaaacccaccccccctacttcaaaggaatggaagggcgggaagaaggacccaaaaaaaaacactttcgaaaaaaacacctcgcaggagatgggcctcaaaaagtcttacggacccccccccaaaaaaaaagtcaccccaagggggggggggttcttttgaacaaaaaaaacatgtggactcaggtttttaccaaaaaaaaccccccatctattgaaattaccaaggaagagcttaatttggtcggtagaacccacccccacagaccttggcccctggggggttctgcacaaaaaaaaaacccttgaggaaggg

SEQ ID NO: 2809 - DNA, 334 bp, Rattus norvegicus
  Genbank Accession No. AI639203
  misc_feature (1)..(334): n = a or c or g or t
ttattggnccaatgagaattttttattgtggctactaacggtatgggtgagggggtacttgtaaggaacagggataactaaaggatagcagtatcagcagaatatatgtgagacttccttggaggataactaaaggatagcagtatcagcaggatatatgtgagacttccttggagacagctccaccaacctggaccagcaggccagagcatagcctgctgatgacctttggtgacaaggtcctgagagagagagtatcaggaaatcaaaagatcaggagataggaaggtttgggctctggaggtcttccataagctgttctatgccaagcaag

SEQ ID NO: 2810 - DNA, 508 bp, Rattus norvegicus
  Genbank Accession No. AI639236
  misc_feature (1)..(508): n = a or c or g or t
ttnaaacccactcagggtttcgtgtacccttggctgtcctagaacttgctttgtagaccaggctggctttcaactcagagaaatctacctgcctctgtctttggagtgctgggattaaaggctatgccaccatatctagcaatttgtttttcttttaggtagaaaattgaaggtctgagaaaagaacactttactcagtagttcaccagtccataaactggtcaactaaggaagagcatcagggggctccgaggtcctaacccaggttcttatggacagtctcagtaactctgggtttcagtcacaaaagggtccttcagtgtctctggcacgtggcaggactggaagaataagcagatctgtcatttttttatttcgggtgagcttaggatagaaacaataaacaaacatctacagccattcaggagcaaagttatagagatgaaaaatgcctgctgtgggggcactaagtctctccctttatcattaaaaatgtacaataatcata

SEQ ID NO: 2811 - DNA, 536 bp, Rattus norvegicus
  Genbank Accession No. AI639245
ttcaggcactgctttttttaaagacagggtagaccacgctggcctcgaactctcagggattcacctgactctgtctcctaagtgctgggatcaaaggcgtgcgccaccaccgcttggctcaattcttcaactttatgagagattctctcattattttataaggaacaacaagggagttaatgcctaagccaagattctcttaaactaaatactctggaagtctctataccacccactgcctgtcacctggaccattctcaaaatggctgtcctacatgtaaatgagcgtgactgtacacgcaacgacttgatctacaagtattcctttctgcgcaagagaccgagaacaaggaaagtcagacacgcattttgaaacaaacaaacaaacaaaaatgattgtttccaaatgttctaggatgtgcttggaccttcaaataaatagggcccaagttcacataacttaagagtgaatgtggggtggaggagacagctcagcccagtacaatccccaccactagggcaatagagaacatgaa

SEQ ID NO: 2812 - DNA, 559 bp, Rattus norvegicus
  Genbank Accession No. AI639246
  misc_feature (1)..(559): n = a or c or g or t
ttctttctctctttctttctcttaaccttttaacatagttgttttgccagcaatgggtcctgtaattcaagtgaaaatggaaattcatgtttttgttcgttcctttgtgtgtatgcagggttggatggattctggggattggactagaagccttgtttgtacacgccaggcaagtgctttaccactgagccagcagctcctggcctctctcgtttttaggtttcttataaaagcgtgtttatctctagagaacatcggcaacaatgaagagaaaagaaagtgtgtctatgtcctaagaagtgattcagatcaattaactgagaggcttcccgaccccgcctgtattttatagtctctgccaacaaggctgctatctgggccccagctcccatcttgtgctctgtttattttggcttcccagagattaggtctcagtcaccaagctttctatgaccttctgttgttttcccttgcttattttacatgtgcctggttccaaagagcctggccaggaggtgtgtttccctgtgggaaggttttggactatggngctggccat

SEQ ID NO: 2813 - DNA, 334 bp, Rattus norvegicus
  Genbank Accession No. AI639248
ttccacggggaggaggagccattttactggcccacaattttatttgctgggcattaattttaatgtcttcacaaaggcctttgacacaaatttacaaaaaataatttattaataaactatagctgatcattttgcgttttccaatgtttaaggcccctccttttaagtatttttgggttccactgggccttttttgtcgacctcccatgattaatcctgaacatccgttttttttgccaaagatgtatcaccctgtaactaatacccactttttttggacgggtcttgtttaaatatatttctaagccacaggggccaccttaaccagataatt

SEQ ID NO: 2814 - DNA, 487 bp, Rattus norvegicus
  Genbank Accession No. AI639255
ttgattgattgattgatttatttatttatttatttatttatttatttatttatttatttatgagacttggtctcactgtgtccatctggctgtcctggagctcgctctgtcgaccaggctggcctccgagagctaggactaaaggtgggtgccagcttcccacttgcttgccgtctgtattccatctttagtattcgttaaggtcgtgagttgtatgaaaaaatatataatttaattctcaaaccatagctttgtttttctttttcctaaaatacactgtaaaaagaatcaaaagcatatattttgtagcacacagaggacgaatgttctggagcgaaggcagagtattacccttgtataaaaatcacctataaaaaaaaataaaaaaaaataaatcaccttatcccagagaagagaaaggagacagtgagagcaagcgtataggaaaccagcaaaacgttctgggagaactgcttccgctctgggg

SEQ ID NO: 2815 - DNA, 481 bp, Rattus norvegicus
  Genbank Accession No. AI639257
ttcacttagatactgatttaattcatggatcaaggccatattttcaaagtattttaaggatgccagtacactgcaaaagctggagaagagttgagaaacagtatatgcttactaaacaagaactatctttatttatctagtgaatacctagagtaataaatttttacttcatgatagcaatcaggctcgcaaacacccagaaatagaatttaagggttttaaatgtagttataaaggtcataaaaagtctgattagactgaggtacatttactcaaaatgttgagattcattaagtggtagaaacaaaataatccctcaaaccaacccatattctcagtgtacatataattggaaaggagggggtgcattaattggtgagattcaccaagctgcatatcaatattttgttacatcaagtagtttgaagacaagggaaatgttctaatatataattttagattatgtattgtttggctaaaa

SEQ ID NO: 2816 - DNA, 461 bp, Rattus norvegicus
  Genbank Accession No. AI639281
ttcatttcattctgggtcattcaagtaggaaaacagttacagaaggagaagggagctaaaatgaggtcaagattaccattgggggccagagatgttttattgtgaggaattcccttgtgtgttgtaggatatttagccccacccctttgaggaattggaggacgtttaactccaccccttttatgtatcacagtggtcagcagtgttgcctcctacttttaaggctgacactaaagccgagttcagagttgctaaatagctcctaagtggaagatgggtagcaaccacagctaagaacccctggattgggcagggccatcttcttgtgtttctgtggtccaggccaatggacgtcaatggccagggatgtcagttcactgggggcatttgctctgatccactgccccagaggtttgggcatgaagttgcccctctcatctctatcagattgtggtagaaca

SEQ ID NO: 2817 - DNA, 513 bp, Rattus norvegicus
  Genbank Accession No. AI639324
ttaaagtttttactaaatgtttattttatgttcaagataaagcctatacacaattgaatgtggaaataaataactagaaatgctctggaaactctatttgcccttcaaattcatttttttaaggtcatgaatttttatttaaatcaatatgccaaatataaacactaagaaaagaagaactacatcttagtacagaaacgtaatcttctctgactaagggtttagctggcattatgataacgaaaacacacaagatacaacactttagcaggctgactcagacggctctgctggagaagaaaaaggcacagactgaaggacaatggtgaagagcagaggacatgggctcagtcacctgacacagagaactcagtcaggacaagtgaacacaatcagtgctaaatgacttctttaaattaagatgtataaacataggctataaaggcattacttttggaagcatctttgcatatttcttctatatataaatctttgtatacaatttccatgttc

SEQ ID NO: 2818 - DNA, 500 bp, Rattus norvegicus
  Genbank Accession No. AI639342
  misc_feature (1)..(500): n = a or c or g or t
ttaaaaaagacttttatacatacattcacataaacacattaatacagagatacattaggaatgaactgtctgctaggttttgcaatctaattttaaactccatgcctttacaagagcttgcttgtcatttctgatgagggacgtggggatgagactgtaatgggtgtgactagtattcaacttattcatgttggcgcctatacaatacagttttaatattaagtagaattctgcaaaagaattggggagccattttaatatttacagggaacgaatcagcagaacaagattctatcaaataggctgtgtacagtagctgcagcttacaaaacacaccagtaatctgtgcctggtgtataaagagaaccaaggacacagatggctttacaaccaagtgagtacacagcatcaacaaattagaggacaaaagaattcacattttctacattaaaaaaattacagatctcacaaatgtctttgaagacacagaanattccaag

SEQ ID NO: 2819 - DNA, 491 bp, Rattus norvegicus
  Genbank Accession No. AI639352
ttagcaacatttgacaggcggtataattcaggtgccaatgagacccatgctttacacaagagggagctctcgttcattgtttctccaagggaaatgttttgggaacgtttcaaccaataaggcgcggaggacttagaacaaaaccctaaaccccggggaaaaaaatgtcaagggggctcttttttaagtttttcccaaccccttgcccaaataaactgtttttgcgcttttttaaaaagaaacttttctaagcacaaggggatttggttcttttttacaatttcccaaaaattggcaatttttcgccaagaaaaacaaattccctttgtctttgaaagacaattttagaggacgggtggaaccccaaaacaagtttccaatttttataaaaaagtggggacccaatttcttttttttcccaaaacttttttaatttttttgaaccccccatttttttggttaagggggggaaaaagccccccccaaaataa

SEQ ID NO: 2820 - DNA, 361 bp, Rattus norvegicus
  Genbank Accession No. AI639354
  misc_feature (1)..(361): n = a or c or g or t
ttcttcccnccccccggcagaaaatcaagaaactttattgaatcatctattctttgtagtagagaccttgcgaaacccaagaatagaaagaacagggcccggaggaagaggcttccaaacaagagagatgggggagggctcacccctaggggggacaagcagaactggagttcacaaccctacaactcctcccgacccaaaagggcccaccctgttttctcccttaaagacaagggaagcgccccccccgcgcgcgttaattttttttcccaaacaccagcgtaaaaaaaaatttcacgaaaccctcccctgtggacaaccttcccctctttagccctcgaaaacacaaccctctcgggcg

SEQ ID NO: 2821 - DNA, 483 bp, Rattus norvegicus
  Genbank Accession No. AI639365
  misc_feature (1)..(483): n = a or c or g or t
ttncatttgaatggaactagatttgtccatgtggcacacagagagaagtatgaaatacggacccacagtgtcatagtgggtgagccagggtagcttcaggtttccatcacagatgttcatttgagacggccacacccaggctctctctcaatccactcagcctcagatccctcaggagcactcaggtgggacagatgaaggacagaaataattccacttcattgcggacaataagctttcttgggtggatgttgtctggcacagccaagctggaggtcatttcccacgcatccacaaaggccacgcggagaccaacaaaggcagcgcggaggaagcggttcatctggagtgtgagccagtcactgccatacaccgatttgtagccagtgttggccagtttgatgacgaccagagtactgggttcccggtccagcagggccttcacagctgcccgaatccctgccagtcttcgagcaaagatgg

SEQ ID NO: 2822 - DNA, 528 bp, Rattus norvegicus
  Genbank Accession No. AI639381
ttggcaaaggtaactgaagtttctggcttctgtgacgtggtttggttgttactcagctctcactatttaggtggtcttagtcccaaggtggtcactgtgctgaagtggcagagatggccagcccccgtctcgctgcgacatcagaccgtcgctgtggaaggctcagggctgctccatccaacccctcgatcacttacttcctcctacccaagtacccatctcttaccctcacccagtaaggcccattagcatgtttccccttcctctggcgaatttgcataattattcactgcctttttcctagaaccaaatcacggtaatgattttcctcaagtaagcgtcccacaactctcttgattctatcgtacacactaagtttgccctcgaattattgcgtcatgttaaacacatacagacaaagggaaggacacactcttcagtagagaatcagaggggtcggggctgagtgtagacaaggcagtatagagctcagccacccaagcccctaccagagcatgaagatagttg

SEQ ID NO: 2823 - DNA, 221 bp, Rattus norvegicus
  Genbank Accession No. AI639390
ttggagacaaggtctcactctgtagccttgtctagtctgaactcacgatgtagatcaggctagctccaaactcacagatccgcctgcctctatattcccagtacatgtgtcaccccagtaggcaccatctgttctctgaatacagctctgccttcattctatatctgtttgtgctaagccgcaggaggcacacagggagtgtcttcaaaccagggacaggt

SEQ ID NO: 2824 - DNA, 597 bp, Rattus norvegicus
  Genbank Accession No. AI639411
ttggaaacattcaaaaacctatttaatagaatgttttcatgatacctactgggctacagagcttggtgtaaagaagtccactctgctgattacagacttgtatgaccaagtagggcatttcttgatcccttcccacaccccaagagtcacagaaccccgtgggacaggctcacttgactgttcccaacagagatacatgtcttctggaaggctatcttccaacctgtgtgtgacagcagcctgtccaccagccattgtggtgtgcatagcgacagctctgccattcggatcttgtcaggcctcgagtgggtgtcttagggatctcagtccatgggcacctcagagatgctgacagtcttggatctatcctttaataacagcaattggtctcagtttaatggccttcttgctgatcccagcatcatggcaagtgttcacgacgtctgtcacattcttatatgattctggagcctcttccataaccagcttgggggacgcaacccggatggcgattcccatgtctgccagcttgtctaagacatcttggaaatctaaattacgacgtgattttgctctggacaaagcacggcccgctcc

SEQ ID NO: 2825 - DNA, 454 bp, Rattus norvegicus
  Genbank Accession No. AI639425
ttgagttctttagactttaccaaatgtattttccatttgttagtttttaaagtagcttcaactgatgttgcacacaccatagctctgtacacttatgcagttagcctgtctcagaaagcgaataaaccgcaggtaacatctcccccagaactcctcgggaaacataattaggctgtacaaacacatcacaaattcaacagcacacggtgcacccgaaaccttttctatgaacctcaaaagttctttggacgtaatcactgaacattggtgtcgagcaaagatcagatttcgagcctccaattttgtgctgtgttgtgtcagcgacaagagcgccatccaagtcctttaagcaacgaagacatgcgcagaaccagttcagaaatcgtcaaatttgacgacaaaacagaaggatggctgcctactcccttcctcagcacgaaccctgttacgttct

SEQ ID NO: 2826 - DNA, 354 bp, Rattus norvegicus
  Genbank Accession No. AI639441
ttaattgtacagcctggaaattcttctttattgaaaaataaatacagagtcaaacaggtgggccagccaacatctgtagttttggggccaaaaggaaggggtcagacttgttcaggattcagatctccatgagctggtcatttcccacgatcacctcgttcatgcgtttagctttggcttcaatcctatgaccacttccaattaaacagtccctgatctccgcgcccgcctcgaccacggcgttgttgcagatgacgctgccatggatgctgctcccttcttccacggtgacagagttcatgagaaggcagttggtaacagttactctgtctctgatgacacaggatgagccaa

SEQ ID NO: 2827 - DNA, 518 bp, Rattus norvegicus
  Genbank Accession No. AI639462
ttactttcatttatgcttttattagataaaattaacatcatataataaaataaaccatttcccaatttacacacataaataagcaagttaatataaaactcaagtaaacattaaaagggtcagattttacaattaagtattaaaagaagaaataaggatattgttcttttctacattctaaacaattcgatggattaatccaaaaaatcaaaacccttataaaaatctgattctaattcatgcattacacatattatacatctttaagtttactggattctaacatttcagatttacaaaagaatgggatcatttgttgagatttacttgggatcattggaattctagctgggtttccagtcagacagcagaggtaaaggacactcaggaaagaggctctgaaggcattctctaacagtcactagcaatgttgggaatatagcactccgttggtatttgtgtggaactggctttagggggcacagggaaaaaaggggtgaatatgcttagggtccttt

SEQ ID NO: 2828 - DNA, 401 bp, Rattus norvegicus
  Genbank Accession No. AI639488
ttagactaagacaatgctccggctttaatgtatgaaaataatacccatgttgtctaatttgggggtcatacattagaagtgtaaaggtctgcgtctgcccgccgtctagttgaagtacgtgagcacaatcatttggatcggctgtctgcacacggggcagggcttattcctcttctttagcttctttgcacacgtgaaacatgacatcaggtgtccggttttgccgtgaacaatgcaaccatttttaggccgcccctggcaaatcacacatggctcgatggcgttcagagagaagctggattccatactttcctctttgtcttgtgtgtcctccttcaactctttgccactttcttggctgctgtaaacaatgctactggaagtcgacggctgggaatagt

SEQ ID NO: 2829 - DNA, 381 bp, Rattus norvegicus
  Genbank Accession No. AI639489
ttggcaggtcaatgattgagctttataaacttattacaatgtaacagcttttaaaatattattttgcctcttgcttgcaggagactaaaacagaagtggtacaagtgtccacgatggcagagcagcatttggtccaggcgaggcaaggagccaggcaaacttacacagtaagtgacaatctatacttcttggtcttctcccttgaccaccccaagtccttccagagacagcatttactttttctggaagaagccagtaatggaaacttgtctgttggctttgcccaaagcagcaacccctttcttgggacccttccgttcttctctgggctcccgtttcacagtggcagcaaggggtctttgtgctgaggccatcttcatc

SEQ ID NO: 2830 - DNA, 486 bp, Rattus norvegicus
  Genbank Accession No. AI639501
  misc_feature (1)..(486): n = a or c or g or t
ttccacatagataactttaggttaactacaaaaatcatgaaatgaagaacagatcatgggactgcacactcaagcatcactggagtgacacacaggtttccccagatgactgctaagagggaaaaaaggaaccaggatacaacaaactcatatttaagtagtaaacatgtcagatattttaaaataataaatacagaatagcaggagagaaactaaaatcataaaacagcatggagtatattttattttctttaagacagatgaaatttctaggcacagttttaggcattaaggaggacacagaggcataggttagtgtgtgctgctctgtacaaaaatacagtctgaataaattacattgctagccatacaattagacaatcacttatcagtcaattcactgcatgtttaataatatacaggtacatgcgaatccatatatatcatttatatttcaaacacataagnctctctatatttggtttt

SEQ ID NO: 2831 - DNA, 543 bp, Rattus norvegicus
  Genbank Accession No. AI639504
ttagagagcatcagccgttctatttcttgcatgatcattggcatgaaggaaaagtccaaaacaggggctttgcattctggggattgcgggccaagtgttataagctcctcatagcactttgcctgggttcatgagacctcggggatccagtgtgtctttgagttgcctcatggtctccacacccacaggacccacttcctcttgaagcagctgcctcttgcccagaccgatgccatgttctccagtacatgtcccatggagtgccagggcacgcctgcccagattttctgcaaaggccttgaccctcctctgctcctccacatcatctgggttgaccaacaggatgcagtgaaagttgccgtcacccacatgcccaacaatgactcctgtgagttttgaggccttaagctcctccttggtctctaccaagatctctggcaaccgggagatgggcacacacacgtccgtggaataggccttacttcctggacgcagggccaaagctgcataccaagcattgtgccgtgcagcccaaagttcatt

SEQ ID NO: 2832 - DNA, 453 bp, Rattus norvegicus
  Genbank Accession No. AI639534
ttctaaaaaggctggtttattgaggtttagaaggtcagggggtcaaaatggaggcaagggattttagggtttcttctcttctggatctctgcaggaaggcacatgtagacatggccgtttctcttccaccaccagcttctgcccctgtagcacctcacacagtggccgtgggatcccccagaaggtaacattcttctcaccctgaccttcaaccatggaaactgtaggcgagtacttggggagcaaaggtgtgcaaagtcgctgacggacacgggtggggttgggtccacatggtggtgtgcacagaccccaggtactccactgtgaccatgaacctttcaagacacagttatggatgtcatagcagtgtcgaatatcttggagtttcccagtacatggctgcccatcaaatttgcggccaccacagctccttgaacgtgactgctggcctgg

SEQ ID NO: 2833 - DNA, 2002 bp, Rattus norvegicus
  Genbank Accession No. AJ000347
taggggacgccaggctgactgttgatcatggcttccagccacaatgtgttgatgcggctggtagcctccgcatactctatcgctcagaaggcaggaaccatcgtcaggtgtgtcatcgctgaaggagacctgggcatcgtgcagaagacctcagccactgacctgcagaccaaagcagaccgcatggtacagatgagcatatgctcttccctgtcccggaaattcccgaagctgacgatcatcggggaagaggacctgcctcctggagaagtggatcaagaactgattgaagacgggcagtcggaggagatcctgaagcagccgtgcccatcgcagtacagtgcaatcaaggaggaagaccttgtggtttgggttgaccccgtagatggtaccaaggaatacactgaaggtcttcttgacaatgtaacagtgctcattgggattgcttatgaaggaaaggccatcgcaggcatcatcaaccagccatattacaactaccaggcaggaccggacgccgtgctgggcaggaccatctggggagtcctgggtttgggtgcctttgggtttcagctgaaagaagcccctgctgggaagcacatcatcaccaccaccagatcccatagcaacaagctggtcacagactgcattgcagccatgaaccctgacaacgtgctgcgagtgggaggagcaggaaacaagattatccagctgattgaaggcaaagcctctgcttatgtatttgcaagtcctggatgtaagaaatgggatacttgtgccccagaagttatcttacatgctgtaggagggaagttgacagacatccacgggaatcccctgcagtacgacaaggaggtgaaacacatgaactctgctggagttctggctgcactgcggaattatgagtactatgcaagccgcgtaccagagtctgtcaaaagtgcactcattccctgaaggggtctcacttacttacccaggggcctcggttcaaagtaacatatcttagaactgattaactgattgaacaattagaactccacttgcattcatcattgatcaatgatttattagtaggtagggatagaagatggaattaaagaattgtcttaggtatataacacaattgtcatttctcctgcctaaaaaaaaaaaaattagccaagtggtagcacttatgacagtcatggccattccagtggctgagctaggagggttgcttgagcccagggccccgagactagcctccttcacatagcaagacatagcccaaaaacaaagaagaaaaacaaaaaaggaatttacacttgatcttagccaaaaggccgagaagcgatcaaaaaaggaatttagttttaccaattagctaactagacctgttttgttgttgatgttgttgttgtttggttttttgagacagggtttctctgtgcagtcctggctgtactgaaatttacttagtagacaaagctggccttgagctcagtgattcccctgcttctgcctcctgagggcagggattaagggcttgccccaccatacctggcagaaatgttactgtttttaagtgaagaaatgaaaaagggttagttctgaatgacagtccaggtcatttgtggaatcaacattcctgctggtaaccagatttcttcagggcacagttactccagaatttcagtttgttttcttttcatggtaatgttttaaatttctgattccaaatgagaatgcatataatattatttatgttgatagatttatggggaaagtttgtccaagatacttagtcctatctctttatgttatatatcagatttttttcaaaagtatttgaaaattataaatactgtgaggattaatttattctcttgccattaaaagctatcatcagaaaaaaaaaaaaaaaaaattcctgcggccgcgaattcttccctttagagcacactggcggccgctctagaactagtggatcccccgggctgcaggaattcgatatcaagcttat

SEQ ID NO: 2834 - DNA, 2597 bp, Rattus norvegicus
  Genbank Accession No. AJ000556
cattctccaaagaagcagaaaaatggctatgagaagaaaagggttccagaagcaaccccactccttgatgccagttcactggagtatctgtttgcgcagggacagtatgatttgatcaaatgcctggctcccattcgggaccccaagacagagcaagatggacatgatattgagaatgagtgcctgggcatggctgtcctggccatctcacactatgccatgatgaagaagatgcagttgccagagcttcccaaagacatcagctacaagcgatatattccagaaacattgaataaatccatcagacagaggaatcttcttaccaggatgcgaataaataatgttttcaaggatttcttgaaggaatttaacaacaagaccatctgtgacagcagtgtgtctacacacgacctgaaggtgaagtacctggctaccttggaaaccttaaccaagcattatggagccgagatatttgagacttctatgctcctgatttcatcagaaaatgagccgagtcggtgccattccaacgacagtggcaatgttctctatgaagtcatggtaacaggaaatctcgggatccagtggcggcagaaaccaaatgttcttcctgttgaaaaggaaaaaaataaactgaagcggaaaaaactggactatattaaacacaagaaggaggatgccagaaacaaactccgggaagagtggaacagtttttcctatttccccgagattacccacattgttatcaaggagtctgtggtcagcattaacaaacaggacaacaagaacatggaactaaagctctcttctcatgagggagccttgtccttcgtgtccctggtagatggctacttccggctcactgcagatgctcaccattacctctgtactgatgtggctcccccgctgattgtccacaacatacagaatggctgtcacggtccaatctgcacagatattgcattcaataagctgcggcaggaggggagtgaggaggggatgtacgtgctgaggtggagctgcaccgactttgacaacattcttattgctgtcagctgcttcgaaaagtccgaggtattgggtaatcagaagcagttcaagaactttcagattgaggtgcagaagggccgctacagcctgcatggctctgttgaccactttcccagcctgagagacctcatgaaccacctcaagaagcagatcctgcgcacggacaatataagctttgtgctgaaacgctgctgtcagtctaagcctcgagaaatctccaacctactagtagccactaagaaagcccaggagtggcagcctgtctactctatgagccagctgagtttcgatcggatccttaagaaagatattatccaaggtgagcaccttggcagaggcacaagaacacatatctattctgggaccctgctggattacaaggacgatgaaggaattgctgaagaaaagaagataaaagtgattctcaaagtcctagaccctagccaccgggacatttcactggccttctttgaggcagccagcatgatgagacaggtttcccacaaacacatcgtgtacctctacggcgtctgtgtccgagatgtagaaaatatcatggtggaagagtttgtggagggggggccattggatctcttcatgcaccggaaaagtgatgcacttactaccccttggaagtttaaagttgccaaacagctggccagcgccctgagttacttggaagataaagacctcgttcatggaaatgtgtgcactaaaaacctcctcctggcccgtgagggcattgacagtgacattggcccgttcatcaagcttagtgaccttggcatcccagtctctgtgctgaccaggcaagagtgcatagagcgaaatccctggatcgctcctgagtgtgttgaagactccaagaacctgagtgtggctgctgacaagtggagctttggaaccacactctgggaaatccgctacgatggcgagatcccactcaaggacaagaccctcattgagaaagagaggttttatgaaagccgctgcaggccagtgacaccatcttgcaaggagctagctgacctcatgactcgctgcatgaactatgatcccaaccagagacctttcttccgagccatcatgagggacattaacaagctggaggagcagaatccagacattgtttcagaaaagcacccaataacagaggtggatcccactcattttgaaaagcgtttcctaaagaggattcgtgacttgggagagggtcactttgggaaggttgagctctgcagatatgatcctgagggagacaacacaggggaacaggtagctgtcaagtccctgaagcctgagagtggaggtaaccacatagctgatctgaagaaggagatagagatcttacggaacctctaccacgagaacattgtgaagtataaaggaatctgcatggaagacggggggaatggtatcaagctcatcatggagtttctgccttcgggaagcctaaaggaatatctgccaaagaataagaacaaaatcaacctcaaacagcagctaaaatatgccatccagatttgtaaggggatggactatctggg

SEQ ID NO: 2835 - DNA, 1524 bp, Rattus norvegicus
  Genbank Accession No. AJ001044
aagcttggtaccgagctcggatccactagtaacggccgccagtgtggtggaattccagcgcgactgtccctggagccgtcccgcgcctcagacccgcgagtccccgccgctccgcgcgcagtatggcgccccccaaggccctcgcgttcgggctcctgctcgcggtggtcacggcgacgctggccgcagctcagaaagactgtgtctgtaacaactacaagctgacgtcacggtgctatgagaatgagaatggtgaatgccagtgtacttcctatgggacacaaaatactgtcatttgctccaaactggcatccaagtgcttggtgatgaaggcggagatgactcacagcaagtctgggaggaggatgaaacccgagggggcgatccagaacaacgacggtctgtatgatcccgagtgtgacgagcaagggctcttcaaagccaagcagtgcaacggcaccgccacgtgctggtgcgtgaacaccgcgggtgtccggagaaccgacaaggacacggagatcacgtgctccgagagagtgaggacctactggatcatcattgagctcaaacacaaagaaagagcacagccttataacttcgagagtttgcatactgcacttcaggacacatttgcatctcgatacatgctgaatccgaaatttatcaaaagtattatgtatgagaataatgttatcactattgatttgatgcaaaactcttctcagaagactcaagatgatgtggacatagctgatgtggcttactattttgagaaagatgtaaagggggagtccttgttccattcatctaagagcatggacctgagggtgaacggggagctcctcgatctggaccccgggcagactctgatttactacgtcgatgaaaaggccccggagttttccatgcagggcctcacggctgggatcatcgccgtcattgtcgtggtggtgttagcagtcattgcggggattgttgtcctggttatatctacaaggaagagatcagcaaaatatgagaaggctgagataaaggagatgggtgagatacacagagagctcaatgcctaaccaaccatgccgtgtgctgcactgaggagggagccaccggacggaaatggcgaagaactcaggttgcaaacggatagacctggggaggatggagacctttcgagggtcactgctttgttagctaagctcacacatttgtaacagtgaaatttgtactcataaatacaagcagcttgacattggcattaacaatcttaaaattagacgagtgtcttacacatgcaggtctggcgtggaactcagaacttagcctgccaagataggagagcttatgcttattgttgaagtgtgtgtgtgtgtgtgtgtgtgtgtgtgtgtgtgtcataaacagcccacagtagaatacgatgactactctcatttttgtgattaaagctgcccttctacacactgagtcttgtacataataaacgtttttaatgaaataaaacatttttaaactgaaaaaaaaaaa

SEQ ID NO: 2836 - DNA, 1706 bp, Rattus norvegicus
  Genbank Accession No. AJ001517
tacgactcactatagggctcgagcggccgcccgggcaggtcagcaatggctacagggtgacttcttggatcctccacgtttccaggtcctagtgaaaaccggtggacccagctggaggcatggaccgatcagctgggctccctgtgcggctgctattgctgctgctgttgttgctgctgtggtccgtggccccgcaggcgctgcggcccggttcacattctctacgatatctcttcatgggtgcctcaaagccagacctcgggctgcctttctttgaggctctgggttatgtggatgaccagctctttgtatcctacaatcacgagagtcgccgtgctgagcccagggccccatggatcttggggcagacatcaagccagctgtggctgcagctgagtcagagcctgaaagggtgggattacatgttcatagtggacttctggaccatcatgggcaactataaccacagtaaggtcacgaagttgagagtggtgcctgagtctcacatcctgcaggtgatcctaggatgtgaggtgcatgaagacaacagtaccagtggcttctggaaatatggctacgatgggcaagatcaccttgaattctgccccaagacactgaactggagtgcagccgagccaagggcctgggccaccaagatggagtgggaagagcacaggatccgtgccagacagagcagggactacctgcagagggactgcccccagcagctgaagcaggtcctggagctccagagaggggttctgggacagcaagtgcctactttggtgaaagtgactcgccactgggcctctacagggacctctctaaggtgtcaggctctgaatttcttcccccagaacatcactatgaggtggttgaaggacagccagcccctagatgccaaggatgtcaaccctgagaacgtgctgccaaatggggatgggacctatcagggctggctgaccttggctgtggcccctggagaagagacaaggttcagctgtcaagtggagcacccaggcctggatcagcctctcactgccacttgggagccctcacggtctcaggacatgattattggaatcataagtgggatcaccatttgtgccatcttctttgttggaattctgatcctagtcttaaggaaaaggaaggtttcaggaggaaccatgggtgactatgtcttaacagagtgtgagtgacctgcagcatgcagaagcacagaagagagaagactcagccaaagacttggaggggacacacttgctccattctagaacacagctggacctaacacacagaaactgcctgaggactctgcccttagctttccctgtttgctttcttaaggtgttttctccagttaagttcagttcctgaataatagtgactgccccagctgcaacctctcccttcagaaccagtctcatgatccttaagctgctacttgcaggcatccttcgttttctgcatccacctagacttcgtatgtctacttaaaaagccccactaaatttgggggacacatgattcatttccacatctgaagaagttatgaaccttcatcctgggatgcacacattcttgtgccagaatttttcatacatatcctaggacccattcaattgtcatttgagccrcrctatctgttagtgactacrctgacttctctgccattggagtgttatggcaataaagctatgaac

SEQ ID NO: 2837 - DNA, 6412 bp, Rattus norvegicus
  Genbank Accession No. AJ131902
  misc_feature (1)..(6412): n = a or c or g or t
aattgtgagcggataacaattcccctctagaaataattttgtttaactttaagaaggagatataccatgggcagtagccatgatcatcatcatcacagcagcggcctggtgccgcagcggcagccatatggaattcatggcaacggcacttcagaagcctgggatggtcccccctccaccaggagaggagagccagacggtcatccttccacccggctggcacagctacttgtctcctcagggccgccgttactatgtcaacacgactaccaatgagaccacctgggaacgtcccagcagttctcctgggatttcagccagccctggccctcacaggagctctctgcctacaacagtgaatggataccacgcatcagggaccccggcgcaccctccagagactgcccacatgagtctccgaaaatccaccggtgattcccagaacctgggatcctcatcgccaggcaggaaacagagcaaggaaaacaccatcaccatcaactgtgtgacattccctcacccggacacgatgcctgaacagcaactgctcaagccgactgagtggagctattgcgactacttctgggcggataagaaggacccacaaggcaatggcacagtggctgggtttgaactgctgctgcagaagcaactgaaaggcaagcagatgcagaaggagatgtctgagttcatccgagaaaggataaagattgaagaagaatatgcaaagaaccttgctaagctctctcagaactccttggctgcccaggaggaaggctccctgggagaggcatgggcccaagtaaagaagagtctggccgatgaggctgaagttcatctcaagttctctgccaagctccacagcgaggtggagaaacccctgatgaacttcagagagaacttcaagaaagacatgaaaaagtgcgaccaccacatcgctgacctccgtaagcagctgggcgagagccgctatgcctcagtggagaaggcccgcaaagccctcacagagcggcagaaagacctggagatgaagacccagcagctggagatcaagttgagcaacaagactgaggaggacatcaagaaggcacggaggaagtccactcaggcaggagatgatctcatgcgctgtgtggacctctacaaccaggcccagtccaagtggtttgaagagatggtgacgaccaccctggagctggagcggctggaggtggagagggtagagatgatccgacaacatctgtgccagtacacacagctgcggcatgagacagacatgttcaaccaaagcacagtcgagcctgtggaccaactgctgcgaaaagtggacccagccaaagacagagagctatgggtcagagagcacaaaacaggcaacattcgcccagtggacatggagatctagaagtgactgtatggtcctgggggtcctcctgaggagaggggctgggggtcccatggagaaggggctgtatctgccctattacctgctaatctatccagggaaaaggaggaaaagagacagtgattcccgaaggangngggcccagccaggggctcccccaatattcccaggccataatgatggacccacagccccaacttcacctcaaagactggagcctcccctccaactcccatgctgtgcttgtcactctgagaaccaactgaggctagaaccctggggtcccagctgagttccacaggggtggccatcacacacctgtgccccaggtatccaaggcctgtcctctagcgggattgtcatctccaggaccatggaaggggaagggggtggtgtctctgtctccaaacaatgtcaggatcaggatcgaggacaggagggaaagtgaagttcgcatcctgtcccacaaccttttttagtcctccctacttctccctttgctttgtaggagcccccatctattttttttcgtctcccacaagaatggtggagtttcttcccaacccaaatctggagaggtcagaatggaactacctcagttggcacaaccagatcatagctcccatcagtttcagattccagatctggcattgactgtaaagtctaccacaaagtcccaatctacctttcccccaacctctttctcaaggaggaaactccacacctcatccagacagccctttccagactcaatagaggatattttcccaagtcctcagacagctagatgcatgatcaaaggctttgggggtggagccccacaaagtcttgtttgacacatgcccccgcccctcatcactatgacagccttgaccagtatgctctcccgtgctgactacaggccatgtgagtcagcggtggtaatattcaggtttggttattctctagaatggctctagctgtggatgtgcacaatggagtaggacctgctgtcccccttactgccattggtccgtagtgcagagtctcatggctgtaggtggttgccacccaggaaacgtaggaacgttgggtcgtcacacagtgagtggggttggggggtgaattctagctgggaacttgtgcggggtggggggcatttttcctcgtctttccacagatgactttgtgatttgacctgtctacccaaagggcagaatcccctgagcagcacgaattcggcacgagcctgagcgccactcccatcttgccatctcacatgcttgtcgcggatagcttactaatcttggacctttgggcagcccatccacagaaccatctctcatggttgttagcaagatgcctaatacactaaagcaaactaagcactgtcactttccttactgaaacatctcaaccataaaagccaccatgaggacatttcaccaacctgtgttcagcatggaccccgtgacaccagcctctgatattaggacattatttcttgatttccttattaaagaaaatgggtgctagtggtaatttgctttgtggcttagcaacctaatttgtgagtgatggtcaagttccaagtcttgtcatacacaggggttttgggtatcacagtgtggctcatgactttgttcccttgccacctcgcttaggacattcagagtcccctgagatgtcacttcctccagcataactgaagttggctgatgtgagccgattccgtgtgaggctattctctttttgttgtcccctcacttcctttttaatctatccatgtatacattttccttcttttgtccccttctttccattgatcattcatttagagttttgttaaagacaagcaatctgtgatctctcatctgaagacagcgtacagctctgtgatgcaaagaaaccctcagacgttctgtatagatccaccccttcctgagatgcacttggctctccctctccggtaccagctctatgtgggttcatgtgcacctggtttatgtgccgtgtgctggttcacaggcatctgttcgttttcatactcataaatgctctcagtaatgctggaacggtgcgagtgcgactagcaccatgtgtctaggagggcacccccccagcttcggctccacctccggtttgaccctttctggacagaggaaacaatacattttccaccccacacactgggattcttgaagtattaactgtgctaagagatcttggcacagcagtgggatcttgagtctcctgactaccaaatctcagttcacaccaagctcaatttcagaaatggctgcagttggtttccggtatgtttccttctactacaaatagggaagataagagcatagaggaggtgggtgccaggaagtgatgcccagaactgtgattgtggtagagtcacgtgtcccaactaccctcactgtacccaggggatgaaaccaagaagatgatgatgtgcaagaacctgaaagtgcatactgagttgagtattcaagctgctgttgtggtccttggtctccatgcagtgctggatacccaaccaagagtcatgtgtctaggccagttgctctaccacttagctattcccatccccgttaccttgcttttgtgaacacgccagtgcataggttctgagaggatctggcagggtttatttagagtgggcgagcatccattgtccaggctgagagcagcaacagccctttctacctgcccccgactaggagtgccaatgcacttaagctttgtctgcaaaaccctgattttaaaaaaaaaaaactctaaaatgaatgatgttcaaaaatgggttagttgccatggcaacctccaggaagagatacttgttacccttcattattttctagtacctttgaacagtctcacagtgcaggggccatttgaaggatgtgaatggcagccctaggctgtctctgctatgggggccacctttctacctccacacaagaccctgttgactcgggaggatctctgcaatggttgattaatagctgaggcaaagtatccaaatttgtgacaggggtttgtttgtgtgcaatccctctgtggaatccacccaattatgagggtagtggatgggtgcatgagaatcttggttaagccaaagccccttcatggaaatacaagccataaaattcaaaaggtgtcaaaagaccttggcttgtttgggggtttgttccccatctgtgagtagacttgacaagaaggatttaaacaggagtctgaagacctgctgttactaggaagctaagaaaggcattttacagacttgaagtagagaagcaggtcagctcctgatggcttagactgaagaccccttcattgccaaagttgttcccatgccacaaagcatctctccaactcccttttcaaggtaaattgaaggtgtgactaaaatacaagtacaactcgccctttcaaggaatgcagttctatgaaccttaccatgactggtcttctcaaccacaaccaagataagcatatcaccttgtcaattcctcttttcccaccccggatctagcagccagttcaatgttctgtccctataattttgcctttttctacaacaccatgtaaatggagtcacactgatacaaccttctggatcagccatgttgtgggtgtcagtagaaggtcccctttccctgctgagtgttctatcaaatgaatgggccctaggatttccttagttttaaaatgaggtttttatgccttggaagtcctagccccagatcttggcacagcagtgggatctgagtctcctgactaccaaatctcagttcacaccaagctcaatttcagaaatggctgcagttggtttccggtatgtttccttctactacaactagggaagataagagcatagaggaggtgggtgccaggaagtgatgcccagaactgtgattgtggtagagtcacgtgtcccaactaccctcactgtacccaggggatgaaaccaagaagatgatgatgtgcaagaacctgaaagtgcatactgagttgagtattcaagctgctgttgtggtccttggtctccatgcagtgctggatacccaaccaagagtcatgtgtctaggccagttgctctaccacttagctattcccatccccgttaccttgcttttgtgaacacgccagtgcataggttctgagaggatctggcagggtttatttagagtgggcgagcatccattgtccaggctgagagcagcaacagccctttctacctgcccccgactaggagtgccaatgcacttaaagcttgggttgggtagtgcggatgatgtttagactctttctgggtggtattagggatgtgagccctatgtgtttaaaggagagtttccaataggactgtgttggtggagtgtggaggccggaagccacactatggcaccggggcagaaaggaagaactgagactggccctcccctgcttcccagtctgtcccacatcctaagatcacaccccgggggactcctctgtgctcacctgttccttcctgcagcttcctcgacagacaggttcttggacccaggtaccgacattccaagggacaccagccaacctgggtgagggccgcactctgtatgtcttcccttccctggggaaagagatacccagaagcacccccttacaacctgagcacatgagcgaaccccatgaaagtggaattttctaacaaaataaacttgctcgttttgtctgttttctgtaacttttgctaaatactttatacatttttaatgttgaaaaaaaaaaagcagtgtctcctgccagaactcctcacccgggatgaatgtgtttacttctcgctgtatatctttccatgctgcggctgcctggaccagtaaataaaatggatgtaatataagttgtaagtaacattgtcaaaactcagatcccaatggaggctgcccgcctcccccaccccatgatagcatctctgtgtattaattctgaagaattaaatgtttaaattagaaaaaaaaaaaaaaaaaa

SEQ ID NO: 2838 - DNA, 1442 bp, Rattus norvegicus
  Genbank Accession No. D00362
aattccctggggcgccctcttttaaaaatggagtcccaaatacagagaagatttcatcaccatggtctccctgtgtcaaagagctcttgttcttccgccatgtggctctgtgctctggtctgggcttctcttgctgtttgcccaatttggggacacccatcctcaccaccagtggtggacaccacaaaaggcaaagtcctggggaagtatgtcagcttagaaggatttacacagcctgtggccgtcttcctgggagtcccttttgccaagcctcctcttggatctctgaggtttgctccaccagagcctgcagagccctggagcttcgtgaagaacaccaccacctacccgcctatgtgctcccaagatggagttgtgggaaagttactcgcagatatgttgagcaccggaaaagagagtatacctctcgagttttccgaagactgtctctacctgaatatttacagtcctgctgacttgacaaaaaacagccgattgcccgtgatggtgtggatccatggaggtggactaataataggcggagcatcaccctatagtggactagctctctctgcccacgaaaacgtggtggtggtaaccattcaataccgcctgggtatttggggattgtttagcaccggtgatgaacacagccgggggaactgggctcacttggaccagctggctgcactacgctgggtccaggataacattgcaaactttggagggaacccggattcagtgaccatctttggagagtcagcaggaggtgtcagtgtctctgctcttgtcttatctcctctggccaagaacctcttccacagagccatttctgagagtggtgtgctcctcactacaaacctggacaagaagaatactcaggctgtggctcaaatgattgctactctttctgggtgtaataacacctcatcagccgccatggttcagtgcttgcgccagaagacagaggctgagctcttggagcttacagtgaaactggacaatacctccatgtccactgtgattgatggagtggtactgccaaagacaccggaagagatcctgactgagaagagtttcaacacggtcccctacatagtgggcttcaacaagcaagagtttggctggatcattccaacgatgatgggaaatctactctctgaaggcagaatgaatgagaaaatggccagttctttcttgaagaggttcagccctaaccttaacatctctgagagtgtgattccagcaatcattgagaagtacttaagaggaacagatgaccctgccaaaaagaacgaacttctcctggacatgttttcagatgtctttttcggtatcccagctgtactcatgtcccgtagcctcagagatgccggagcgcccacctacatgtatgagtttcagtatcgcccaagcttcgtgtctgaccagagaccccagac

SEQ ID NO: 2839 - DNA, 1052 bp, Rattus norvegicus
  Genbank Accession No. D00698
ggacgtaccaaaatgagcgcacctccaataaagatacacatcatgtcgtcttcacatctcttctacctggcactctgcttgctcacctttaccagctcggccacagccggaccagagaccctttgcggggctgagctggtggacgctcttcagttcgtgtgtggaccaaggggcttttacttcaacaagcccacaggctatggctccagcattcggagggcaccacagacgggcattgtggatgagtgttgcttccggagctgtgatctgaggaggctggagatgtactgtgctccgctgaagcctacaaagtcagctcgttccatccgggcccagcgccacactgacatgcccaagactcagaaggaagtacacttgaagaacacaagtagaggaagtgcaggaaacaagacctacagaatgtaggaggagcctcccgaggaacagaaaatgccacgtcaccgcaagatcctttgctgcttgagcaacctgcaaaacatcggaacacctgccaaatatcaataatgagttcaataccatttcagagatgggcatttccctcaatgaaatacacaagtaaacattccgacattgtctttaggagtggtttgttaaaaaaaaaaacaaaaaacaaaaacaaaaacaaaaaaaaagcttgcaccttgcaaaagtggtcctggcgtgggtagattgctgttaatcctttatcaataacgttctatagagaatatataaatatatatataattatatctcctagtccctgcctcttaagagccgaaaatgcatgggtgttgtagacattcggttgcactaaattcctctctgaattttggctgctgaagccgttcatttagcaactgtttataggtggttgatgaatggttccttatctccatttcttcctatgtagcttaagccgcttccttcacagaatctaataatctcgtctaggccattagccctgccctttcttaacattcttgtatttgttgaatttggcctcctcgaaagcaatagcaactgggtggcccacccaagttttaacgccc

SEQ ID NO: 2840 - DNA, 1083 bp, Rattus norvegicus
  Genbank Accession No. D00729
acacaactctcaatcatccagtgaactgggctgactgtggcaggacctgggcggtgaggaaacccttggggacaccgatgtggcttgagcctgctcctcttcttggcgctggcctctcccgtcgcgttctgctgcaggccggatcccgcctcgccgcaggggggcctggacgagcccgtcgcttctctaacaaggcggtgttggtggagaaggagggcgaggcaggaatcgcagtgatgaagttcaagaaccctccagtgaattcctcagcttggagtttccgacagagttttcgtcatcagcctgagaagctggaaaatgaaaagagcatccgaggtgtcatcctcacttcggagcgcccgggaacctccccgccgccccacgacatgaagaagaaggacgaccagcccactatgctgagtactggaaggctcgtgccaggagctgtggctgaggctctacttgtccaacctgacttgatatctgccatcaatggcgcctttccagctggaggctgcctcatggctctcacctgtgactacaggataatggcggacaactccaagtataccataggattgaatgagagcctgctgggcattgttgcccccttctggttaaaagacaactacgtgaacacatcgggcaccgagcagccgagcgtgcccttcaactggggacgttttcccactaacatgacagcagctgctctactgacgcttcacagaagcctcaatgaggtggtacctgaggatcaggtacacagcaaggctcgctcagtgatggccaagtggtttaccattccggaccattctcggttgctgacgaagagcatgatgcgcaaggccacggcggacaacctgatcaagcagcgagaggctgacatccagaacttcaccagtttcacctccagagactccatccagaagtccctgcacgtgtacttggaaaagctcaagcaaaagaagggctgacctaagggtgccacacggtgtttagttacacgtgccttctagggacccatggtcccaaggattatcaataaggtatttttcaatttaaaaaaaaaaaaaaaggaattcc

SEQ ID NO: 2841 - DNA, 2051 bp, Rattus norvegicus
  Genbank Accession No. D00753
tggcaaccctgaacatcaggagtcagcaatcacagaggcaggcagctggctggtatcgctctgcagcctgaagactggagaagatgacccgccttgtgactctggagctcttgatggctgggatcggctctgctctcctctgcttcccagattgcatactgggagaggacactctattccatgaagaccaagacaaggggacacaactggacagtctcacattggcctccatcaatactgactttgccttcagcctctacaagaagctggctttgaggaatccagataaaaatgttgtcttctccccacttagcatctcagccgccttggccgtcgtgtccctgggagcaaagggcaacagcatggaagagattctagaaggtctcaagttcaatctcacagagacccctgagacagaaatccaccggggctttggacacctcctccagaggctcagccagccaagggacgagatacagatcagtacaggcaatgccctgtttattgaaaaacgccttcaggtcctggcagagttccaggagaaggcaaaggctctgtaccaagctgaggccttcacagctgatttccagcagtctcgtgaggccaaaaagctcatcaatgactatgtgagtaaacagacccaggggaagatccagggactgatcacaaacctagctaagaagacatccatggtactggtgaattacatctactttaaaggcaaatggaaggtgccttttgaccctcgggacacattccagtctgagttctactctggcaaaaggaggcctgtgaaagtgcccatgatgaagcttgaggacctgaccacaccctacgtccgggatgaggagctgaactgcactgttgtggagctgaagtacacaggaaatgccagcgccctgtttatcctccctgaccagggcaagatgcagcaggtggaagccagcttgcaaccagagaccctgaggagatggaaggactctctcaggcccagcatgatagatgagctctacctgcccaagttctccatctctgctgactacaacctggaggacgtccttccagagctgggcatcaaagaagtcttctccacacaggctgacctgtctgggatcacaggggataaggacctgatggtctctcaggtggtccacaaggctgttctggatgtggctgagacaggcacagaagcagccgctgccacaggggtcaaatttgttccaatgtctgcaaaactggaccctctgattatagctttcgaccggcctttcctgatgattatctctgacacagaaactgcaatagctccctttttggccaagatatttaaccccaaatgagattcgaacttcccaagagttgatcgttctcctgaggcattgagcctgtctgtgggtctctgtgtgcatttttggcttctatgctctgattggccatggcggcatgcctggatgagacagtaactaactgtgtaacagcctcatgtacagacgcctgtgcagagtcgctgccatgctcccaaacttcttggtaccactagctcatatttctgagcctaaaatttgtctttcccctgcccttgctctctctcccctgtatctgcctcaacccagaagccagggccccatcaggttgtctcagtcccttcttaggccttagttatatcttccttcagcgttgctgtcttgatgggactgtgcacgattaccggccaacccacatggaccaagaagaacacttgctggtccgtatctttctgcagtatgtgggatcacttggtgcccagtgctgcctcactatttccttcctctgggcactgctccttgcagcatggcctgaccttgtccacatctggcacagagctggagccctcccttctgcagatgcatggcacctgtgggtcagaccagatccccctccccagcactcctacttagagcaatgcagcctttcttttagttcccagctgaccaacctcacacaaaagatgaccaacaacaaccaaaatgaagaggtaggagcaaaggatcaataaacacatcactgcattg

SEQ ID NO: 2842 - DNA, 1292 bp, Rattus norvegicus
  Genbank Accession No. D10233
tcctagtgttacaggacatggagaaggaacgggagacactgcaggtctggaagcaacgtgtgggacaagagctcgattctgtgatcgctttctggatggagcattcccatgaccaggaacacgggggcttcttcacatgccttggccgcgatgggcaggtatatgatcacctcaaatatgtctggctgcaggggaggcaggtatggatgtattgtcgcttataccgcacttttgagcgcttccgccgtgtcgagcttctggatgcagcaaaagcaggtggtgaatttttgttgagttatgcccgggtggcaccgcctggcaagaaatgtgcttttgtgctgacccaggacggccgtccagtgaaggtgcagcggaccattttcagcgagtgcttttacaccatggccatgaatgaactgtggaaagtaacaggggaaatgcattatcagagagaagccgtagagatgatggatcagatcatccactgggtaagggaggacccagctgggctgggccggcctcagctctcgggaacactggccacagagcccatggcagtgcccatgatgctgctcaacctggtggagcagcttggagaagaagatgaggagatgaccgacaagtatgcagaactaggggactggtgtgcccataggattcttcagcatgtccagagggatggacaagttgtactggagaatgtatcagaggatggcaaagagctccctggttgccttggaagacatcagaacccaggccacacactggaagctggctggtttctgctccagtatgccctcaggaaaggtgatcccaaacttcaaaggcacattattgacaagtttctcttactgcctttccactctggatgggaccctgagcacggaggcctcttctacttccaggatgctgatgatctctgccctacccagctggaatggaacatgaagctgtggtggccacacactgaagccatgattgccttcctcatgggttacagggacagcggggacccagccttgctgaacctcttctaccaagtggctgaatacaccttccaccagtttcgtgatcctgagtacggggaatggtttggctacctgaaccaagagggaaaggtggcccttaccatcaaaggaggtccttttaaaggctgcttccatgtgccgcggtgcctggccatgtgcgagcagattttgggagccctactccaacgccttgggcccgcccccctcggctccttgcccgctgtccccactcgcgaaggctcgaaataaagctgaccctgttcc

SEQ ID NO: 2843 - DNA, 2540 bp, Rattus norvegicus
  Genbank Accession No. D10262
ccgcggcccactacagcagtcgcccgccgtcagcctcccgcgctcgtctctcgtcactgctgctcggcgtccattgctgcctctccccgcagtcgccgacgtcgcttccccgcgcgctcccacaaccgccgccccgccggtcagtgaagccggtgagccattccccgcgccggcccccagaggcgggcatccagccggaccccgagtgtggccctctcctgctgtggccgtccgcgccttctcgaccgcttatccagcatgaaaaccaagttctgcaccgggggcgaggccgagccgtccccgcttgggctgctgctgagctgcggtggcagcgctgccccgacgcccggcgtagggcagcagcgcgatgccgcaggcgagctggagtccaagcagcttggtggccggtcccaacctctcgcgctgccgccgccaccaccgccgcccctgccgctgcccccgccgccatcaccgccgctagcggacgaacaacccgagccccggacgcggcgcagggcctacctgtggtgcaaggaattcctgcccggagcctggaggggccttcgcgaggaccagttccacatcagtgtcatcaggggtggtctcagtaacatgctgttccagtgttccttgccagactccatagccagtgttggtgatgaacctcggaaagtgctcttgcgactgtatggggcaatcttaaagatgggggctgaagcaatggttctggagagtgttatgtttgccattcttgcagagaggtcacttgggccaaaactctatggcatctttccgcaaggccgactggagcagtttatcccgagccggcgattggacactgaagaattatgtttaccagatatttctgcagaaatagctgaaaaaatggccacatttcatggtatgaaaatgccattcaataaggaaccaaaatggctttttggaacaatggaaaaatacctgaatcaagtactaagacttaaattcagcagggaggccagagttcaacaactgcacaagttcctctcttacaatctgcctctcgagcttgagaacctgaggtcattgctgcagtatactagatccccagttgtgttttgtcataatgactgtcaagaaggtaatatcttattgttggaaggccaagagaattctgaaaagcagaagttgatgctcattgactttgaatacagcagttacaattacaggggatttgacattggaaatcatttctgtgaatggatgtatgattatacctatgaaaagtatcctttcttcagagcaaacattcagaagtatcctacccgaaaacaacagctccattttatttcaagttacttgactacattccaaaatgattttgaaagcctcagcagtgaagagcagtctgctacaaaagaagacatgttgcttgaagtcaacagatttgcccttgcctctcatttcctctggggactttggtccattgtacaggccaagatctcatccattgaatttgggtacatggaatatgcccaagccaggttcgatgcctactttgaccagaagaggaagcttggtgtgtgaatggatggctccactcttcaccactggactgcaggaggtggctgcaccaggccctcagtggagcgctgctgtgaccactgccctgggcagaaggcctggacgtctcactactgagcaccgatgtgtatgatactacagactatattaaagtggagtaacatttctttcatctttgtttacactctcactaggactctgaaccatgattggaagcagaaatatagtgtgatagtgcaatagctcagaccccgcctaagcgggaggcctttcagctacatggctacagcttcagccacttaggccccagccagacagagcagtgctgtgtgggtactgagtgctgacttaggatattaatgtgctgcaacacgttcatgaccaggctttgaaggtgacagtctgacaatgtgttggagacactctgaagggcaagtgaacagacatactgtgaaatggctcgacaggaggagcctgaattgtggggtctgtggaggcagccagctgtttctgtacagggtacacttgactatgggtatgcatctgcaggcagtagctgcagccctcctgtgcctgtgtacacatgactacaggggccagtgtcactgactggccataactgcagtgtctcctaactgggtgtgctttatgcttcagcttcccggggaggagcagtggagccagcttcctcaccccttcttgccttctctctgcctgacctggaacttgggctttcgcccattgccctctgaagctgcttcccatctgatgtcactgggagacagcagctgtatgtgtggggtattggggtgcaggtagattagagctgtgaaatccatgtacattaatacccaatgggataaacctagaatttttttttttttactctgaactctgaattgttttgtgcacatatttctgctaccaccgaaactgtattatacagataaataaacaacttgaaacttaaaaaaaaa

SEQ ID NO: 2844 - DNA, 972 bp, Rattus norvegicus
  Genbank Accession No. D10655
atgtcgtgctccgatgaatacagttactttagctcagcagacttcatggcttcagcatttcacgtgcttacgtcaatcgaggtacctgttcatatatttgttggctatgttatcctattcaaaactccaagtagaatgggaaatgtgaaatggttcatgtttcatgttcatttttggagcgctattctagatgtgagcttcacgtttctggtgactccgtactttatttttcccgcaactgctggctattcacttggggcttttatttggattggactagatcctgcgattcaggtgacagttttggttgtggaaattggattgacaattctatcaattctaatccttttcgaaaatcgatatacatttttggcgtcatcaacaaaccactggaaacgagtgcgacaagcgtcttttgtgattttatatattgttgctctaacttattttataccatttatttttcaagtcccagatccggaaatttctgttccagtcgtgctcatgcaacttccaactctgcgatgcttctacaaaggaccaatatttgtcttcaccttggactccaccgttgtcgcaagaatcacaatgctaaagttaattatcgagttcagttacctcggtctactagtatacttgacatttcaaagtcttatcaagcaaacgaaaaacgctgtactctctcgtaacaccttggctctccagagaaaatttttcatttcaatcataacacagacaattattccatttgcaattattattctcccaatttcatattgtgggtattctttatctcaagaatattataatcaaactttcaataatattgcatttattattatttcttctcacggattgatatctactattgcgatactgctgattcatgaaccgtatcgaaaaacattattttcatcgttctgctgttctcggacaaccaggacacatccgacaaactctcaggattcataa

SEQ ID NO: 2845 - DNA, 1561 bp, Rattus norvegicus
  Genbank Accession No. D12573
gagtgtgtggtctggggccacctctctctttttgggtcaaatgagagtttggggtatcttgtgtctgagggcccttctggagtagtgtcaagggactaaaaggatgtaaccattgctctctcctttcacttcctttggttggggggaacccaggtgggacttggctcttctgccatgggcaagcagaatagcaagctgcggccagagatgctgcaggacctgcgagagaacaccgagttctctgagctggagcttcaggagtggtacaagggcttcctgaaggactgcccgactggcatcctcaacgtggatgagttcaagaagatctacgccaacttcttcccctacggcgatgcctccaagttcgccgagcatgtcttccgcacttttgacaccaacagcgacggcaccatcgacttccgggagttcatcatcgctctgagcgtgacctcgcgtggccgcctggagcagaagctcatgtgggccttcagcatgtacgacctggacggcaatggctacatcagccgggaggagatgctagaaattgtgcaggccatttacaagatggtttcgtccgtgatgaagatgcctgaggatgagtctaccccggaaaagaggactgagaaaatcttccgccaaatggacacaaacaatgacggcaagctgtcactggaggagttcatccgcggggccaaaagcgacccatcgatcgtgcgcctgctgcaatgcgatcccagcagcgcttcccagttctgagctgagaggagccagctcgcctccctgccttcaccggccctccggctctcagcttcctctccctcgtgtctatccaggctggggaatccccttctgggtctgcactgtgggggggcctctggagaagcgaaccctgcaaggaaggggctaagcaaggcagccgttagtccccacggcctaagaggcagaatctcccttagtggaccgagattacccccgggtcaggttctgtatctttccccagacagctgatcaccttccacgccacccacaacccgaggctcttccacaacacgggaagaggggctaggtccttcttgggtggtcctcagcctggagggaggtggggatttgtgccaaggtgaagagtctttttgtttgttttggtggggaagaccggaggattactgggctgtgggactttgaagaagttccctgatctacttccctgcagaagaacacttcctgtcccagctcttgctgctggaggcatggtaaaaagaagatctcccaggattccaactgggggtccccaaacccagcctgcctctttgcacttggataacacagatttacccgtctgtcctctgtatttctctctccttccccacctcacacacgcacggggccgcgcgacatgcgcgcgcaacacacacacacacacacacgcacgatatgcacgcacacatgcacagcacccgcgcacacagaggccggcagacagatgagcagagcccctccacagcgttctgtgtgggaaagaagtgcagcccctgccaagccccatgtccctctgcatgcgccg

SEQ ID NO: 2846 - DNA, 1196 bp, Rattus norvegicus
  Genbank Accession No. D12770
ggtgcggtgcctggccgggcgtaggcaagagcaaaagagcggctccttgcagactgtgcgcgcccgcgtttcagcatgggggatcaggctttgagcttccttaaggacttcctggcaggtggcatcgccgccgccgtctccaagaccgcggtcgccccgatcgagagggtcaaactgctgctgcaggtccagcatgccagcaaacagatcagtgcagagaaacagtacaaaggcatcattgattgtgtcgtgagaatccccaaggagcagggctttctctccttctggaggggtaacctggccaacgtgatccggtacttccccacccaagctctcaacttcgccttcaaggacaagtacaagcagatcttcctgggaggtgtggatcgtcataagcagttctggcgctacttcgctggtaacctggcctctggtggggcagctggggctacctccctctgcttcgtctacccactggactttgctaggaccaggctggctgccgacgtgggcaagggatcttcccagcgtgagttcaatgggctgggtgactgtctcaccaagatcttcaagtctgatggcctgaagggtctctaccagggtttcagtgtctctgtgcagggcatcatcatctacagagctgcctacttcggagtctatgacactgccaaggggatgctgccagaccccaagaatgtgcacattattgtgagctggatgattgcccagagtgtgacagccgtggcggggctggtgtcctatccatttgacactgtccgtcgtaggatgatgatgcagtctggccggaaaggggctgatattatgtacacggggacagttgactgctggaggaagattgcaaaagatgaaggacgcaaagctttcttcaaaggtgcttggtccaacgtactgagaggcatggggggtgcttttgtattggtattgtatgatgagatcaaaaaatatgtgtaatgctcaagttcacaggttcacagatccattgtgtggtttaacagactattcttaaggaaataaaaaaagacagatcatggataaaaccagaccataaggaatacctcagaaaaatgcttcattgagtattcatttaaccacaaaagtattttgtatttattttacatttagattcccacagcaaacagaagatagcttatcatacttgttcaattaattaactg

SEQ ID NO: 2847 - DNA, 2842 bp, Rattus norvegicus
  Genbank Accession No. D13623
tcgcggaaggtgacgtggacacggaagtggtcgtcgtcgcggcggcaccggtgggagcggggccctgcacttggagtgcggcgggcaagcggacgggtggcggaggcctctcagcggcggcggcggcgacttaaggcgcaggcgtggtccgttgggtgcgaatccgctgagcccacgagcggcctcttagccctctctcctgcccgtcggaaaccgggagcagggacccgcttagccggcgtcatcatgaccaagaccggtagcaagggcgggaacctccgcgacaagctggacggcaatgagctggacctgagtctcagcgacctgaatgaggtccccgtcaaggagctggctgcacttccaaaggccaccgtgttggatctgtcctgcaataaactgagcactcttccgtcggatttctgtggcctcacgcacctggtaaagctggacctcagcaagaacaagctgcagcagctgcccgcagactttggtcgcctggttaaccttcagcatttggatctcctcaacaacaggctggtcaccctgcctgtcagctttgctcagctcaagaatctgaagtggctggatctgaaggacaatcccttggatcctgtcctggccaaggtggcaggtgattgcttggatgagaagcaatgtaagcagtgtgcaaacaaggtgttacagcacatgaaggccgtgcaggcagatcaggaacgagagcggcagcgccggctggaagtggagcgagaggcagagaagaagcgtgaggccaagcagcaagctaaggaagcaaaggagcgcgagctgaggaagcgggagaaggcggaggagaaggagcgtcggcgaaaggagtatgatgctcagaaagcttccaagcgggagcaagagaagaagcctaagaaggaaacaaatcaggccccaaaatcgaagtctggctctcgccctcgcaagccaccaccccgaaaacacaatcgctcctgggctgtgctgaaggggttgttgctgctgctgctgctatgtgtagcaggagggctggttgtatgccgggtgacagggctgcaacagcagcccctctgcaccagcgtgaacgccatctacgacaatgccgtccagggcctgcgccatcatgagatcctccagtgggtcctccagaccgactcccagcagtgagctcatcctcagcaccgctgcctcccagcctcggagcttggattcctatggaattgggttctgctggacacaacttctttttagcgtcagacctacctgccatcatcaaatggctgctgagtggtacttgagatctcccctttgtaggacttctctgttccttagtcagggttccctggtggaatgaggagaaatggagaggggggaggaagagttacctgcatgcctaaaggaataggcttaggggtggggagagagaaggcataggcttttctagttatgcaaagctgtgtaaggcaaggttcctttctactaaatggtcagctgtcactacatttatacttttgtatgtcacaaaccctttctttcattcctccctgggtaaccaggacggattggagggcagtgtgttactgggactaggggactaggaatacttgggtaaattcagcctaagctgggagggtaaagtaatacatttccttaaagatctcagacagtcaagcattttagcaatgtccaaaatgtctggctatgaacacatgttcactgccattggtccagtgtaacactttgaggcaggaggtgccgtccatgacttacttgcctacagtgttcaagctagtccaaggcacaacccagctttcactccagttttcttcctttcctttatgtcatttggcctcctttataatactcaaggggatgaactcacaccagagttgtcttagctaaagtgaatctttcataatagacggtcttaccacccacaaatagatctcatcagggtcctgggaaactaatcctgtggaattttgcctcagcttaaatggcttccacaaaatggcagcaggctgggctccttgcctcccttttagagcattaaactccctgatggcctggaagcacaggggcagatctctgcagcggcactgtgactgccctactagcacttggtatgatgaaatacctcaaaggcaacctagaaacttgatctcacagaagcaggtgcagagttgcttctggacctgtaacagaagggaaggaatagaacagtgggagccaaagggaaacaaagtcacacggtggcgctgcaagtgatacataagtaaacattagcacaaaccagggcagcagcacccacctccctgctgctaccagaaagcattctccccgcttccctgtctcttcacaacagctgcaggaagggatcggaaacctgtctcggtgcttatttgctaaaactcccaactgcaagctctccctagaggagcaggacctgtcggagttcagacagtgtagccccagtggcccatgtgcttaggtcagccactcaagactgtcctgacacgggaagaaaggcctttgtttttccctcccccagatagttctgccgtgtaggtccacaccttactcagaatcactacacattcctttagtcttcctccaagctccagagccatcggtacaaatgctttattgagacaaaatacatactacatatggtgacatcatgaaaacagaagtcagcctcatagatccctggctggttgaggcagctcagtggctgggcgtagtcaagccaacccgcaggcaagagttcactctgacttcgagatttgatgcttattctttggatttctacaattattaaatccgtgtctgagtggtc

SEQ ID NO: 2848 - DNA, 1835 bp, Rattus norvegicus
  Genbank Accession No. D13667
aagcttgagtgtgagagtcagggtgtgtgagttggcacatgtgtaagagtgtgagagtttatgagttctgtaagatgtgtgtgtgaatgtgagttctgtgagtgtgacctgtgtgtgagcgtgagcgtgagagggaggatgtggcggagtctccacacacacatatccatttgctgaaatgaccctgttcatcagccaagccagggacagcaaatgcagtctctgggccatagtggaccccatactctttttttttaatgtaaataaaatgcacacacacaagtatgcatgcacatatgcgtgaacacatacacacacaagcatgcatgtatatgggtgtgtgtgtgtgcacgcaacatacatattcttgataaagatatacctttactggaacaaaagattgcagttagagtgttaaaatattctccaagtagctgctttcttttctcttcctctccaactgctgaaattgaatggacagacttgtccaccagtataaaggcatatctgcaattaaccaacatataaaaaatgtcacattttgtctttgaaatctttttagaggatttatgtactgattttctgacttcaggcatgacttttttttttattaccagggaatttcatatatgcatgcaatgtgctttgctcaaacccacttctctctcacctctccttttcaatttcttcattatcccctctccacttttccattcccaacttcatgtgctcttttttgtttttcttcctagccagccagatatccagcatgaatggggcaggagctcgagaatcccacccatgtgaggagctactggtgactggggatgatagggagagacggtcagttctcttcaggcccctgagaggctagcccacgaggcagagggtagtcctacaccttgtatgtacaggcagcaccaaataaatgaagctgtgttggaacacagccacacccatcctgcctgctatggaaccccggggctcaggtgggtgattgcagtacatcagtcctacaaccctcaggcacttgctctctgactcttgaaactttcagacccccagctgggctgggaggggagccaggaagaggggtgtgatgctcttcatactgctgttctttgacaggacaccagaggctcccctccccctgtggaaggttcacacctccaactgtcctgtccaccctcacagaaggacaaacatcgatcagggtcaaattgacaataaaagggctggagcaagcaacagggactcaccaaccaggcctcgcctctgagttcagcccagagctagctgggaaatgttccggatgttggccaaggccagtgtgacgctgggctccagggcagcaagttgggtacggaacatgggctcgcaccagctgctggtgccacccccagaggccctgagcaagcccctgtcaattcctaagaggctcctgttgggtccgggaccctccaacctggctcctcgtgtgctagcagctggaagtctgaggatgattggccacatgcaaaaagagatgtttcaggtaggccttggtggcaggaggggtggtgatcactgggtagcaggcagaggagaggatctgacctgtgtgctcactgtctagatcatggatgagatcaagcagggcatccagtatgtgttccagaccaggaaccccctcacactggttgtcagcggctcaggacattgtgccatggagactgccctgttcaacctcctggagcctggggactcctttcttgtgggaaccaatggcatctgggggatacgggctgcagagatcgctgagcggattggtaagggagagtggtctgtgacctcgg

SEQ ID NO: 2849 - DNA, 3751 bp, Rattus norvegicus
  Genbank Accession No. D14014
agaaagagagctacagactccgcgcgctccggaagaccgggtcgtagagctcgagacaactcccgccagcagcaagacacgggagacccaaccaggatgacaaccctccccaggccgcccgctccatggaacaccagctcctgtgctgcgaagtggagaccatccgccgcgcgtaccctgacaccaatctcctcaaccgaccgggtctgcgagccatgcttaagactgaggagacctgcgcgccctccgtttcttacttcaagtgcgtgcagagggagattgtgccatccatgcggaaaatcgtggccacctggatgctagaggtctgcgaggagcagaagtgcgaagaggaggtcttcccgctggccatgaactacctggaccgtttcttgtctctggagcccctgaagaagagccgcctgcagcttctgggggccacctgcatgttcgtggcctctaagatgaaggagaccattcccctgactgccgagaagttgtgcatctacactgacaactctatccgccccgaggagttgctgcaaatggaactgcttctggtgaacaagctcaaatggaacctggccgccatgactccccacgatttcatcgaacacttcctctccaaaatgccagaggcggatgagaacaagcagatcatccgcaaacatgcacagacctttgtggccctctgtgccacagatgtgaagttcatttccaacccaccctccatggtggctgctgggagtgtggtggccgcgatgcagggcctgaacctgggcagccccaacaacttcctctcctgctaccgcacaacgcactttctttccagagtcatcaagtgtgacccggactgcctccgtgcctgccaggaacagattgaagcccttctggagtcaagcctgcgccaggcccagcagaacatcgatcccaaggccaccgaggaggaaggggaagtggaggaagaagctggtctggcttgcacacccaccgacgtccgagatgtggacatctgagggcccaccgggcaggcgggagtcaccaagtagtggcatccgcgaagagaaaggagccagcccgggtgctcctgacgaggtcccccttggggatgtgttgttaccagaaggggaagttttgttctctttgttggttgtttttccttaatctttctcctttctatctgatttaagcaaaagagaaaaaaatacctgaaagctgtcttaaagagagagagagagatagaattcgcatcaccctgagtatagggagacgggggggtgcctacaaaaatagaattctgtaccccagtaatcaactagttttctattaatgtgcttgtctgttctaagaataggattaacacacaggaagtcttgagaaggatttttgattcttttatgtgtttaagaaaaaaaagcttaagaaacattgctttaaaaaaagaaggaaaaaaaatacagcaaaccattgttaaagtagaagggttttaggtagagaaatgtactctgctttggtgaaaaggcacagatttgggaaggtcctcaacctcactcccctgcttgttcagtgcctacagacctgttacctgatgatacctgtgctttatcccaggagtggggcagacctcttaaccttactgatggtcgattcgacctctagcgggctcgtgggtgtggcaacctccagggctcatgttatgggccctctgccccccacaacctgcaggttcacagagcgccagccagcacgcaggggtagggatgaaatagtgacataatatattctatttttggggaaccttcctgttttgggggttcctgtttagagagatgctggtttttggctggtggccctgcagcccactcaacatcaggttgaacccacagcttttcttttgtgtgtggtttgttttgttatgtttttccttctccatgttcccaaaaccattccatttcaaagcacttttggtcagctagctggaggcagtgttgctgggtgtgtgtgtgtgtgtgtgtgtgtgtgtgtgtgtgtgtgtgtgtcggtgggggagggggtctagtggaatggttggggatgtccacacactcaattctgatggctgcacagcaggtgtgtagggctggtagcatgaggtgcttgggaagttgtgttgggtcgagaagagaaagctctgttctcgtaccaccgggatcttcctgcaaagtcggagggatcttttggtgccagctggcgtttggaagtagggaccgtgatggcattacctggacaaggggattcaggacgactcttaagtctttcacacaggaggcttttaaacactaaaatctctaatttatacgtaaggctacagaagagtatttattgggaaggttgcccatgacccgtgtgactcaaagcaatgtgatcttcccttgattcaaacgcacaccttcttccctgctggcgaaggttttaggccattgtctgagagactggtcttttattggccaagtggggtgtcctccaaaaaaaccaaaccacaaagacggagatgtgggtctccttgactttcccaacccaattgcccccattggagagccatccaaacctgaggaaaattaggggaccccaaaagagtcttgagtctggcacattcttgccgccgctcccaagttagcaacagtaggtaatttgcacacctctggctctgtgcctttctgttcaggatgtgttggtgggaggtggagagcgggtggctggagaggggatgtgagagaagaagtatggagggtagggaccacacgggacagaccgcggctcctttcacagcgctgctaccaatgactcccaggatccccggcgttcggaaccagattcacgttgctttgtatctttcatgttgttttcgctgctattggagggtcagttttattttgttgttgttggtttgtttgtttttttttacaatgtcataaactgccatgttcaagttttaatttcctcgtagaagagtgtatttacagatgccctctccgggactttttctatttattgtgattcaattttggattaatgtgattaccgctgtattcccaacaaaaggtgttttccacacacacacacacacacacacacacacacacacacacacacaggttcctgtacacaatacctcatgtatcacctaacaatacataggcctgccaggcgggtggggcggtctgcctccagggaccctgggaccctgctggggatcatcctgtcatgctgggccttcatttgatctgggacatagcatcacagcagtcaggccaactgtgttctgttagttatcaatattgttacttgtagcggcctgttgtgcatgccaccatgctgctggacccggagagatttgttctgagtctctggtgcatcatataatctgttaggttctagtgttctgtcttgttttgtgttactcacagcattgtgctaatgtaaagccagccgcaatgctgtaggccccaggttccctagcaagctgccaaaccaaaagggtcaccaccagcttagctgaggcgtcccaaccaggcaggacccttgagggctgctgtgtccatggtgatggggtgaagttttggccaaagggccaaaggctggtggatccacacagtctgccctgtgacatgaatggctttgaggggctctggctggtggtcaggttggctttgtgtattctggttgacacaccatggcgcttcccagcacagacatgtgaccagcatggtccagg

SEQ ID NO: 2850 - DNA, 1928 bp, Rattus norvegicus
  Genbank Accession No. D16479
cagtccagactctaagatttcagaatgactaccatcttgacttccacttttagaaacctttctactacatcaaaatgggccctcagattttctgtaagacctctgagctgttcttcacaagtacagtctgccccagctgtccagaccaagtcaaagaagactttagcaaaacctaatctaaagaacattgtggtggtggaaggtgtccgaattccatttctgctgtcaggcacttcgtataaagacctaatgccacatgatttggctagagccgcactttcgggtttgttgtatcggaccaatattccaaaggatgttgttgattatatcatttttggtacagttattcaggaagtaaaaacaagcaatgtggctagagaggctgccctgggagctggcttctctgataagactccagctcacactgtcaccatggcttgtatctcttcaaaccaagccatgaccacagctgttggtctgatagcttctggccagtgtgatgtcgtcgtggctggtggtgttgagttaatgtctgacgtccctattcgtcattcaagaaatatgaggaaaatgatgcttgatctcaataaagccaagactctggcccagcgcctgtccttactcactaaattcagattgaattttctgtcccctgagctccctgcagtggctgagttctccactaacgagacaatgggccactctgccgaccgtctggctgctgcctttgctgtttctcgaatggaacaggataaatatgcactgcgttctcacagtctggccaagaaggcacaggatgaaggacatctttctgatattgtacccttcaaagtaccaggaaaagacacagttagcaaagataacgggatccgtccttcctcactggagcaaatggccaaactaaagcctgcattcatcaaaccctatggcacagtgacagcagcgaattcttctttcctgactgatggcgcttctgcgatgctaatcatgtcagaggacagagctctggccatgggttataagccaaaggcatatttgagggattttatatatgtgtctcaggatccaaaagatcagcttttacttggaccaacatatgctactccaaaagttctagaaaaggcaggattaaccatgaatgatattgacgcttttgaatttcatgaagccttctcaggtcagattttggctaactttaaagctatggattctgattggtttgcacaaaactacatgggtaggaaaaccaaggttggagcacctcctctggagaagtttaatatctggggcggatcactctctctgggacacccttttggagccactggctgtcggttggtcatggcagctgccaacagactgaggaaggatggaggccagtatgctttagtggctgcctgtgcagctggaggacagggtcatgctatgattgtggaagcctacccaaaatgactgctctggaaggaggcaactgatctctgcagcactcgcactgggcaatgccatttcaatgcactaccaagtgatacctgcagttcctagctcttcttaggaaacaacatttgtggccttctcttaaatattttgcggtcaagccttgccagtgttcgagctttccgataatcacagcttctgctctctaagttccagactatcacagatgtgtacacagttcttgttatctcttgtctctaagactaatgactgccagctgcttggagagaggttagctgaggtttagaaccatctttgtaacatttgcagaatctcctccttcctgtcagtgtcctacagagaattattttttctaaaatacaatccaatgtgcctacattaagttactatagaaaaaaataatctaaacatctcctaaaactgacttgcttagagacatgtttgttgaccttaataaagtagacatgtattag

SEQ ID NO: 2851 - DNA, 1404 bp, Rattus norvegicus
  Genbank Accession No. D17349
gtaccctgaggctcacatgacttgtcctttgtgcccacaggaaagcgcatttgtcttggagaaggcattgcccaaaatgaattgttcattttcttcaccgccatcctccagaacttctctttggcaagccctgtggctcctgaggacattgacctcagtcccattaacagtggtataagcaaaataccctcaccataccagattcacttcctgtcccgctgtgtgggttgagagaggagtgtcaacgtctcacttttccccaactccataccctgtgaatggaataggaaaagctaatgaagggcctttcttgatgtaaagacagagagacttctggaggccacagcttgttctgagtcacctctctcatgcttgttaacagccatagtccctacttgccagtctatattccaggatctgtgtgaatagactacagatggtttctcttgagttggctccaccctactccgtgtgttgtgttggagggtcatgtgtgaggacctcattgatagatgagtaagagaccccatgaatgtatcacagtgctagtgagtggtggggacaagatcacgctgtgagtttagaagtgtgacccctctcctgcttgtgtttacatgcagatgaaatccatataacgaagctgacaaaattttttagttttgtattcagtgccagaggctcatgtagttcacactgacctcaaaatcctatatatattcaaagatgtcttgaaatctcgatctcctgaccagtgctgccatcacaggcacatggacctacacccagattttaacatgactatatcttaatgtttatattttaatctcctttaatttattcacaatacgtacaacttcactatctaattccaggtatcttgtcccatttaaccaacaccactccaagccccaacctattcaaagatcagtccctcattcgttctctccataacctcccctgcactggacacccacagtgccacttttgtttgacctttgtgtcaatggactggcctgacctgtgtgtcttgtagaaaaggcaaggatgtgaccttgcatgctggctgccttttatgccacacccaacttctcaggcccctgtactgtgcaggccacagtcacacaccttcacagaccttccccattcgctctcttagattctttaccctgaatcttctctctagacaaggatctcctcagccctccacccctgagctgtgtgactctacttagattctcgaacatccccctgtaagtcctccatggatctcataaatacaccaaccttcctcaccaatcaaaaaaggatccctggtatgattttgtttgagcgtggtttgcttgcttgtttgtagagacaggatctcactatctacctctggctggtcttgagctcactgaattc

SEQ ID NO: 2852 - DNA, 1154 bp, Rattus norvegicus
  Genbank Accession No. D17512
cggcggcgcagagaggagcgcgggtggagggcgcggaccgaccgagcgcaccgaccatggcctccaagtgtcccaagtgtgacaagaccgtgtacttcgccgagaaggtgagctccctgggcaaggactggcacaagttctgcctcaagtgtgagcgctgcaacaagacactgacgcctggcggccatgctgagcatgatgggaaacccttctgccacaagccctgttatgccacactgtttggacccaaaggcgtgaatatcgggggcgctggttcctacatctacgagaagcctccgacggaggcccctcaggtcactggccccatcgaggtccctgtggtacgaactgaagagcggaagaccagcgggccgcccaagggtcccagcaaagcctctagtgtcaccacgttcactggggagcccaacatgtgccctcgatgcaacaagagagtgtacttcgctgagaaggtgacctccctgggcaaggactggcaccgaccctgcctgcgctgtgagcgctgctccaagacactgaccccaggcgggcatgctgagcatgatggccaaccctactgccacaagccctgctatggaatactctttggacccaaaggagtgaatactggtgctgtgggcagctacatctacgacaaggacccggaaggcacagttcagccttagatctgcagatgctgcccctcgcggtcccctatttgaccctgagggagagtgatctgctgcctagtcctgcctcagtgtgtctcgcctgcaattccagcacctaagtgatggaggagaaagcccagctagtcctagaatttcagctcccttggtcaccttggcatgtcctatgttgcccgtggtttactttctgtctgtgtgtctccatagcaccatgggtcctgtgtccccatgtccctgataactctccaaggtggctgtcctatgatatccctttgcccacactcgcccgccagtattatttatgctctgcttgccggtgatgggcatgagctagctcacagcattcccggggtgacggcaccccagcaaggagccctttgctggttcccacactactccctacttaccctcacatggttcacagctatggagatttgctgtcaataaatagtttggtttaaagattgc

SEQ ID NO: 2853 - DNA, 2166 bp, Rattus norvegicus
  Genbank Accession No. D17809
tggatcacagtctccatcgactgactcaggatgcggctggaccgccgggccctctatgcgctagttctgctgcttgcctgcgcctcgctgggtctcctgtacgccagcacccgagacgcgccaggtctcccgaaccctctggcattgtggtcacccccacaaggtcccccgaggctcgatctgctagaccttgccactgagcctcgctacgcacacatcccagtcaggatcaaggagcaagtggtggggctgctggctcagaacaattgcagttgtgagtccagcggaggacgctttgccttgccgttcctgaggcaggtccgggcgattgacttcactaaagcctttgacgccgaggagctgagggctgtttctatctccagagagcaggaataccaggccttccttgcaaggagccggtccctggctgaccagctgctgatagcccctgccaactcccccttacagtatcccctgcagggtgtggaggttcagcccctcaggagcatcctggtgccagggctaagtctgcaggaagcttctgttcaggaaatatatcaggtgaacctgattgcttcccttggcacctgggatgtggcaggggaagtaacaggggtgactctcactggagaggggcagtcggacctcacccttgccagcccaattctggataaactcaaccgacagctgcaactggtgacttacagcagccggagctaccaagccaacacagcagacacagtccggttctccaccaagggacatgaagtggccttcaccatcctcataagacatcctcccaacccccggctgtacccaccatcatccctaccccaaggagcccagtacaacatcagtgctctggttaccgttgccaccaagacctttcttcgttatgatcggctacgggcactcattgccagcatcagacgcttttaccctacggtcaccatagtaatcgctgacgacagcgacaaaccggagcgaattagcgacccccatgtggagcactatttcatgcccttcggcaagggttggtttgcaggtcggaacctggcggtgtcccaagtaaccaccaaatacgtgctgtgggtggacgacgactttgtcttcacggcgcgcacgcggctggagaagcttgtggatgtcctggagaggacgcccctggacttggttgggggcgcggtgcgggagatctcgggctacgctaccacctaccgacagctgctaagtgtggagccgggcgccccaggctttgggaactgcctccggcaaaagcagggcttccaccacgagctcgctggctttccaaactgcgtggtcaccgacggcgtagtcaacttcttcctggcgcgcacagataaagtgcgccaggtgggctttgacccacgcctcaaccgggtggctcatctggaattcttcctggatggtcttggttcccttcgagttggctcctgctctgatgttgttgtggatcatgcgtcaaaggtgaagctgccttggacatcaaaggatccaggggctgaactttatgcccgttaccgttacccgggatcactggaccaaagtcaggtggccaaacatcgactgctcttcttcaaacaccggctacagtgcatgaccgccgagtaacgtctgatttgggccttcacactgtcaggctgggcctgcctcctccctgccaggaatttccagcaaccacccccccccaatccctgagcaccccactgatgaacaccctggcttcccgaccctctccaccaatctgattcctaacaggggcttgtcctggtgacacccttcctttctgtgagtgaccagaggccagatggagccatatcctcccccacagccagtgccaagtcctccccaaccccactcctatggggcaggaaatggggaggttcactttccaagtgccaaagagcccagacggactctaagaccctcaagtggaaacactctcacctcctgaggtgggcagggaaactcccaatttgcaaccccagggacatgcaccccaccccagctctggatccagcaccatgtgtcccggctccaacatacccctacagaaagcactgtgactgtagttctgtggggctggtgaacacacggtggaagccaaaaaaaaaaaaaaaaaaaaaaaaggggggggggggatcc

SEQ ID NO: 2854 - DNA, 483 bp, Rattus norvegicus
  Genbank Accession No. D26498
gaaacaaccaaggatttagcaaaagctgttgccaaacagtgtgttgttttcaactgctccgatgggctggattatttggctttaggaaaattctttaagggactgttatcttgtggagcctgggcttgctttgatgagtttaacagaattgatttggaagtactttctgtggttgctcagcaaatccttactatccagataggcattaactcaggtaccgagctcctagtgtttgaagggaacagaactaaacttgaccccacgtgcgctgtctttattacaatgaaccctgggtatgctgggcggtcagagttgccagacaacctgaaggctctcttccggacagttgccatgatggtgcctgactatgccatgattgctgagattgtgctttattcctgtggctttgtcactgcgcggccactgtccataaaaatcgtggctacataccgcttgtgctcagagcaactgtcctcccagcac

SEQ ID NO: 2855 - DNA, 1500 bp, Rattus norvegicus
  Genbank Accession No. D28557
taaccgcgccaaccgccaccgaggtgcccggagagaggcggagaggcggcatgagcgaggcgggcgaggccaccaccggcggcaccacgcacccgcaggccgcggccgacgcgcccgccgcggcgcccccggaccccgcgcctaagagcccggcggccagcggcgcgccccaggccccggcgcccgccgcgctgctcgcgggagccccggcgagagccagcccccgggcccgccccggcctcatcagcccccgcgggaagcgaggacgcgagaagaaagttctcgccaccaaagtccttggcactgtcaaatggttcaacgtcagaaatggatatggatttataaaccgaaacgacaccaaagaagatgtgtttgtacaccagactgccatcaagaagaataaccacgtcaagtatctgcgcagtgtgggggatggagaaactgtagagtttgatgtggttgaaggagaaaagggtgctgaagcagcaaatgtgactggcccagatggagttcctgtagaagggagtcgctatgctgctgatcggcgccggtacagacgcggctactatggcaggcgccgaggacctccccgtaatgctggtgagattggagagatgaaggatggagtccccgagggagcgcagctccaggttcatcggaatcccacttaccgcccaaggttccgcaggggacctgctcgcccacgacctgcccctgctattggagaggctgaagataaagaaaatcagcaagcggccaatggtccaaaccagccgtctgcccgccgtggattccgacgcccctacaactacaggcgccgcccccgtcccctcaacgctgtttcacaagatggcaaagagaccaaggcaggtgaagcaccaactgagaaccccgctccagccaccgaacagagcagtgccgagtgaccctggctcccaggcaccttcaccaccagcagggtgaccttaagaattaatgaccattcaaaaacaaggcaaaaagcacacccacgaccttaccaacaccaaagaaacatctaagcaataaaacggaagactaacaagatttggacattagaatgtttactgctattctctacgaaactaacaactgcaaagggaaggagcccgcactgtccatcaagctgcgtcccgggaacctgcacaggcagagagcagcctccccatttcagcaacctagtgctttatatttttttcctggtttttactgttttggtaatatgaattaaaagaagaaatattaataccacatggggattgccccaaccaaagaaatctgaaatatatagtaaatgctctttttcctttgttgttcattttggatgctggtgctaaacttccaagtgtcatgatttaagaagaaattttatgcccttatttattcctaggatgaggggagaacatttttgctttcttacatagctctctctgaaatgtgcagtaacaagttcctcaaaaataaaatttttaccttcaaaga

SEQ ID NO: 2856 - DNA, 1360 bp, Rattus norvegicus
  Genbank Accession No. D28966
ctggagaagacggaaacaaaagacagaaacacacgcacacggggaactgggagttgactggcagatcccagctgccctgaggatggtggccagcggtggacgtcctgatggtcccccttctatcacccccgagagccctctcattgtaggtggcagagagtggcagggtatggcaggttcttgctggaacatcacctacgttcaagactcggtaggacctgccaccagcaccctgatgtttgtggctggtgtggtgggcaacgggctagcactgggcatcctgggtgcccgacggaggtcacacccatcggcgtttgcagtgttggtcactgggctggcagtgacggatctgctgggcacgtgcttcttgagccccgcggtgtttgtggcctatgctcgaaacagctctttgctgggcctggcccacggtgggacgatgctgtgtgacactttcgccttcgctatgactttcttcggcctggcctccacgctcatcctcttcgccatggctgtggagcggtgcctggctctcagtcatccctacctgtacgcccagctggacgggccccgctgtgcccgcttggctttgcctgccatctacgctttctgttgtctcttctgctcactgcccctgctgggcctgggcgagcaccagcagtattgtcccgggagctggtgcttcatccgcatgcgttccccccagcctggtggctgtgccttctccctggcctatgccagtctcatggccctgctggtgacctccatcttcttctgcaacggctccgtcactctcagcctctgtcacatgtaccgccaacagagacggcaccatggctcgtttgtgccgacctctcgggcacgagaggatgaagtttaccacctgattctgctggccctcatgacaggcatcatggccgtatgctccctgcctctcacgatcagaggattcacgcaggccatcgccccagacagcagagagatgggggacctccacgccttccgttttaatgccttcaaccccatcctggacccctgggtcttcatccttttccgaaaggctgtcttccaacgcctcaagttctggttgtgttgtctgtgtgcccgttctgtccatggggatctgcagacgcccctctcccggcccgtgtcggggagaagagacacactggctcccgattctctccaggctaaggaagggaactgggtgcccctgtcaacctggggtacggggcaggtggcaccattgactgctgtgcctctgtctggtggtgatggctgttctgtgggaatgccatccaaaacagaggctgtggttgcctgctccctctgctgatacctaagctggtcctgcttgccatcc

SEQ ID NO: 2857 - DNA, 2248 bp, Rattus norvegicus
  Genbank Accession No. D29646
caggagcccaatggccaactatgaattttcccaggtgtctgaggacagacctggctgccgcctcactaggaaagcccagatcggtcttggagtgggtctcctgctcctggtcgccttggtagtggtcgtggtcatagttctgtggccgcgctcacccctggtgtggaaagggaagcctaccacgaagcacttcgctgacatcatcttgggacgctgcctgatctatactcaaatcctccggccggagatgagagatcaggactgcaagaagatactaagtacattcaaaagagggtttatttccaagaatccttgcaacatcaccaatgaagactacgcaccactggttaaattggttactcaaaccataccatgtaacaagactctcttttggagcaagtccaaacacctggcccatcagtatacttggatccaggggaaaatgttcaccctggaggacacactgctgggctatattgcagatgatctcaggtggtgtggagaccccagtacttccgatatgaactatgactcttgcccacattggagtgaaaattgtcccaacaaccctgttgctgtgttctggaatgtgatttcccaaaagtttgcagaagatgcctgtggtgtggtccaagtgatgctcaatgggtccctcagtgagccattttacagaaacagcacctttggaagtgtggaagtctttaatttggacccaaataaggttcataaactacaggcctgggtaatgcatgacattaaaggaacttccagtaatgcatgttcgagcccctccataaatgagctgaagtcgattgtgaacaaaaggaatatgatatttgcctgccaggataactaccgacctgtaagatttcttcagtgtgtgaagaatcctgagcatccatcatgtagacttaatgtgtgaaggacttggatctcagaatccccacacacactccgcagcacgcaatgaggtgaaagattcagaagcaacactgtcgggaaagcagcagttgtcagggagaggtctctactacaatgctaacatcagagatggaagagcttcccaatacattatgacagaacgacacgatcagctcagtgcgtcctgtgtactaccagtaatagtcaagaaaagtcactccataaaccagagttaaggttctatattgttatttcaatgtggtgcttttatattgtttatattttgctagcatccttttttcctctcttttaatgaggtctctctttctctcttaatgaggctgagaatcagacctgagaacttgcacacatggtggataagcctatataccactgagctaactcctcagcatggctggatttttattgaaaaatgccaatccaacttcccattggacaaagaaaatcaaacatcaagtttatcgaaatgaataaccttatttttttatgtttttgcattctccccacaaatattcaaatggtaaacatgaggtcatagggtcattatagagaaggtgctctgtggaaactacccacatgccctgtgctttagtcgatttttaacccatccaacatgtccttgttaactttgagttttattgggggggattggggggggttaacgtgagaaaatggagtttagagagataatttattttcctaaagtcacattcttaggatcatggttacatctgaaattaaatcagttctgtcaaagtcaacaacataagtttttttttttcttttctgagcttttattgccaaattgatagtagcctgtgttatcgtctagcaatagactctgcaatgtgatctttatgggtgatttcgaaactaattacttgcactctctttctcttcttcctcattcttggtgccttctgtaggtagtcaggagttagcttacatttgttgctgatatcggcaatttatgttttttatcctttttttcttacatctgtcttgctcggagtcactaatttggttgttattttgttgttgttggttgtctttttcaaagctccactctttacccttcctcatttatttatttaattgagcttttgtctatttttagaaacatagaaatttcttctgtcttcaatatctccatttagcttttttgaggcaaatgtttagaccattgctatttcagcctgttctcttttttcttttttataggatattttatgtatttacatttcaaatgttatcccctttcccagttcccccgccctgattctatgaggatacttccccttccaca

SEQ ID NO: 2858 - DNA, 2779 bp, Rattus norvegicus
  Genbank Accession No. D30666
tgtaaaacttgattcccgttgagatctgttgattgtatttttgagcacatgaataaccacgtatcttcaacaccgtctaccatgaagctaaaacaaaccatccaccccatacttttatatttcatacattttataatatcactctatactattttaacatacatcccattttattttttgtgtgagtcaaaacaagagaaaccaaaccacattaaagcaaagcctgtcagttcaaaaccggactctgcatacaggtctgtcaacagtatggatggcttagcttcagtattgtatcctggctgcgacacacttgataaagtttttatgtatgcaaaaaacaaatttaaggacaaaagactattgggaacacgtgagattttgaatgaggaagatgaaatacaaccaaatggaaaggtttttaaaaaggttattctggggcactataattggctttcctatgaagatgtcttcattcgagccctcgattttggaaatgggttacaaatgttgggccagaagccgaaggccaacatcgccatcttttgtgagaccagggctgagtggatgattgctgcgcaggcgtgtttcatgtacaacttccagcttgttacactgtatgcgactctgggaggtccagccattgtccatggactgaatgagacagaggtgaccaacatcattactagtaaagaactcctgcaaacaaagctgaaggatatcgtctctttggtcccacgtctgcggcatatcattactgttgatgggaagcctccaacctggtctgagttccccaagggcgtcattgtacacaccatggctgcagtgcaggctctaggagtaaaggctgacgtggacaagaaagctcacagcaaaccactgccctcagatattgcagtaatcatgtacacaagtggatccacaggaattccaaagggagtcatgatctcacacagcaacatcattgcctctataacggggatggcgagaaggattccaagactgggagaggaagatgtatacattggatatttgcccctggcacatgttctagaattaagcgctgagcttgtgtgtctttctcatggatgccggattggctactcttcaccacagacattagcagatcagtcttcaaaaataaagaaaggaagcaaaggagacacatccgttctgaagcccacgctgatggcagctgtgccggaaatcatggatcggatctacaaaaatgtcatgaataaagtgaatgaaatgagtgcttttcaacgaaacttgtttattttggcatataattataagatggagcagatttcaaaagggtgtagtaccccgctgtgtgaccgctttgttttccggaatgtccgaaggctgctgggtggaaatattcgcgttttattgtgcggtggtgctccactttctgcaacgacacagcgattcatgaatatctgcttctgttgtcccgttggccaggggtatggactcacagaatctactggggctggaacaattacagaagtgtgggactacaataccggcagagtgggagcaccattagtttgctgtgaaatcaaattaaagaactgggaggaaggtggctattttaatactgacaaaccacatcccagaggtgaaattctgattggtggccaaaatgtgacaatggggtactacaaaaatgaagcaaaaacaaaggccgatttctttgaagatgaaaacggacagaggtggctgtgcactggcgatattggagagtttgaccctgatggctgcctcaagatcattgatcgtaaaaaggaccttgtgaaactacaggcaggagagtatgtttctctaggcaaagttgaggcagctttgaagaacctcccactgatagataacatttgtgcatatgcaaacagttaccattcttacgtaattggatttgttgtgccaaatcaaaaggaacttacggagctagctagaacgaaaggatttaacggaacttgggaagagctgtgtaacagcagtgaaatggaaaacgaggtccttaaagtgctttctgaggctgctatttcagcaagtctggaaaagtttgaaatcccactgaaaattcgtttgagccctgacccatggactcccgaaactggtctggtgactgatgccttcaagttgaaacgtaaagaacttaaaacacactaccaggcagacattgagcggatgtacggaagaaaataattagtttgggcattggtttgctacagtgagctcagatcaaatagggaaatacttgaaatgtatgtctcaggccaaggcaaactccattcctcatattaaaccctggctgttacttctcactacgtcaccatttttaactgacaggattagtaaactattaagacagcaaacatgtgtctgtctctgttttttcccctcctccagtttgctttggcatctatgactgtgtttgtcaataggagactttttcaaaatcatactggggaagcagtgattttaaaacctcaagtttttaaacatgatttatatgttctgtacaattgttcagtttgtaactttttaaagtttggatgtatagaaggataaataggaaatataaaaattggttatttgggggcttttttacttattgtatttaaaaataaaagggtatcaatgtgaaattatgtaaattttaaatgcttatgaatcaaatcattgttgaacaaaagatttgttgctgtgtaattattgtcttgtacgcatttaagagaaataaatatactcagacttatgttttaagaaatgg

SEQ ID NO: 2859 - DNA, 1226 bp, Rattus norvegicus
  Genbank Accession No. D30735
cgcgcgctggcggtggcatgcgcgctgctctgtcccgtctcctgcacgccctcttggccccgctgctcgtacgccagcaatatggcggcgcccagcgaacccgcaggtttccctcgcggcagtcgcttctccttcctgccgggcggcgcgcactcggagatgaccgacgacctggtgactgacgcgcggggccgcggcgcaaggcatagaaaagacaacgcccctgccgcggccccggcgccgaaaggtttggagcacgggaagcgaccgtgccgggcctgcgtggacttcaagtcgtggatgcggacccagcagaagcgggacatcaagtttagggaggactgtccacaggatcgggaagaattgggtcgcaacacctgggctttccttcatacgctggccgcctattacccggacatgcccacgccagaacaacagcaggatatggcccagttcatacatatattttccaagttttacccctgtgaggagtgtgcagaagacataaggaagaggatagacaggagccagccagacacaagcactcgagtgtccttcagccagtggctgtgccgccttcacaatgaagtgaaccggaagctgggcaagcctgattttgactgctcaagagttgatgagcgatggcgtgacggctggaaggacggctcctgtgactaaggattaccacagaccgtgcagggcaacgccgggttctatgggcaacagcctgactgacgattaaagtgcatctgagccaaagcttgtttctgtggtgggggtgggatcccctagaacactgcctatgggaaccctacccacagactcagaaacggaggtgcccactatagacagttgggtggcttcctcaggtcttaaagccccatgggactgaagatgagaggcaggagtggtccagggcaccccataccccttatgatacccattatacatttgggacatagttgcctcaaaggaaggtgggctagaccattgccttcctactacatatccccagctgcctacagaactgtgacccaggcaactctgccatttcagaattgaagcagggttccagctctagttgggtttttctcttagggtaaaccaaccatggtgcccactgtcagcctggcacatggtcttctgcagccaggacaaacatgtcagcagaggatcctgggaagggcttccttagcgtttgagaccaaaataaaatgaagtgactt

SEQ ID NO: 2860 - DNA, 900 bp, Rattus norvegicus
  Genbank Accession No. D30804
tggagcggcggcggcttgagctcgcgcgtccgcagtgatgagctacgaccgcgccatcaccgtcttctcgcccgacggccacctcttccaagtggagtacgcgcaggaggcggtcaagaagggctccaccgcggttggtgttcgaggaagggacattgttgttcttggtgtggaaaagaagtcggtggccaagctacaagatgaaagaacggtccggaaaatctgtgctctggacgataatgtctgcatggcctttgcagttgtagcctctgtctcaggtctcactgccgatgcaaggatagtcatcaacagagccagggtagagtgccagagccaccggctgaccgtgggggacccagtgactgtggagtacatcacccgctacattgccagtctgaagcagcgttacacacagagcaatgggcgcaggccatttggtatctctgccctaattgtgggtttcgacttcgatggcacccccagactctatcagactgacccctcaggcacataccatgcttggaaggccaatgccataggccggggtgccaagtcggtgcgtgaatttctggagaagaactacacagatgatgccattgaaacagacgatctgaccatcaaactggtgatcaaggcgctgctggaagtggtccagtcaggtggcaaaaacattgaacttgctgtcatgaggcgggatcagcccctcaagattctaagtcctgaagaaattgagaagtatgttgctgaaatcgagaaggagaaagaagaaaatgaaaagaagaaacaaaagaaagcatcatgagggcagcggtcagagcagctttgagcctccatccgagcaaacgggtgctgtgggccttgtggccatttgtcggagtccaataaactactacgtttttt

SEQ ID NO: 2861 - DNA, 3455 bp, Rattus norvegicus
  Genbank Accession No. D31874
cgggcgcggacctgaggtgctgctgccgggtggtccttcctgtgttgtccgcgccctggaccatggcggcgctggcgggtgaagaggcctggaggtgtcggggctgtggcaactatgttcccctgagccagaggctgtacaggacagccaacgaggcctggcatagctcctgcttccggtgttccgagtgccaggagtccctcaccaactggtactatgagaaggacgggaagctctactgccacaaggactactgggccaagtttggagaattctgccacgggtgctccctgctgatgacagggccagccatggtggctggggagtttaagtaccacccagagtgctttgcctgcatgagttgcaaggtgatcatcgaggatggggatgcgtacgccctggtgcagcatgctacactctactgcgggaagtgccacaatgaggtggtgctggcacccatgtttgaaagactgtctacggagtctgtccaggaccagctgccctactctgtcacgctcatctccatgcctgccaccaccgagtgcagacgtggcttctctgtgtctgtggaaagcgcctcctctaactatgccaccaccgtgcaagtgaaagaggtcaaccggatgcacatcagccccaacaaccgaaatgccatccaccccggggaccgcatcttggagatcaatgggacccctgtccgcactctccgagtagaagaggtggaggatgcgattaaccagacgagccagacacttcaactgctgattgaacatgaccctgtcccccagcgcctggaccagttacggctagacacccggctttctccccacatgcagagtagtggacatactctcatgctcagcaccttggacgccaaggaaaatcaggagggaacactgaggagacgttctctgaggcgcagtaacagcatctccaagtctcctggccccagctcccccaaggagccgctgctcctgagccgagacatcagtcgctcagagtcccttcgctgctccagcagctactcacagcagatcttccggccctgtgacctgatccacggggaggtcctggggaagggcttcttcggacaggccatcaaggtgactcacaaagccacaggcaaagtgatggtcatgaaggagttaattcgctgtgatgaggaaacccagaagactttcctgactgaggtgaaagtgatgcgaagcctggaccaccctaacgtgcttaagttcatcggggtcctgtacaaggacaagaagctgaatctgctgacagagtacattgaggggggcaccctgaaggactttctgcgcaatgtggacccgtttccctggcaacagaaggtcaggtttgccaaaggcatcgcttccggaatggcttatttacactccatgtgcatcatccaccgagatctgaactcgcacaactgtctcatcaaattggacaagacggtggtggtagcagacttcgggctgtcacgtctcatagtggaagagaggaaaaggcctccagtagagaaggccgccaccaagaaacgcaccttacgcaagagtgatcgcaagaagcgctacactgtggtgggaaacccctactggatggcccctgagatgctgaatggcaagagctacgatgagactgtggatgtcttctcttttgggattgttctctgtgagatcattgggcaggtatatgctgatcccgactgccttccccgcacactggacttcggcctcaacgtaaagcttttctgggagaagtttgtcccaacagactgtcccccagccttcttccccctggctgctatctgctgcaaactggagcctgagagcagaccggcattctcaaagctggaggactcattcgaggcgctctccctgttcttgggagagttggccatcccactgccagcagagctggaagagctggaccacactgtgagcatggagtatggcctaacccgggactcgccaccctagccctggtccatccccctgcagggggacattccacagccagcattgccccctctgcgccctgtcctcgctgtgagcgagcaagcgggactgcctaggcttcctgtggattgacggcttgcttagaagcagaacaagccatccctacctccccaggaggcacttgggtgcagggaagcaattctccacaggtttgggcctagtttctgtctgtaaatccaacactcacctgaaagctgtgaagaggataaaagcctggattctagaccaagagtctgttactggggaccgcccgggacctctggactgagatgccgggagcctgtagctttacactaacctacacggcctgggcccgccgggccggatgagtggactggcctgagggcctctggttcagcaaggtgcaggacttgaagcgatagtatgagtttcagaaacggggccgtcaaaacgtgtgaaatgacagagcggtttctccttccatcctagccatgccctttggagcaggttttgaagagtcttagtagtggtaaaacctacaggatccaaaaaaaaaggactggtttctgctcagcagcccagggaccacatcagtgtgtggggaatttccacttcagcaccctgtctcaacaagcagtctcaaaaacaccaaagaaggtggggctggaaagaaagcggccctgccgtctaaaagccccacacccaggctggtgggctcagtcagaaacttaaggtgttgcctaacaatagatgggttctggatgccagtgtggtttgcctcagactttgggcctaagcagggagaagggggtcccattaatttctttgcacccttgtggcagctactgcataccctctaggatgtctggtccaggcagcaacttgggacaggcattggtggctgctgagtcccaaactgagatatgaagagagctccctgagctggaccttgtagagtctacctctgttgtgctggtccagcttacttcctgagacacactcgagggccgtgggcatgggaaactctaggggcactttccacccctggctaccaggtgtccagggactccgtagctcaccaaggttcgccatctcctaagtgggagctcacatcatatttaacacattgggaatgggtttggttataaatacgtgtgagggtttgtgctggtggggggatccggggagagtggctgctcttattagcttttatctgtggggtgatatgtgaaatattttgtacatagacaagatgaattatgggatgggaagtctttggccactttacttgctgtgtagactgtacttgtgtgtggagtttgcaaacgtgccgcagagggaatcctgaactcccgacatcagtgtggttcagcgtcctgcggcgaattatgcacgcgctgtccccagcgagtgtgggagtggtgggcctgcactgggccatgaggcagactaaataaattaagcagttaacagagc

SEQ ID NO: 2862 - DNA, 870 bp, Rattus norvegicus
  Genbank Accession No. D38065
atgtccgtggtgtgccggagctcatgttcgcttctgcttcttccgtgccttctgctgtgtgtgttgggtccctctgcgtcccatgctgggaagctgttagtgatccccatagatggcagccactggctgagtatgctcggagttattcagcagctccagcaaaaggggcacgaagtggtggtcatagcacctgaagcttcgatacacataaaagaaggatcattttacactatgaggaagtaccctgtgccattccaaaatgaaaacgtgacagctgcttttgtggaacttgggcggagtgtctttgatcaagatccttttctgctgcgtgtggttaaaacatacaacaaagtcaaaagggactccagtatgctgctgtctggctgctcccaccttctgcacaatgccgagtttatggcctctctggaacaaagccactttgatgctctgctgacagaccctttccttccgtgcggctccattgtggcccagtacctgtctctgcctgctgtgtacttcttgaatgcattgccatgcagcctggatttggaagccacccaatgccctgctccgttgtcctacgtgcccaagagtttgtcctcgaacacagatcgcatgaacttcctgcagcgggtgaagaacatgattattgctttgacagagaactttctatgcagagtggtttactccccctatgggtcacttgccactgaaatcttacagaaagaggtgactgtcaaggaccttcttagtcctgactctatctggctgatgagaaacgactttgtgaaagattaccccaggcccatcatgcccaacatggtttttattggtgggataaactgccttcagaaaaaagccctatcccag

SEQ ID NO: 2863 - DNA, 858 bp, Rattus norvegicus
  Genbank Accession No. D38069
atgggactccatgtgaccctgcaaggattagctgggctgctgctgctgctgtatgccctgccctgggctgaaggtggaaaggtgctggtgtttcccatggagggcagccactggctgagcatgagggatgtcgtgagggaactccacgcccgaggtcaccaggctgtggtcctggctccagaggtgactgtgcacatcaaagaagaggacttcttcaccctccaaacctaccctgttccatacacaagacaaggatttagacaacaaatgatgcgaaacattaaagtggtctttgaaacaggcaactatgtgaagacattccttgaaacatccgagattttgaaaaacatatcgacagttctcttaaggtcttgtatgaatctattgcacaatgggtccctgctccagcatctgaattccagctcctttgacatggtcttaacagatcctgtgattccgtgtgggcaggtgctggccaagtacttgggtatccccactgtgttctttctacgatacattccctgtggcatagactctgaggccacacaatgtccgaaaccttcctcttatattccgaacctactcacaatgctttctgaccacatgactttcctgcaaagggtcaagaacatgctgtaccctctggccttgaagtacatttgccatttctcattcactcgctatgaaagcctggcctctgagcttttgcagagagaagtgtctttagtggaggttctcagccatgcatctgtgtggctgttccgaggggactttgtgttcgactacccgaggcctgtcatgcctaacatggtcttcattggaggcataaactgtgtcatcaagaagcctctttctcag

SEQ ID NO: 2864 - DNA, 1608 bp, Rattus norvegicus
  Genbank Accession No. D38072
ccggccggtgccgctggcagccgctagccgcctcgctgctggcggtggtagggtagggcggtgctcggagcgagctggggaagacggagcgggcgctgcggcgcgcgggcgggcggcgggggggacgcgggaggatggagcaagtggagattctgaggaggttcatccagagggtccaggccatgaaaagtccggaccacaatggggaggacaacttcgcccgggacttcatgcgattgagaagattgtctaccaaatatagaacagaaaagatttatcccacagccactggagaaaaagaagaaaatgttaaaaagaacagatataaggacatactgccatttgatcacagccgagttaagttgactttgaagacaccatcccaagattcagattatatcaatgcaaattttattaagggtgtatatgggccgagagcatacgtggcaacccaagggcctttggcgaatacagtcatagacttctggaggatgatatgggagtacaatgtggtgatcattgtaatggcctgtcgtgaatttgagatgggaaggaaaaagtgtgagcgctattggcctttgtatggagaagatcctataacatttgcaccatttaaaatttcttgtgaaaatgaacaagcaagaacagactacttcattcgaacacttttacttgaatttcaaaatgaatcccgtcgactctatcagtttcattacgtgaactggccagaccatgatgtcccttcgtcattcgattctatcctggacatgataagtctaatgaggaagtaccaagagcacgaagatgtgcctatttgtatccattgcagtgcaggctgtggacggacaggtgctatttgtgccatcgactacacgtggaacttactgaaagcagggaaaattccagaggaatttaatgtatttaatttaatacaagaaatgagaacacaaaggcactctgcagtacaaacgaaggagcagtatgaactcgtccatagagctattgcccaactgtttgaaaaacagctacaactgtatgaaatccacggagcccagaaaatcactgatggtaatgaaattagcactggaaacatggtcagttccattgatagtgaaaaacaagattctcctcctccaaagccaccacggactcgaagttgtcttgtagagggggatgccaaggaagaaatcctccagccaccagagcctcacccggtgccgcccatcctgacaccgtcgcctccttcagcattcccaacgttacactgtgtggcaagacagtgacaggtaccacccaaagccagtgctgcacatggcttccccagagcagcccccaacggacctcaacagaaactatgataagtcagcggacctaatggggagaagcgaatctgctgttgagcacacagataaaaagttagaacaaaatttaagttttgagattaagaaagtccctctccaagaagggcccaaaagttttgatgggaacacactcttgaataggggacatgcgattaaaattaagtctgcttcatcttctgtagttgacaaaagctctaagccacaggagttaagttcaggtgatctaaaggttcacgatgtgtctcag

SEQ ID NO: 2865 - DNA, 4454 bp, Rattus norvegicus
  Genbank Accession No. D38560
gcgtcacggcgcgggcggaagatggccgggttggttgcccgcagctgctaacccggcagtgcggagctggagcctggctcccgctgccgcgaagcggccgtcgccatgtcgctgctgcagtctgcactggacttcctggcgggccctggttctcttggcggagctgccggccgtgaccagagtgacttcgtggggcagactgtggagctgggcgagctgcgtctgcgggtgcggcgggtcctggccgagggagggtttgcatttgtttatgaagctcaagatctgggaagtggcagagagtatgcattaaagagattactatccaatgaagaggaaaagaacagagccatcattcaggaagtatgtttcttgaaaaaactttctggccaccccaatattgtccagttctgctctgcagcatccataggaaaagaggaatcggacactgggcaggctgagttcctcctgcttacggagctctgtaaaggacagctggtggagtttctcaggagagttgaatgtaaaggccctctatcctgcgacagcattctgaagatcttctaccagacatgcagagcagtgcagcacatgcacaggcagaaaccacccatcatccacagggatctcaaggttgaaaacttactgcttagtaaccaggggaccattaagctgtgtgactttggcagtgccacaaccatctcccattatcctgactacagctggagcgcccagaagcgagcaatggtggaggaagagatcacgaggaacaccacacccatgtacagaacgccagaaattgtagacctgtattctaacttccctattggcgaaaagcaggatatctgggcactgggctgtatcttatacctgctgtgtttccggcagcatccttttgaagatggagcaaaacttcggatagtcaatgggaagtattccattcctgtgaatgacactcgttacacagtcttccatgaccttattcgtggcatgctaaaggtcaatccagaagagaggctatccattgctgaagttgtccgacaactgcaggaaattgcagcagcccggaatgtgaaccccaaagcccccatcacagaacttctggagcagaatggtggctatgggaactcagggccttcccgagcacaaccaccttctgggggccctgtgaacagcagtggagttttggctctggcagagtatgaccagccctatggtgggtttctcgatatcctacggggtgggacagaacggctcttcaccaacctcaaggatacttcctccaaggtcatccagtctgtggctaactatgcaaagggcgatcttgacatatcttacatcacatccaggattgcagtgatgtcgttcccagcagaaggtgtggagtcagcaatcaaaaacaatatagaggatgtacgattgtttctggatgccaagcatccaggacattatgctgtctacaacctttctccaagaatataccgggcttccaagttccacaatcgggtcactgagtgtggctgggcagtcaggcgggcaccacatctccacagtttgtatactctatgcaggagcatgcatgcctggctccgggaagaccacaggaacgtctgtgttgtacattgcatggatgggagagctgcgtctgctgtggcagtctgtgcattcctgtgcttctgccgtctcttcagcactgcagaggctgctgtgtacatgttcagcatgaagcgctgcccaccaggcatttggccatcccacaaaaggtacattgaatacgtgtgtgacatggtggcagaggaacccatcacgccccacagcaagccaatgctggtgaaatctgttgtcatgacccctgtgccactgttcagcaagcagaggaatggctgccgaccattctgtgaggtctatgttggggaggagcgtgtaaccaccacatcccaggagtatgacaggatgaaggaatttaaaattgaggatggcaaggctgtcatccccctgggcataacagttcaaggcgatgtcctcaccatcatttaccatgccagatccactttaggagggagactgcaggccaagatggcgtccatgaaaatgttccagattcagttccacactgggttcgtgcctcgaaacgcaaccactgtgaaatttgcaaagtatgacctggatgcttgtgacattcaagagaagtacccagatctgttccaggtgaacctggaagtggaggtggagcctagagacaggcccagccgagacgttccaccttgggagaataccagcctaagggggttaaaccccaagatcctcttttccaacagggaagagcaacaggacattctgtctaagtttgggaaaccagagctaccccggcagccgggctccacagctcagtatgatgctgaggcagggtctccagaggctgagatcacagagtcggactcaccacagagcagcagcacggacaccaaccactttcttcacacactggattggcaggaggaaaaagacccagagactggtgtagacaatacctctcctaaggagagtcagtctaacctgattgcagatggagatggaagtgaagtatcagatgaagaagaggcttcatgccctagtgaagagagaaagcctggggctggagaagatacaccaaggctggcagctgggaccagacagcaagacttaatatttgatgtgggcatgctggctgccccacaggagcctgtacagcctgaagaaggtgtcgatctcctggggctgcactctgaaggggacttaaggcctgctgctcccttgcaggctagcggggtccagtctagcaacactgacctgttgagctcccttcttgaaccatctgatgcttctcaagtgggacctcctggtgacctgcttggtggtgagactcctctgctgttagcaagcccagtttctcttcttggggtgcagagcaacctgcaaggaaaagtccctgacactgtggacccatttgaccagttcctgctgccatccagctcggacacccagccctgctccaagcctgatctctttggagagtttctcaactctgactctgtagcttcctcaactgccttcccatcgacccacagcgccccacccccatcctgcagcactgccttcctgcacctgggagatctgccagcagagcccaacaaggtgattgcttcatccagccacccagatctgctaggaggatgggatacgtgggctgagactgctctacctgggccggcctccatgccagtaccagaaggtactctcttctcttctgcaggtcacccagcccctccaggccccaaccccagccaaaccaagtctcagaacccagacccatttgctgacctcagtgatctcagctctagcctccaaggcttgcctgctggacttcctgcagggagcttcgttggcacatcagccaccactcacaaaagcaacagctcctggcagacaactcgtcccacagcccctggaacctcatggcccccgcaggccaagccagcccccagagcctctgaacaactaaggtctcactttagtgtgattggggcccgagaagagagaggtgtccgtgcgcccagctttgcccaaaagccaaaggtctcagaaaatgattttgaagatctgctgcctaatcaaggcttctctaagtctgacaagaaggggccaaagaccatggcagagatgcggaaacaggaacttgccagagatacagacccattcaaattgaagcttttggactggattgaaggcaaagagaggaatattcgtgcactgctgtccactctgcacacagtattgtgggatggggagagccgctggacacctgtgagtatggctgacctggtgactccagagcaggtgaagaagcagtaccgccgtgcagtgctggtagtgcatcctgataaggccacagggcagccatatgaacagtctgccaagatgatcttcatggagctgaatgatgcatggtctgagtttgaaaaccagggctcaaggcccctcttctgaggcctgtgatgactatggctgcaggagctgctcatgaatcctgaatgctgctggcctgactgaggcacaaatgggaccataacaggtgtggcaggtgatatcgccccaggggcctggaccatctactcccaatcatccctgcattcatcatggacaaataccattccatggctgggagagaaagcattcctcagatctgatatttgttgttttgtttttctttttcttgtcccagaggaaaagtgttgatttatattccttccacagctgtcacaatttgtgatttacttggtgtctggtggctgtcacctcttgaatggcacatgtcgctggcacttctctcctgtaatttcttcaaatatggggtgcatccacaccccactctgataagtttgccaatcatctgtacataattaaactattttccgatg

SEQ ID NO: 2866 - DNA, 1879 bp, Rattus norvegicus
  Genbank Accession No. D43964
aagactttttccccagccttaactggatagtctgaagttttcaaaactcttatccacaaagttgtcagaaccttgattgggaagtcctgtgcatctgtgctaacctacagggcctccttatccagagcactctgcatttcagagggtcgctgtcgaactacggttttggcgaagacattcctgaagaattgtctgaggtttcctctgcaaaaatggccaagctgacagctgttcctctcagtgcacttgttgatgagcctgtgcatatccgggtcacaggcctgacccccttccaggtggtgtgccttcaggcatcactgaaagatgataagggaaacctgtttaattctcaggccttctacagggccagtgaagtgggtgaggtagatctggaacgtgattcctctcttggaggagactacatgggggtccaccccatgggtcttttctggtccatgaaacctgaaaagctattgactagattggtaaaaagagatgtgatgaataggccccacaaagtccacataaaactttgccatccatactttccagtagaaggcaaagttatcagttcctccttggatagtctgattctggaaaggtggtatatggcacctggtgtcactaggatccatgtaaaggaaggccgaatccggggagccctgtttctgcctccaggagaaggtcctttcccaggggtcattgacttgtttggaggagctggtggactgtttgagttccgggccagcctcctggccagtcatggctttgccactttagctctggcttactggggctatgatgacctgccctctcgactggagaaggtagatctagagtattttgaagaaggtgtagagtttctcctgagacatcctaaggtcctgggcccaggggttggcatcctttctgtgtgcattggagcagagattggactttctatggctattaacctaaaacagataacagccactgtacttataaatgggcctaattttgtttctagcaatccacatgtatatcgtggtaaggtcttccagcctacaccctgcagtgaagaatttgtaaccaccaatgctttgggacttgtagagttctatcgaacctttgaggaaactgcagataaggatagcaaatactgttttcccattgaaaaagctcacggacattttcttttcgtggtgggagaagatgataagaacctcaacagcaaagtgcatgctaagcaagccatagcccagctgatgaaaagtggaaagaagaactggactctgctgtcttaccctggggcaggtcacctgattgagcctccctactccccactgtgctcagcctcaaggatgccctttgtaatcccaagcatcaactggggaggagaggttatcccacacgcagctgcgcaggaacattcttggaaggagatacagaaatttctcaagcagcatcttaatccaggtttcaacagtcagctgtgagtggacttgattatattactggaaagaggagctgggcatctcctggccagctccactcctcacttccatagaggaatgtctttaatctcttatcacatgaggaagaagagtaccaccagaaaatgccgaaggacagagagtgataacctcatgactttggaaggggagacatgttttccatggaataaaatgtccctcagtgagagtcctatatctgtataaataaaatcttagggttttcctaaaatgttcaacaccacagcaactttctgtgatgataattatcaaggaaattatcactgataatccacaggatactttagtttataaaagagacatgaaaagaattatatattgttacttattaatttcttaaaactcacattaaatatgcttagatcatc

SEQ ID NO: 2867 - DNA, 846 bp, Rattus norvegicus
  Genbank Accession No. D45247
cgttgctgtcgggcgctggccagcgtgttgcagcggccgatgccggtgaatcagcacgggttttttggactcggaggtcgtgcagatctgctggacttgggtccggggagtcctggtgatgggctgagcctagccgcgccgagctggggtgtcccggaggagccacgaatcgaaatgcttcatggaaccaccaccctggccttcaagtttcagcatggagtcattgttgcagcggattcccgggccaccgcaggtccctacattgcttcccagacagtgaagaaagtgatagagatcaacccttaccttctgggcaccatggctgggggtgcagcggattgcagcttctgggagcggttgttggctcgacagtgtcgaatctatgagcttcgcaacaaggaacgcatctcggtcgcggcggcctccaaactgcttgccaacatggtgtatcagtacaaaggcatggggctgtccatgggcaccatgatctgtggctgggataagagaggcccgggcctctactatgtagacagtgaggggaacaggatctctggaaccgccttctcagtgggatctggctccgtgtatgcgtttggagtcatggatcgaggctactcctatgacctacaagtggaggaggcctatgacctggcccgccgagccatctaccaagccacctacagagatgcctactccggaggagcagtcaacctctaccatgtgcgggaggatggctggatccgtgtctccagtgacaatgtagctgacttacatgacaagtatacttcatctatcccctgagggaaggtggagtgccctggttataataaataatagtacccgttc

SEQ ID NO: 2868 - DNA, 1403 bp, Rattus norvegicus
  Genbank Accession No. D50694
gggcttgcggcttctaaaatgccggattacctaggtgcagaccagcggaaaaccaaagaggatgagaaggacgacaagcccatccgagctctggatgaaggggatatcgccttgttgaaaacttatggccagagtacttattcgaggcagatcaagcaggttgaagatgacattcagcaacttcttaaaaaaattaatgagctcactggtatcaaagagtccgacactgggctggcccctccagccctctgggatttggctgcagacaaacagacacttcagagtgaacagccgctacaggttgcaagatgtaccaagataatcaacgccgattcagaggacccgaaatacatcatcaacgtgaagcagtttgccaagttcgtggtggatctcagtgatcaggtggcacctactgacattgaggaagggatgagagtcggcgtggacagaaataaataccaaattcacattccactgcctcctaagattgacccaacagttaccatgatgcaggtggaggaaaaacctgatgtcacatacagtgacgttggtggctgtaaggaacagattgagaaattgcgggaagtggttgaaacccctctactccatccagagaggtttgttaaccttggaatcgagcctccgaagggtgtgttgttatttgggccaccaggcacaggcaagaccctctgtgccagggcagtggccaatcggactgatgcttgcttcatcccagttatcgggtctgagcttgtacagaagtacgtcggtgagggggctcgaatggttcgggagctttttgaaatggccaggacaaaaaaagcctgccttattttctttgatgaaattgatgccattggaggggctcggtttgacgatggcgctgggggtgacaatgaggtgcagaggaccatgttggagctcatcaatcagctggatggctttgatcctcggggcaacatcaaagtgctcatggccactaaccgacctgatactctggacccagcgctgatgaggccagggaggctggacagaaagattgagttcagcttacctgacttagagggtcgaacgcacatctttaagattcatgctcgctcaatgagtgtggaaagagacatccgatttgagctactagcccgcctgtgtccaaacagtactggagcggagattagaagcgtttgcacagaggctggtatgtttgcaatccgagcccggagaaagattgctacagagaaggacttcttagaagctgtaaataaggtcatcaagtcgtatgccaaatttagtgctactccccgctacatgacatacaactgagccacagaggctttgactgaaggaacttcctgtgcgttcataacttgttaccgcctcacaaaaataaaagacttaaaaactgt

SEQ ID NO: 2869 - DNA, 1397 bp, Rattus norvegicus
  Genbank Accession No. D50695
ggcttggtcactatggaggagataggcattttggtggagaaaattcaggatgagatcccagcactgtccgtgtctcggccgcagaccggcctgtcctttctgggacccgaacctgaggacctggaggacctatacagccgctacaagaagctacagcaagagctggagttcctggaggtgcaggaggagtatatcaaggatgagcagaagaacctgaagaaggagttcctccatgcgcaggaggaggtaaagcgaatccagagcattccgttggtcattggtcagtttttggaagctgtggatcagaacacagccattgtgggctctaccacaggctctaactactatgtgcgcatcctgagtaccattgatcgggagctgctcaaacccaatgcctcagtggccctgcacaagcacagcaacgcactggtggatgtgctgcctcccgaggccgacagcagcatcatgatgctcacctcagaccagaagcccgacgtgatgtacgccgatattggaggcatggacatccagaagcaggaggtgcgggaggctgtggaactaccactgacgcacttcgagctctacaagcagattggcatcgatcctccccgaggtgtcctcatgtatggcccacctggctgtggaaagaccatgttagcgaaggctgtggcacatcacacgacagctgcatttatccgtgtggtgggctcagagtttgttcagaagtacctgggtgagggcccccgaatggtccgggatgtgttccgcctggccaaggagaatgcacctgccatcatcttcatagatgaaattgatgccattgccaccaagagattcgatgcccagacaggagctgacagggaggttcagaggatcctgctggagctactgaatcaaatggatggatttgaccaaaacgtcaatgtgaaggtaatcatggccacaaacagagcagacaccttggatccagctctacttcggccaggacgcctggaccgcaaaattgaattcccactccctgatcgtcgccagaagaggttgattttctccaccatcaccagcaagatgaacctttctgaggaggtcgacctagaagactatgtggcccgcccagataagatttcaggagccgatatcaactccatctgtcaggagagtggaatgttggctgtccgtgagaaccgctacattgtcctggccaaggacttcgagaaagcatacaagaccgtgatcaagaaagatgagcaggaacatgagttttacaagtgacccctccccacactccccaggcacctgtcccaaaggctagttttctctttacccaggattggtttcgtcaataaatggacgtgattggaaaaaaagcggccgcgaattctagaactagtggatccccc

SEQ ID NO: 2870 - DNA, 1556 bp, Rattus norvegicus
  Genbank Accession No. D50696
acgactgaaggagagatgggtcaaagtcagagtggtggccatggtcctgggggtggcaagaaggatgacaaggacaagaaaaagaaatatgaacctcctgtcccaactagagtggggaaaaagaagaagaaaaccaagggaccagatgctgccagcaaactgccactggtaacacctcacacccagtgccgcctgaaattactaaagctggagagaataaaagactatcttctcatggaggaagaattcattagaaatcaggaacagatgaaaccactagaagaaaagcaagaggaggaaagatcaaaggtggatgatcttaggggaaccccgatgtctgtaggaaccttggaagagatcatcgatgataatcacgccattgtgtccacatcggtgggctcagaacactacgtcagcatcctgtcatttgtagacaaggatctgctggaaccgggctgttcagtcctgctcaaccacaaggtgcatgctgtgataggggtgctcatggatgacacggatcccctggtcacagtgatgaaggtggaaaaggccccccaggaaacctatgcagatattgggggactggacaaccagatccaggaaattaaggaatctgtggagctccctcttacccaccctgagtattatgaggagatggggataaaaccacctaagggggtcattctctacggcccgccaggaacaggtaaaactctattggccaaagcagtagcgaaccagacttcagcgactttcttgcgagtggttggctcagagcttattcagaagtacctaggtgacgggcccaagctggtccgggagctcttccgggtcgctgaggaacacgcaccgtccattgtgttcattgatgaaatcgacgccattgggaccaaaagatatgattcaaactctggaggtgagcgggaaatccagcggacaatgttggaactgttgaaccagttggatggatttgattcgaggggagatgtaaaagttatcatggccacaaaccgaatagaaactttggatccagcacttatcagaccaggccgcattgacagaaagatcgagttccccctgcctgatgaaaagaccaagaagcgcatcttccagatccacacaagcaggatgacgctggctgatgatgtaaccttggatgacttgatcatggcaaaggatgacctctctggggctgacatcaaggcaatctgcacagaggctggcttgatggctctgcgggaacgcaggatgaaagtgacaaacgaagacttcaagaaatctaaggagaacgttctgtataaaaaacaagaaggcacccctgaggggctgtatctctagtgacacagttgtcttcagggaacttaatgagtttcccccacctgggaagatgggaagctgccccaaggaatccatcttccagttaagttttgctagtagaaagcccgtgtcgtggaggacgctgtgtggtctgtctccaatctgttgttggtcattgtgccctgcagctctccgctcccaataaaggattgtcctggtttgctttctaaaaaaacaag

SEQ ID NO: 2871 - DNA, 2091 bp, Rattus norvegicus
  Genbank Accession No. D63704
attttcaagggccagcgagagagggagtttggcacagtttgtggagaactcaaagaaaaaccaactctgttcgcagtccccagctcctccagccatggcaccacaagaacgacttctcatccgcgggggtcgcgtggtcaatgatgacttctcacaggtggccgacgtgctagtggaggacggcgtggtgcgggcgctgggacgggacttgctgcctcccggggacacatcccgggggctgcggatcctagatgcagcgggcaagctcgtcctgccgggaggcatcgacacacacacgcacatgcagttcccgttcatgggctcgcagtcagtcgacgacttccaccagggcaccaaggctgctttggcaggaggcaccaccatgatcattgattttgcgattcctcagaaaggcagctccctcattgaagcttttgagacctggcgcaactgggcagaccccaaagtctgctgtgactatagcctgcacgtggcagtgacatggtggagtgacaaggtaaaagaagaaatgaaaacccttgcccaagataaaggcgttaactctttcaagatgtttatggcctacaaagacctgtacatggtgcaagaccagcaaatgtacgctgccttttctcagtgcaaggagataggggccattgctcaggtgcatgccgagaatggagatttgattgcagagggggccaagaagatgctggcactggggataacgggccccgaggggcacgagctgtgccgcccggaagcagtggaggcagaggccaccttgagagccatcaccattgctagcgctgtgaactgccctctatacatcgtgcacgtgatgagcaaatccgcagcgaaggtgatagctgatgcgaagagagaaggaaaggtggtctatggagaaccaattgcagcaggtctgggcacggatggcactcagtactggaataaagaatggcgccatgcagcccaccatgtcatgggtcccccactgagacctgatccatcaacgcctggctttctcatgaatctgttggctaatggcgatctgaccacaacagggagtgacaactgcactttcaacacctgccaaaaagctctagggaaggatgacttcactaagattcccaatggggtgaatggtgtcgaggacaggatgtcggtgatatgggaaaagggcgtgcacagtggcaaaatggatgaaaatagatttgtggcagttaccagcacaaatgcagccaaaatctttaatctttatccgaaaaaaggaagaatagctgtaggctcagatgctgacatggtgatctgggacccagaagccaccaggacgatctcagccaaaacacatcatcaggccgttaacttcaacattttcgagggcatggtttgccatggggtgcccctggtgactatttcaagaggcagagtggtgtatgaagcaggcgttttcgacgtcacagcaggacacgggaagtttattccgcgacaacctttcgctgagttcatttacaaacgagtcaagcagcgagaccagacctgcacacctataccggtgaagcgtgcgccctacaagggagaagtcatcacattgaaacccagagagacaaaagaagacgacacagctgggaccaggatgcagggccattcctgatttggatgctggggttaagcaagtgcaaacagagtgaaggctcccaggctcccctccccaccatgctgccaagccctggagaagcacctgccatttcaactctccaagatcctttaggaaaaattcatcgctctaggcctctttgatttttctctcagaagcaatagcagcctgcctcaccctgcctttgttgctgtggaagattgaggatataaatgaacattattgggatgaaacgtctgcatgaagattcattgaagattcctttttcaaatgccatctctccttaccctagatttctttctttgggtttttaaagatttccttctggtgtaaaggttttgtttgtttgttttgttttaatgtttatgtttgttttaaaaatcagtgattttacatttcattgcaactaataaacatctggagcttcattctgc

SEQ ID NO: 2872 - DNA, 1004 bp, Rattus norvegicus
  Genbank Accession No. D82071
cagagctccttccaggctgaactttggacgtgtgtatctcgtgtgagcaatgcaggaaggcttttaggtggaggaagtgggctctggctgtcttgtgactatcactcgctcatcacagaagccacagtacagataggaacggagacacagagacacagcacagcgaagggactctcggcatagaactgtaccatgcccaactacaaactgctttattttaatatgaggggaagagcagaaattattcgttatatatttgcttatttggacatcaagtacgaagatcacagaatagaacaagctgactggcctaaaatcaaaccaactcttccatttggcaaaatccctgttttggaggtggaaggacttacacttcaccagagcctcgcaatagcaagatatttgaccaaaaacacagatttggctgggaagacagagctggagcagtgtcaagtggatgcagtggtggataccctggacgatttcatgtcactctttccatgggcagaggaaaatcaagatctaaaagagcggacgttcaatgacttgctcacacgtcaagcacctcatcttctgaaagatttggacacatacttaggagacaaagagtggtttattggcaattatgtaacttgggcagatttctattgggatatctgcagcaccacacttttggtcttaaagcccgacctgttgggcatctaccccagactggtgtcactacggaacaaagtccaagctattcctgctatttctgcctggatcctaaagaggccacagacaaaactctaaatgattctggacccatcatcagatgagaagtccatcagccggctacagcatctgcaaacttctcgccaccactaggccttcctctcactttgtagtattgtgcttgctgtgtaggattcctttgttgtgactttgtctttttctgtaggcatttagtttccaatattttttcaaaacttcacacgttttataattacagggaaatagttcac

SEQ ID NO: 2873 - DNA, 1621 bp, Rattus norvegicus
  Genbank Accession No. D82928
gtggatcgcccgggagaactgggcccagggctcaggtggagctgccgatgccccgggctgaaaggtgagaccacgctggtgaggctgggacaagaccttgcacctccagacctgggccgagaccacaaggggagccgccaagatgccagaggaaaatatcttcctgttcgtgcctaatcttattggttatgcccggattgttttcgccatcatttccttctactttatgccctgctgccccttcacggcctcctccttctatctactcagcggacttctagacgctttcgatggacacgcagctcgagcccttaatcaaggaacccgatttggggccatgctcgacatgctgacggaccgttgcgccaccatgtgtctcttggtcaacctggccctgctctaccctcgggccactcttctgttccagctcagcatgagcctggacgtggccagtcactggctgcatctgcacagttctgtggtgcgaggcagtgagagccacaagatgattgacctgtctgggaaccctgtgcttcgaatctactatacttccaggcctgctctgttcaccctgtgtgctggaaatgaactcttctactgcctcctgtacctgttcaatttctccgagggaccactagtcggctctgtggggcttttccgaatgggcctctggatcacagctcccattgccctgctcaagtccatcattagtgtcatccacctcgtcacggctgcaaggaacatggctgccctcgatgcagcagaccgcgccaagaagaaatgatcctctcccatccccagctgcccacctgccctgggtatctactgtgccacatggctcctctcctcctaagaggtcccagtgtcatgtctttctcatgtgttctctaacctgctgggattgggggtcaccctctgtttggtgttgtcactgtctttttactcctgataactagacccaacccgtgaccccaaggacctggcactgcaaagcaggaagggtgctcaggaggcccactcatccagccggtgctccaggaggcctgtctgaagactgggtgttgccacatatcctgctggatcagcctggggtctggcctgagactttgggaacttatacgggcaaaggagtcaggctgatgggccaagaaggctggggtaccaggccagggagggaaggggccaagggccaactagatctttcccttaggcaagctcctctatcctgtcctgctctggaaacctccataataaaggggggcaccttcactctttttggatttgtttactttgggacactcttagatgatggcctagggttcaaaggagctgggtaaaaaaaaaagaaatccacctggatgcttttcccacaaaggtggttggctcctccctgtcattccagtgacctcagagaggcctcgaggttcacaagcgttgtcctgcccacctgctctatgtcctggctggccactttcactgtaaccttgatgtttttgaccctcatgagaatgtaagcttcacaagagcagatttagatctttctcgtctctgcctggagtgaaaagtagcctggcatgtggtaactgcttaataaatattcatggaaagatgaaaaaaatac

SEQ ID NO: 2874 - DNA, 1111 bp, Rattus norvegicus
  Genbank Accession No. D86580
agagccaggaagaaacaggaacaagacacagaccatgagctccagccaatcaggggtctgcccatgccagggctctgcaagccaccccaccattctctacacacttctaagccccggtcccaggaccaggcccatggcacccgcatctcgcagccactgcctgtgccagcaacaccggcctgtgcgcctgtgtgctccacaccgcacctgcagggaggccttggatgtcctaggcaagactgtagccttcctcaggaacctgccgtccttctgcctcctgccccatgaggatcagcgacggctgctagagggctgctggggccctctcttcctgcttgggttggcccaggatactgtgacctttgaggtggccgaggctccggtccccagcatacttaaaaagatcttgctagaggaacccaacagtggtgcccagggtgcccagccaccagacccaccacaaccctcactggctgccgtgcagtggctgcagcactgcctggagtctttctggagccttgagctgggtcccaaggagtacgcatacctgaaaggcactatcctcttcaacccagatgtgccaggcctccatgcctcctgccacattgcacacctgcaacaggaggctcactgggcattgtgtgaagtcctggagccctggtacccagctagccaaggccgcctggcccgaatcctcctcatggcttccaccctcaagaacatctcctgtacccttctggtagatctcttcttccgccctgtcatcggagatgttgacatcactgaactgcttgaagacatgcttttgttgaggtgacctgtagaatggggtccggtgcctccaaaggggagcctgaaaggccgcactcagctcccctggagcagccctcgtctcagccccacccccagcttggatttcctcggtttgcatacagtgtttgactaactgtccagcaggcccttgatggctcccaaaacctccaggccaatatgccttcccttacctgggtagggatgggagcatgaggctgtgcttcagggcagaattcctccagactttatatagaactaagttaagttattggtttttgtaataaaaggtgtgaactgc

SEQ ID NO: 2875 - DNA, 994 bp, Rattus norvegicus
  Genbank Accession No. D86711
  misc_feature (1)..(994): n = a or c or g or t
acatctgggattctgtcagataaaagaacttggagagtttttaaactccttcacatctaatttccccaggaaaggggtcacagttccatgatggtggtgggagatcnggaanagagcttggccaaatttaagaaacaccaggcagccctgccctccattcttggaagacagggattgtggtgagccccttcaatgcttccctagaatttacnggaaaatcttaaaatccaaggccaggagagaagaatccaaaaaagcaatatttttcatcatatgccannaatgggataganagaaggagtggcaggcctangcccctccgattgtcccttggggtttaccccttagcccacctcaatatggtgctgggtnnangggtanctgggttctaaccttaaacagggaagactcccgcctctatacagagaccctttaatttttttattctgattagccntctttaaaccancaaanaatnaaatnnatcctnatctaaaacatctgggattctgtcagataaaagaacttggagagtttttaaactccttcacatctaatttccccaggaaaggggtcacagttccatgatggtggtgggagatcnggaanagagcttggccaaatttaagaaacaccaggcagccctgccctccattcttggaagacagggattgtggtgagccccttcaatgcttccctagaatttacnggaaaatcttaaaatccaaggccaggagagaagaatccaaaaaagcaatatttttcatcatatgccannaatgggataganagaaggagtggcaggcctangcccctccgattgtcccttggggtttaccccttagcccacctcaatatggtgctgggtnnangggtanctgggttctaaccttaaacagggaagactcccgcctctatacagagaccctttaatttttttattctgattagccntctttaaaccancaaanaatnaaatnnatcctnatctaaa

SEQ ID NO: 2876 - DNA, 2149 bp, Rattus norvegicus
  Genbank Accession No. D87336
agcgggttgtagtataaccccggagctcacctgaggaccctgaaaactaacgttttcccacgaggcagtttgggcaccatgaacaacgcaggactaaattcggagaaggtagctgctttgatccagaaactaaattctgaccctcagttcgtacttgcccagaatgtcgggaccacccacgatctgctggacatttgtctgaagagggccacagtccagggtgctcagcatgtgttccagcacgttgtgcctcaggaaggcaagccagtcaccaaccagaagagctctggacgatgctggatcttttcttgtttgaatgttatgagacttccattcatgaaaaaatttaacattgaagaatttgagtttagtcagtcttacctgtttttttgggacaaggtcgaacgctgttacttcttcttgaatgcttttgtggacacagcccagaaaaaagagcctgaagatggaagactggtgcagtatttgcttatgaaccctacaaatgatggtggacagtgggatatgcttgtcaatattgttgaaaaatatggtgttgtccctaagaaatgcttccctgaatcgcatacgacagaggccaccagaagaatgaacgatattctgaatcacaagatgagagaattctgtatacggcttcggaacctggtacacagtggagcaaccaaaggagagatctcatctacacaagatgccatgatggaggagatattcagagtagtgtgcatatgtttgggtaacccaccagagaccttcacctgggagtatcgagacaaagataaaaactaccacaaggtcggccccataacacccttgcagttttacaaggaacacgtgaagccactcttcaacatggaagataagatttgttttgtgaatgacccacggccccagcacaagtacaataaattgtacacagtagactacttgagcaatatggttggagggagaaaaacgctgtataacaaccagcccattgacttcttgaaaaagatggttgctgcctccatcagagatggagaggctgtgtggtttggctgtgatgttgggaagcacttcaatggcaagctgggcctcagtgacatgaatgtctatgatcacgagttagtgttcggtgtctccttgaagaacatgaacaaagctgagaggttggcttttggtgagtcactcatgacccacgccatgaccttcactgctgtctcagagaaggatgaccaggaaggtgcatttgtgaaatggagagtagagaattcatggggtgaagaccacggccacaaaggttacctgtgcatgaccgatgagtggttctctgagtatgtctacgaggtggtggtggacaagaagcatgtcccagaagaggtgctggctgtgttagagcaggagcctattgtcctgccggcatgggaccccatgggggctttggcttgaatgaggtgagtggaccgcctccagctccttcctcttcccatggatcggatgtagctgccaaggacagatccagggactgaaaccaaagttacatgggtggctgttcccacaggatacagtcagactgttgggtttccagtctcttccaggaacctctttgagaaaaatgctttctgctgaaacaaaatattcataaaggaaaaaaataaaggggaaggattggggcatcctgtctgctctcctcatctctgacggctcaggacctcatagcattttaattggatgtagttgtccacggtcatggtctttgtgtttgtggtaagacagtaagatgagcggctgaggtgtgtggagaacaaacagtcctgggctccttgttcctacagtagattagggagggttagctaggatttgaactctcaacgctgcatgctgccgcacaggtcactgtccttcctacctggcagtcgctgaattcaacttccacaaggttgtctcatgtgactaatagctcgagaagggaaggctgatcggctctgacatgattccttcctgttctgaactgtggggctcacctgggccaggttaaacctcgtcaggggctcaactgtcatcactagggcaccccattgaatgctttaacgtctgtctctgcgttgggggttgggtggggagaaaaagtgatgctcattctttctgataactc

SEQ ID NO: 2877 - DNA, 1726 bp, Rattus norvegicus
  Genbank Accession No. D87839
cgatcgcgcaagtcggacccgtggatcacagcctgtagatcgcggcccgggcctggaggacaacagcaagtgaagggggttcctcttcctgaaggaggggtcatggccttcttgttgactacccgacggctggtctgcagttcccagaaaaacctccacctcttcacacctggatccagatacatcagccaagctgctgccaaagttgactttgagtttgattatgatggaccactcatgaagacagaagtcccgggccctagatctcaggagctaatgaaacagctgaacacaatccagaatgcagaggccgtgcactttttctgcaactacgaagagagccgaggcaactacctcgtggacgtggatggcaaccgcatgttggacctgtattctcagatctcctctgtacccatcggttacaaccatccggctctggcgaaactcgttcaacagcctcaaaacgcgagcactttcatcaacagacctgccctgggcatcctgcctccagagaactttgtggacaagctccgggagtccttgatgtcggtggcgcccaaaggcatgtgtcagctcatcacgatggcctgcgggtcctgctccaatgagaatgcattcaagaccatcttcatgtggtaccggagtaaagaacgaggtcagagaggtttctccaaagaggagctggagacttgcatggttaaccagagtcctggatgcccagactacagcatcctctccttcatgggtgctttccacgggaggaccatgggttgcttagcgaccacacactccaaagcaattcacaagattgacatcccttcctttgactggcccattgctccattcccacggctgaaatatcccctggaggagtttgtgacggacaatcagcaagaggaggcccgctgtctagaagaggtggaggatctaattgtgaaatatcggaaaaagaagagaacagtggctgggatcatcgtggagcccatccagtccgaaggtggagacaaccacgcatcagatgacttcttccggaagctgagagacatagccaggaagcatggctgtgccttcttggtggacgaggttcagactggaggaggctgtacaggcaagttctgggcccatgaacactggggcttggatgacccagccgacgtgatgtcgttcagcaagaagatgatgactgggggcttcttccacaaggaggagtttcgaccaagtgctccttaccggatcttcaacacctggctgggggacccatccaagaacttgctgctggctgaggtcatcaacatcatcaagcgggaagacctgctcaacaacgtggcccatgccgggaagaccctactgaccgggctgctggacctccaggcccagtacccccagttcgtcagccgggtgaggggacgaggcaccttctgttccttcgacactcccgacaaagccatacggaataaactcatcctaattgccaggaacaaaggtgtggtactggggggctgcggtgacaaatccatacgtttccgtcccacgctggtcttcagggatcaccatgcccacttgttcctcaacattttcagtggtatcttagcagacttcaagtaaagaagccatctccacgacattcagagaaagctctgtcccagcggtgtcaacttgattagtttgcctaattcatattttcacttcaaagtttatcagaggcgaatgcataaactaaagggtc

SEQ ID NO: 2878 - DNA, 1156 bp, Rattus norvegicus
  Genbank Accession No. D87991
cctggagctttcgccttcgcctccggtaccgctacctgttctgaacggatctccggccgactcgtccctgcgtctcatggccgctagcagatccctggtgcccgaccggctgcgcctaccactctgcttcttgggtgtctttgtctgctacttctactatgggatcctgcaggagaagataacaagaggaaagtatggagaaggacccaaacaggagacattcacctttgccttaactttggttttcatccagtgtgtgatcaatgctatgtttgccaagatcttgatccagttttttgacactgccagggtggatcgcactcggacctggctctatgctgcctgctctgtctcctatgtgggcgccatggtctccagcaactcagcactacagtttgtcaactatccaactcaggtccttggtaaatcctgcaagccaatcccagttatgctcctcggagtgaccctcttgaagaagaagtacccattggccaagtacctgtgtgtgttgctaattgtggctggcgtggctcttttcatgtataagcccaagaaggtggttgggatagaagagcacacggtcggctttggagagctccttctgctcttgtctctgaccctggatggactgacaggtgtttcccaggaccatatgcgggctcattaccaaacaggttccaatcacatgatgttgaacatcaacctttggtccacggtcttgctcggtgctgggatcctgtttactggggagctctgggagttcttgagtttcgccgagaggtacccgaccatcatctataacatcctgctctttggcttgaccagtgccttgggtcagagctttatcttcatgacagtcgtgtacttcggccccctgacctgctccatcatcaccacgactcggaagttcttcaccatcttggcttctgtgatcctctttgccaatcccatcagctccatgcagtgggtgggcaccgtgctggttttcctgggtctgggtcttgatgccaagtttgggaaaggaacaaagaagacctcccactaggaaaagagaggcttcctccactccagaaacacttaaattattatctccaacagtgacatcttgggaaaatggactcagtcacgataagggactgggttccaatctttttat

SEQ ID NO: 2879 - DNA, 2632 bp, Rattus norvegicus
  Genbank Accession No. D89340
ctgcagcagggctcatggcagatacccagtacatcctgcccaatgacatcggtgtgtctagcctggactgccgggaggcattccgcctgctgtcacccacagagcgcctctatgcccatcacctgtctagagccgcttggtatggaggcctggctgtgctgctccagacatctcctgaagccccctacatctatgccctgcttagccgcctcttccgtgcccaggaccctgaccagctacgccaacatgccctggctgagggcctgactgaagaagagtatcaggcattcctggtctacgctgcaggggtctactccaacatgggcaactataagtccttcggtgacaccaagtttgtccctaacctgcccaaggaaaagctggagcgtgtgatccttgggagtaaggctgcccaacagcatccagaagaagtcaggagcctttggcagacctgtggggagcttatgttctccctggaaccaaggcttcgacatcttgggctggggaaggagggagtcaccacctatttctctggggattgtgccatggaagatgccaagctggcccaggacttcctggactctcagaacctcagtgcatacaacacccggctcttcaaggtggtcggccaggaagggaagtaccactatgaggtgcgactggcttcagtactcaacacagaacctgctctcgactctgagttgacttccaagctgaagagctacgagttccaggggaatcatttccaggtcacccgtggggactatgcccccatcctccagaaggtggtagaacacttggagaaagctaaggcttatgcagccaatagccaccaggagcaaatgctggcccagtatgtggagagcttcacccagggttccattgaggcccataagaggggctcccgcttctggattcaggacaaaggtcccattgtagagagttacattggcttcattgagagctaccgtgacccctttggctcccgaggagaatttgaaggcttcgtggccatggtaaacaaagacatgagtgcaaagttcgagcggctggttgcaagtgctgagcagctgctgaaggagctgccttggcctcctgcctttgagaaggacaagttcctcacccctgacttcacttccctggatgtccttacctttgccggctctggcatccctgcaggcatcaacatccccaactatgatgacctgagacagacagagggctttaagaatgtgtctctggggaatgtgctggctgtggcctatgccacaaagcgggagaaactcaccttcatggaggaagaagacaaggacctgtacatccgctggaaggggccgtcctttgatgtgcaggtggggttacatgagctgttgggccatggcagcggcaagctctttgtacaggatgagaaaggtgctttcaactttgaccaggagacagtgatcaacccagagactggggagcagatccagagctggtaccggagtggagagacatgggatagcaaatttagcaccattgcctccagctacgaagagtgccgggctgagagcgtgggcctctacctctgtctcaacccccaagtacttcagatctttggctttgagggaactgacgcagaagatgtcatctatgtgaactggctcaacatggtccgggctgggctgttggctttggagttctacaccccagagacggccaactggcgacaggcccacatgcaggcccggtttgtgatcctgagggttttgctggaagctggcgaaggactcgttaccgtcacccccaccacaggctctgatgggcgcccagatgctcgtgtccacctggaccgcagcaagatccggtcagtgggcaaacctgctttggagcggttcctccggagactgcaggtgctgaagtccacaggggatgtggttgcagggcgcgccctgtacgagggctatgcggcggtcactgacgcacccccagagtgcttcctcactctaagggacacggtattgctgcgcaaggaatcccggaagcttattgtccagcccaacactcgcctggaaggctcagaagtgcaacttgtagagtatgaggcctcagcggctggtctcatccgatccttctgtgaacggtttccggaggatgggcctgagttggaggaggttcttacccagctggccacagcagatgctcaattctggagggatcaggtccaggaggccccatctggccaggcttgagaagatctgtgtggcatctcccctttcatcaaaccagggctgtctgtggccctgaattgtgtttaggaggtgggggaagggcaggagctcggactttggtgctacctcagctgagggtggtgatgctaaccccttccatttgtcagcactttccagtttaccattatgtcctcatttcctggatctgcactgccatctgtggtgggagctcaacagggtgcctagtctggttttccaaatgggaaggtggcagttctgagaagtaactgttctagatccagcaggtggcatgtgacagagccagggctcaaagcattctcaccaaatccagtgctcttcgtgtattaccttttatagccagaaaaataaatatgacaaccaccaaaaaaaaaaaaaaaaaa

SEQ ID NO: 2880 - DNA, 1928 bp, Rattus norvegicus
  Genbank Accession No. D89514
gagcctacgcacgtgtcctgtctgtctccagactccgcgacccggcgcagcagccatggcttcctcccagcttgccctgttcagtgtgtctgacaaaactggcctcgtggaatttgccagaaaccacgcgtctcttggtttgagtttggtcgcttctggaggcacggcaaaagcgatcagggatgctggcctggcagtgagagatgtgtctgagctaactgggttccctgaaatgttaggggggcgtgtgaaaaccttgcatcctgcagtccatgctggaatcttagcacgcaatattccagaagatgctgctgacatggccaggcttgatttcaacctcataagagttgttgtctgtaacctgtacccgttcgtgaagactgtggcttctccagatgtaaccgttgaggcagctgttgagcaaattgacattggtggcgtgaccttactgagagctgcagccaaaaaccatgctcgagtgacagttgtgtgtgagccagaggactatggtgcggtggctgcagagatgcagggctctggtaataaggacacctccctggagaccaggcgccacttggcattgaaggcattcacgcataccgctcaatatgatgaagcgatttcggattacttcaggagacagtacagtaaaggaatttctcagatgcccttgaggtatgggatgaacccccatcagactcctgcccagctgtatacactgaagcccaagcttcccatcacagttctcaacggagccccaggattcataaacctctgcgatgctttgaatgcctggcagctggtgacagagctgagaggagcagtagacattccagctgcggcgtctttcaagcacgtcagcccagcaggtgctgctgttggggttccactcagtgaggacgaagccagagtctgcatggtctatgacctctatccgaccctcacgcccctggccattgcatatgcaagagcaagaggagctgataggatgtcttcatttggtgattttgttgcattatctgatgtttgtgatgtcccaactgcaaaaattatctccagagaagtgtcagatggtattgttgccccaggatatgaggaagaggccttgaaaatactttctaaaaagaaaaatggaagctactgtgttcttcagatggaccagtcctacaaaccggatgaaaatgaagttcgaacactctttggtcttcgtttaagccagaagagaaataatggtgttgttgacaagtcgttgtttagcaatattgtcaccaagaataaagatctgccggaatctgctctccgagacctcattgtcgccaccatcgctgtcaagtatactcagtctaattcggtgtgctatgccaaggacgggcaggttattggcatcggagcaggacagcagtctcggatacactgtacacgccttgcaggtgataaggcaaactcttggtggcttcggcaccatccacgagtgctttccatgaagtttaaagctggggtgaagagagcagaagtctccaatgccatcgatcagtatgtgaccggcaccattggtgagggtgaagacctggtgaaatggaaagcactgtttgaagaggttcctgagttactcactgaggcggagaagaaggaatgggtggacaagctgagtggcgtgtctgtcagttccgatgctttctttcctttcagggataatgtagaccgagcgaaaaggagtggtgtggcctacattgttgctccatccggatctactgccgacaaggttgtgatcgaggcgtgtgacgagctggggatcgtgttggctcatacagatctgcgtctcttccaccactgaccttggctgacattgttacattgtttcctagtgggagatactcatgtgtgggaccctgaaagtatctctttttaaacagagtcattcttatctt

SEQ ID NO: 2881 - DNA, 3657 bp, Rattus norvegicus
  Genbank Accession No. D90109
ccaacacagaactatggaagtccacgaattgttccggtattttcgaatgccagagctgattgacattcggcagtacgtgcgtacccttccaaccaacacactcatgggcttcggggcttttgcagcgctcaccaccttctggtatgccacccggccgaaggccctgaagccaccatgtgatctgtccatgcagtctgtggaagtaacgggtactactgagggtgtccgaagatcagcagtccttgaggacgacaagctcttgctgtactactacgacgatgtcagaacgatgtacgatggcttccagagggggattcaggtgtcaaatgatggcccttgtttaggttctagaaagccaaaccagccatatgagtggatttcttacaaacaggttgcagaaatggctgagtgcataggctcggcgctgatccagaagggtttcaaaccttgctcagagcagttcatcggcatcttttctcagaacagacctgagtgggtgaccatcgagcaggggtgcttcacttactccatggtggttgttccgctctatgacacgcttggaaccgacgccatcacctacatagtgaacaaagctgaactctctgtgatttttgctgacaagccagaaaaagccaaactcttattagaaggtgtagaaaataagttaacaccatgccttaaaatcatagtcatcatggactcctacgacaatgatctggtggaacgcggccagaagtgtggggtggaaatcatcggcctaaaagctctggaggatcttggaagagtgaacagaacgaaacccaagcctccagaacctgaagatcttgcgataatctgtttcacaagtggaactacaggcaaccccaaaggagcaatggtcacccaccaaaacattatgaacgattgctccggttttataaaagcgacggagagtgcattcatcgcttccccagaggatgttctgatatctttcttgcctctcgcccatatgtttgagaccgttgtagagtgtgtaatgctatgtcatggagctaagataggatttttccaaggagacatcaggctgcttatggatgacctcaaggtgcttcagcctaccatcttccctgtggttccgagactgctaaaccggatgtttgacagaatttttggacaagcaaacacgtcagtgaagcgatggctgttggattttgcctccaaaaggaaagaggcggagcttcgcagtggcatcgtcagaaacaacagcctgtgggataaactcatctttcacaagatacagtcgagcctgggcgggaaagtccggctgatgatcacaggagcagccccagtgtctgccacagtgctgacgtttctgagggcggctctcggctgtcagttctatgaaggctacggacagaccgagtgcaccgctggttgctgcctgagcttgcctggagactggacagcaggccatgttggtgcccccatgccttgcaattatatcaagcttgtagatgtggaagatatgaattaccaggctgccaagggcgagggtgaggtgtgtgtgaaaggggcaaatgtgttcaaaggctacttgaaagacccagcaagaacagctgaagccctagataaagatggttggttacacacgggggacattggaaaatggctgccaaatggcaccttgaagattatcgacaggaaaaagcacatatttaaactagcccaaggagagtacatagctccagaaaagatcgaaaatatctacctgcggagcgaagccgtggcccaggtgtttgtccatggagaaagcttgcaggcctttctcatagccattgtagtacctgatgtggagatcctaccttcctgggcacagaagagaggatttcaagggtcctttgaagaactgtgcaggaacaaggatatcaataaagctatcctggaagacatggtgaaacttgggaagaatgctggtttgaagccatttgaacaggtcaaaggcattgctgtgcacccggaattattttctattgacaatggcctcctgactccaacactgaaggcaaaaaggccagagctgcggaactatttcaggtcacagatagatgaactgtactccaccatcaagatttaacatgaggaagaatccttagaggaaatggcgcacctccacaatcctcctcgtaccaatggcctttgagttggtaactctgcctgcagcgagtgtgggaaaggaaatgccatgctggacttgtgcacagggtcttaccatagggatagcagagggcacggaacactgccttacagtcacctgtgttgtagcccatgatcctggggatacacagtttccaaaacgagccttaaacattgtaaaggggaacccataaaagtgctaagttatttaagacttcaaccaataaggtgggtgttaaaacttctgtctcctgtttttctaaccaaggggttaggacttactctttctgatacgtctgctgctggctgcacaccctgcagccgtctgctgctctgaagagtacagtacactggaagaaagctacccctttaagagcaactgtccaggctgaagaaagtcacagtggaccagagatttctcttcttaaccccttccccttgtccctttccctcaccactcacatgcagtacatttatgtgacccttctggtttgtaagggttccaaagggtccctgttgtgcctgctggtaacctcgtgtttccagtacactaaagaacagatcctcctcagaacaatgcgggtacccagtctcagaaaaggaaaaaaaaaaaaaggtggctcctgcgttgagccagcaacttgcaggctcacacagatgtcctcagactccgctccatctctgctccctgcccctcccattcttcccaggggttatgagaaaccctgccttagactctgcagtgaagatggtgttccgaagaatgacctggatgggccatgctcaactgtgattcctcccccgctgtccactcgctcgctcgtcgtggaaccagcccgtatctgcagcggcctctgtgctccaaatgtggttttctagcaaatgctaatgtggtgatcaacttgctttgttttctttccctcccagttaaactcaggcacagcatgtcttcagaagtatctaggcagttggtatacgtgggtacttattaaagtggacagtaataagtaaatgtccttattataaaactacctgatttatgtgaaatgcatttgataagccaaaaatctggggtgtagaaatctgggggaaaaaaaatcatatcctgggatcaacttcccaaggtatattttttaagttaatttgggaaatgaacagcatttcactttgccgcgagtcttggccacatttgacctatttgagctgtttatacatttgaagccactgttgttggctgtgtgacagtgtgtgtatcttgaagcacaactgggtttgcactaaagaatcatcattgtaataacactatttggtagcctaacttcattttcgtattcttaactgcacaggaagtcgataatttgtcacaacggggttttgaatgtttgctttcagtgttggctatttctatgttttataaaccaaaacagaatttccaaaaacaatgaaggaaaccaaaataaatatttctgcatttggagtgagtgg

SEQ ID NO: 2882 - DNA, 1173 bp, Rattus norvegicus
  Genbank Accession No. E01050
tcgcaccagctgctggtgccacccccagaggccctgagcaagcccctgtcaattcctaagaggctcctgttgggtccgggaccctccaacctggctcctcgtgtgctagcagctggaagtctgaggatgattggccacatgcaaaaagagatgtttcagatcatggatgagatcaagcagggcatccagtatgtgttccagaccaggaaccccctcacactggttgtcagcggcgagggcctggctcagcataaaccagtgttgtcaggacattgtgccatggagactgccctgctgttcctgacccacggggagtcatccactttcaacctcctggagcctggggactcctttggtgtgctgcagcccctggatggtttcgggcttgtgggaaccaatggcatctgggggatagagctctgccacaggtatcagtgcctactccgggctgcagagatcgctgagcggattggactggtggactcggtggcatcattgggcggagcccgtgtgcaccagatgatcaagaagcctgtccctatctacatggaccaacaaggcatcggagaacattacacactgcaggaggtggaggacatcttgtactctggctctcagaaggtcctgaatgccccaccagggatctccctcatcgagcagggcctggagaattcctggcggcgttccttcaacgacaaggccaaatccaaagtccacagggaggctacagcacatctgcacaagtactcccggaagacaaagccagtctccttctgcctgcgggagttgggcttaaagttcttttacacagacatcacttatttgtccaagttggtgaaggacccggaaatccggctacctacatggggctgtgagggcaagaccagagtaattatcaccaccgtgaccgtgcctgccggctaccatcatacgttgcctgtcatcagcttatacaactggagggacatcgtcagctacgtgctgtgcctgagggagagcctagcactcatttcagaccacttcaacattgaaatctctggtggtcttgggccctctgaggataaggtgctgcggattggcctcctgggctacaacgccaccacagagaatgcggaccgtgtagcggaggccctgagggaggccctgcaacattgtcctaagaataaattgtga

SEQ ID NO: 2883 - DNA, 1872 bp, Rattus norvegicus
  Genbank Accession No. E01524
atgatccaaacaacggccccacccgtcaaagagagcagcttcgtggaaaagatgaagaaaacgggaaggaacattatcgtattctatggctcccagacgggaaccgctgaggagtttgccaaccggctgtccaaggatgcccaccgctacgggatgcggggcatgtccgcagaccctgaagagtatgacttggccgacctgagcagcctgcctgagatcgacaagtccctggtagtcttctgcatggccacatacggagagggcgaccccacggacaatgcgcaggacttctatgactggctgcaggagactgacgtggacctcactggggtcaagtttgctgtatttggtcttgggaacaagacctatgagcacttcaatgccatgggcaagtatgtggaccagcggctggagcagcttggcgcccagcgcatctttgagttgggccttggtgatgatgacgggaacttggaagaggatttcatcacgtggagggagcagttctggccagctgtgtgcgagttctttggggtagaagccactggggaggagtcgagcattcgccagtatgagctcgtggtccacgaagacatggacgtagccaaggtgtacacgggtgagatgggccgtctgaagagctacgagaaccagaaaccccccttcgatgctaagaatccattcctggctgctgtcaccgccaaccggaagctgaaccaaggcactgagcggcatctaatgcacctggagttggacatctcagactccaagatcaggtatgaatctggagatcacgtggctgtgtacccagccaatgactcagccctggtcaaccagattggggagatcctgggagctgacctggatgtcatcatgtctctaaacaatctcgatgaggagtcaaacaagaagcatccgttcccctgccccaccacctaccgcacggccctcacctactacctggacatcactaacccgccacgcaccaatgtgctctacgaactggcacagtacgcctcagagccctcggagcaggagcacctgcacaagatggcgtcatcctcaggcgagggcaaggagctgtacctgagctgggtggtggaagcccggaggcacatcctagccatcctccaagactacccatcactgcggccacccatcgaccacctgtgtgagctgctgccacgcctgcaggcccgatactactccattgcctcatcctccaaggtccaccccaactccgtgcacatctgtgccgtggccgtggagtacgaagcgaagtctggccgagtgaacaagggggtggccactagctggcttcgggccaaggaaccagcaggcgagaatggcggccgcgccctggtacccatgttcgtgcgcaaatctcagttccgcttgcctttcaagtccaccacacctgtcatcatggtgggccccggcactgggattgcccctttcatgggcttcatccaggaacgagcttggcttcgagagcaaggcaaggaggtgggagagacgctgctatactatggctgccggcgctcggatgaggactatctgtaccgtgaagagctagcccgcttccacaaggacggtgccctcacgcagcttaatgtggccttttcccgggagcaggcccacaaggtctatgtccagcaccttctgaagagagacagggaacacctgtggaagctgatccacgagggcggtgcccacatctatgtgtgcggggatgctcgaaatatggccaaagatgtgcaaaacacattctatgacattgtggctgagttcgggcccatggagcacacccaggctgtggactatgttaagaagctgatgaccaagggccgctactcactagatgtgtggagctag

SEQ ID NO: 2884 - DNA, 3225 bp, Rattus norvegicus
  Genbank Accession No. E03428
atggccggacgcgcccgcagcggtctgctactgctgctgctggggctgctcgccctgcagagcagctgcctggccttcagaagcccactttctgtctttaagaggtttaaagaaactaccagatcattttccaatgaatgccttggtaccattggaccagtcacccctcttgatgcatcagattttgcgctggatattcgcatgcctggggttacacctaaagagtctgacacatacttctgcatgtccatgcgtctgcctgtggatgaggaagccttcgtgattgacttcaagcctcgtgccagcatggatactgtccaccatatgctgctgtttggatgcaatatgccctcgtccactggaagttactggttttgtgatgaaggaacctgtacagataaagccaatattctatatgcctgggcaaggaatgctccccccacccggctcccgaaaggtgttggattcagagttggaggagaaactggaagcaaatacttcgtccttcaagttcactatggcgatatcagtgcttttcgagataatcacaaagactgctctggcgtgtccgtacatctcacacgtgtgccccagcctttaattgcgggcatgtaccttatgatgtctgttgacactgtcataccaccaggagagaaagtagtgaatgctgacatttcgtgccaatacaaaatgtatccaatgcatgtgtttgcctacagagtccacactcaccatttaggtaaggtggtgagcggatacagagtaagaaacggacagtggacactgattggacgccagaacccccagctgccacaggctttctaccctgtggaacaccccgttgatgttacttttggtgatatactggcagccagatgtgtgttcactggtgaagggaggacagaggccacccacatcggcggcacttctagtgacgaaatgtgtaacctgtacatcatgtattacatggaagccaaatatgcactttccttcatgacctgtacaaagaacgtggctccagatatgttcagaactatcccagcagaggccaatatcccaattcctgtcaaaccggacatggttatgatgcacgggcatcacaaagaagcagaaaacaaagaaaagagtgctttaatgcagcagccaaaacagggagaggaagaagtattagagcaggatttccatgtggaagaagaactggactggcctggagtgtacttgttaccaggccaggtttctggggtggccctggattctaagaataacctrgtgattttccacagaggtgaccatgtttgggatggaaactcttttgacagcaagtttgtttaccagcaaagaggtcttgggccaattgaagaagacaccatcctggtcattgacccaaataatgctgaaatcctccagtccagtggcaagaacctgttttatttaccacacggcttgagcatagatacagatggaaattattgggtcacagatgtggctctccaccaggtgttcaaattggacccgcatagcaaagaaggccctctcttaattctgggaaggagcatgcaacctgggagtgaccaaaatcatttctgccagcccaccgatgtggctgtggagcccagtactggagctgtcttcgtgtcagacggttactgtaacagtcggattgtgcagttttcaccaagcggaaagttcgtcacccagtggggagaagagtcctctggaagcagtcctaggccaggccagttcagtgttcctcacagtttggcccttgtgcctcatttggaccagttgtgtgtggcagacagggaaaatggccgaatccaatgcttcaaaactgacaccaaagaatttgtgagagagattaagcacgcatcatttggaaggaatgtctttgccatttcatatataccaggtttcctctttgccgtaaacgggaagccttactttggagaccaagagcccgtgcaaggatttgtgatgaacttttccagtggggaaattatagacgtcttcaagccagtacgcaagcacttcgacatgcctcatgatattgtggcttctgaagatgggactgtgtacattggagacgcacacacaaacaccgtgtggaagttcaccctgactgaaaaaatggagcatcggtcagttaaaaaggctggcattgaagtccaggaaatcaaagaagccgaggcagttgttgaacccaaagtggagaacaaacccacctcctcagaattgcagaagatgcaagagaaacagaaactgagcacagagcccggctcgggagtgtccgtggttctcattacaacccttctggttattcctgtgctggtcctgctggccattgtcatgtttattcggtggaaaaaatcaagggcctttggaggaaagggaagcggcggcttaaatctgggaaatttctttgcaagtcgaaaaggctacagcagaaaagggtttgaccgagtgagcacagaggggagtgaccaagagaaagatgaggacgacggaagtgagtctgaagaggagtactcggccccgctgcccaagcctgcaccttcctcctgagctccagccttcgcccgggtagctggactgaggtttaccaggatgcccagactccttcccctttagcgcgtgtaaagttctgtgcatttgattgtaaactgtactcgtcagtgtgggactgtacacaccttatttacttcatttggctccgttggcttctgttttctaggtgaggagttccccaccagttcactccagtgccattgtctttatatgaacttagcgtagagaagccgccctcctcttccaaggtagcgctccaacccccgagggaagtttagctcattcacatttggagacgttttagttggtggatgtaaatagccctattctctgcttgaacacagtattctcccagtccacacccatcgccagtgtctttctttggtgcctttcctgttcagcattctcagcctgtggcagtgaagagaaccaacctgccacacgacgaaaagctgctaaatctccttctatttttttaaaatcactaacattatattgcaatgagagaaattttaaaaagtctctatttaaattctttttttaaatttctcctcagttggtgtgtttccgggatgtcttatttttagatggttacactgttagaacactatttttcagaatctgaatgtaatttgtgtaataaagtgttttcagagcatt

SEQ ID NO: 2885 - DNA, 913 bp, Rattus norvegicus
  Genbank Accession No. E03859
atgggcacccgcgacgacgagtacgactacctctttaaagttgtccttattggagattctggtgttgggaagagtaacctcctgtctcgatttactcggaatgagtttaatctggaaagcaagagtaccattggagtagaatttgcaacaagaagcatccaggttgatgggaaaacaataaaggcacagatatgggacacagcagggcaggagcggtacagggctataacgtctgcatacattcgtggagcagtaggtgccttattggtttatgacattgctaagcatctcacatatgaaaatgtagaacgatggctgaaagaactgagagatcatgctgatagtaacattgttatcatgcttgtgggcaataagagtgatttacgtcatctcagggcagttcctacagatgaagcaagagcatttgcagagaagaatggtttgtcgttcattgagacatctgctctagattctacaaatgttgaagctgcttttcagacaattctaacagagatataccgcattgtttctcagaagcaaatgtcagacagacgtgaaaatgacatgtctccaagcaacaatgtggttcctattcatgtcccacccaccactgagaacaagccaaaggtgcagtgctgtcagaacatctaaggcgcctctctcccctagacggctgtgtatagtccatttcccaggtctgagatttaaatatatttgtaattcttgtggtcactttctgtgttttattacttccttacacttaagaatcttcccatgtcttaagtctttgatttggctttataaaatcctcaactttgtcctgaatgactcgagttctttttcatgctatggcttctctagccttagtttaataaactgaatgtttgaagtcctcaaaaaaaaaaaaaaaaaa

SEQ ID NO: 2886 - DNA, 1218 bp, Rattus norvegicus
  Genbank Accession No. E06822
gactcttctagggaagagcagcatctgagaatgaattccaaaattcagaagatggagttaaacgatggtcactccatccctgtactgggctttggcacctatgcaaccgaagagaatctcagaaaaaagtctatggagtccacgaaaatagctatagatgttgggttccgccatattgattgttctcacttgtaccagaatgaagaagagataggtcaggccattgtaagcaagattgaagatggcactgtgaaaagggaagatatattctatacttcaaagctttggtcaacttcccatcgtccagagttggtcagacccagcttggaaaattcactgaggaaacttaatttggactatgtagacctctatctcattcatttcccggtatctctgaagccaggggatgagcttttacctcaagatgagcatggaaacttaatacttgacacagtggatctctgcgacacctgggaggccatggagaagtgtaaggatgcaggattggccaagtccatcggggtgtccaactttaaccgcaggcagctggagaagatcctgaataagccggggctcaagcacaggcctgtgtgcaaccaggtagaatgccatctttatctcaaccagagcaagctgctcgcttactgcaagatgaatgacatcgttctggttgcctatggtgccctgggaactcagagatacaaatactgtattaatgaagataccccagttctcttggatgatcccattctttgtaccatggcaaagaagtacaagcggactccagccctgattgcccttcgctaccagctggagcgtgggattgtgaccctagtcaagagtttcaatgaggagagaatcagagagaacctgcaggtctttgatttccagttggcttcagatgacatggaaattttagataacctggacagaaatcttcggtactttcctgctaatatgtttaaggctcaccctaactttccattctctgatgaatactaagatggcagccctagccatgagttctgctcgaagctcctttgtgtgatgctggactctcagaggccaataatacaacacactgactccaatccatactgcttagcaactcaccccccagtttgagctgtgtctgtacatcggggagcaaattcactaaattttcctgcttttctgtaaataaataaaaatattttgcttcagcctcaaaaaaaaaaa

SEQ ID NO: 2887 - DNA, 5233 bp, Rattus norvegicus
  Genbank Accession No. E12159
aggcagccgccgccgcacttcctgaggccgccgctccgcgtcggcgggcaggtggctggtggccggtccgcagtcgccgctcgggccgcgcgcgtccaggcttcggagggttcggaggctccgggctccggcgcccgctgtcttttgtctgcgcagagccggcgctcgcctcccctcgccggtacctcccgctgcttttcgcctgcttctccctcccgctcacatcttctccccgcccccgccgccggtccgcgccggccgctgacctcctggaccacagcccgaggacgcctctgcccgagtgatgtctcctctctacaaagttgcggccgccgctgcagccgccgtcgcgcgctgaaacaaagtctagcggcgtttccttctggtgcctgagcgcacccttactcagggctggacgccgctggcggtcgtgctgtctcgccgggagcctagaacgtgcttggccatggctgagggcgcggctagcagggaggctccggcgcctctcgacgttgcggggggcgaagacgaccctcgagccggcgccgatgctgcctccggggacgctgcacccgaggcctcggggggccggatgagggaccgtcgcagcggggttgcgctgccgggcaatgcgggggtccccgcggatagcgaggctggcctcctggaggcggcacgagcgaccccccggcgcacgagcatcatcaaggatccttcaaaccaaaaatgtggtggcagaaagaaaacagtgtctttcagcagcatgccatcggagaagaagattagcagtgcccatgactgcattagcttcatgcaggctggctgcgagctgaagaaagtgcgaccgaactctcgcatctacaaccgatttttcaccctagacactgacctccaggctctacgctgggaaccttccaagaaagacctcgaaaaagccaagctggacatttctgccatcaaagagatcaggctggggaagaacacggagacattcagaaacaatggccttgctgaccagatctgtgaagactgtgccttctccatactccatggggaaaattacgagtctctggacctagttgccaattcagcagatgtagcaaacatctgggtgtcggggttacggtacctggtctctcgcagtaagcaaccacttgactttatggagggcaaccagaacacaccacggttcatgtggctgaaaacggtgtttgaagcagcagatgttgatgggaatgggattatgttagaagatacctcggtggagttaataaaacaactcaaccctactctgaaggaatctaagatcaggttaaagtttaaagaaatccagaagagcaaagaaaaactaactacccgggtaacagaagaggaattctgtgaagcgttctgtgaactttgcactagaccagaagtgtatttcttacttgttcagatatctaagaacaaagagtatctggatgctaatgacctcatgctctttttagaagttgagcaaggggtcacccatgtcactgaggatatgtgcttagacatcattaggagatacgaactttctgaagatggccgccagaaaggcttccttgcaattgatggctttacccagtatttattatctccagaatgcgacatttttgatccagagcaaaagaaggttgcccaagacatgacccaacccttatctcactactatatcaatgcgtcccataatacctacctgatagaagatcagttcagggggccagctgatatcaatgggtatgtgagggctttgaagatgggctgtcgaagcattgagcttgatgtaagtgacggtccagataatgaacccatcctgtgcaataggaacaacatggccatgctcctttcctttcgaagtgttctggaggtgataaataagttcgccttcgtcgcttcagagtacccactcattctctgcttggggaatcactgttccctgccacagcagagggtcatggttcagcagatgaaaaaggtgtttggcaataaactttatacagaagcacctctgtcttcagaatcctacctcccgtcgcctgaaaaactaaaacatatgatcattgtgaaaggaaagaaattgccttcggagtcagatctgttagagggagaagtgaccgacgaggatgaagaagctgagatgtcccggagggtgtcgggagattacaacggtgagcagaaacatatctggctctgccgagagctctctgacttggtatccatctgtaaatccgttcagtacagggattttgaactgtctatgaaaacccagaactactgggaaatttgttcatttagtgaaacattggccagccggatcgcaaatgagtatccagaggatttcgtgaattataacaagaagttcttatcaagggtctaccctagtgccatgaggatagattccagtaatttgaacccacaggacttctggaattgtggctgtcagattgtggcaatgaattttcaaactcctggtccaatgatggacctccacaccggctggtttcttcaaaatgggggctgtggctacgtcctcaggccatctatcatgcgagatgaagtttcgtactttagtgcaaacacaaagggcattgtccctggagtgtctcccctgcttcttcacatcaagatcatcagtggtcagaacttcccaaagcccaaaggagcttgtgccaaaggggatgtcatagacccctacgtttgtgtagagattcatggaattccagctgattgctccgagcaaagaactaaaactgtacaacagaacagcgataatcccattttcgatgaaactttcgagtttcaagtcaaccttcccgagctgaccatggtccgttttgtcattttggatgatgattacattggagatgagttcattgggcaatacacgataccgtttgaatgtctgcaacctgggtaccggcatgtccccttgcgctcctttgtgggggatatcatggaacatgtgaccctttttgtccacatagcaataaccaatcggagtggcggaggaaaagcgcagaagcgaagtctttccgtgagaatggggaagaaagttcgagaatacaccatgctcagaaatatcggtcttaaaaccatagatgatatcttcaaaatagcagttcatcctttgcgagaagccatagatatgagagaaaacatgcagaacgccatagtgtctgttaaggagctgtgtggactcccaccgattgccagtctgaaacagtgcctgttaaccctgtcctctcgtctcatcaccagtgatagtactccctccgtgtctctggtgatgaaggactgctttccttacctggagcctctgggcacaattccagatgtgcagaagaggatgctggctgcatatgatctgatgattcaagagagtcgggtcctcatagaaatggctgacacagtccaggaaaaaattgtacagtgtcagaaagcagggatggaattccatgaagaacttcataatctaggggcaaaggaaggcttgaagggaagaaaactcaacaaggccatcgagagcttcgcttggaatattactgtattgaagggacaaggagacctgctgaagaatgccaagaatgaagccgtagagaacataaagcagatccagctggcctgtttgtcttgtggactgagtaaaggccctggcagcgctgcagaggccaagggcaagcgcagcttggaagccatagaggagaaggaaagcagtgaagagaacgggaagttgtgagctgggcagtgcgcaggcccttgtccaacactctggtttctcattcttctcgttttgttttgtttttacattcttcagatgttcacagaaatgatgccctttgcggggtgttgtacataaacatatattttcacagtgtcagtattttactgtagttaatttatctaagttaaaacttttagtagcagtgttttaaactttgagctgtgagtatatacttacatgtggctgcctgtgtgtgtgtgtgtgtgtgtgtttgtgtgtgtgtgtgtgtgtgtgtgtgtgtgtgtgagagagagagagagagagagagagagagagagagagagagagagtaagagttcctgttaaaatattctctgtcgcattgttggttttaataagttattcttttatctttaagatcatttggggatagttgataatctgaattctaatgagcatttattataaccccttgctgtcgttagttttacctctctgcctttgtcatataatttggagatctcagcacagcttatgattgaagaaaaccaaatttataagagcaaaggcgttttatagattacatagagatttaaaagttcctaaacattacattagaaatgaaagtgaatagaaaaatcttttaaaatcataattctggaaagataaacaaattcatttcttcattagcaaaatctttgagatatttattaactaaaatcacatttaggaagtttctgtagctgtttactgagcatgtggtttcggtagaagagctgagtgcagagaacctgtagccactgggcagtactttgaagcccactaaatgctctactgaactagcactgttgatgtgaccataacactcagttgtgcaatttcaaggtttgcagaaagacctcattctcctgggccgggagtatggaattcattttctattaccagtggtgggcagatccaagtgcttggccaggactagatctagtatagattactaaatttaagtgtcaacaccttgttaaaataatatattatcatgttgagctggcataaattctgtaagtccgataacatctttctgatgatttgagaactaactaattagacaacatgtatggtataattttaaaacatacagtaaaaaccaagagcaagtggctaattagggtacatttataattatatctagataatcttaccctaatgtcttcataaacttcttaaatgtcatgttcattcattaccaccaacagaactaaatgttctatgattatgaaagaatatatttgtttaaaacattgcttttattttgaaaagcttcttaattaatttgattaacaaatatattaatttgggggagcctagagaagataatcattgaaattttgcaaatataaacatcctctacagctactatgttatttctgactgttcttaatactactctgttcttgtcgcacattaccaaaagagtaaagatactgaaaacag

SEQ ID NO: 2888 - DNA, 279 bp, Rattus norvegicus
  Genbank Accession No. E13573
atgtgcccgtgtccccggcatcgcggccgcgggcccccggccgtgtgcggttgcggcgacgctcgccccgggctgcgctgggcggcggcgcaggtgaccgcgctgcggctgcaggcgctgggcgacgagctgcaccgacgcgccatgaggcgtcgcgcgcggccccgggacccgctgcccgcgctgctgcccgcgctccgcgcccgctggccctggctgtgcgcggccgcgcaggtggcggcgctggcggcctggctgctcggcaggcggagcgcgtag

SEQ ID NO: 2889 - DNA, 405 bp, Rattus norvegicus
  Genbank Accession No. H31117
  misc_feature (1)..(405): n = a or c or g or t
ttgaccacttggctttagatgagatcaagaaacgcgggatccgggtgggctacacgccaggtgtcctgacagacgccacggcagaacttgctgtctccctcctgctcaccacctgccgccggttgccggaagccatagaggaagtaaagaacggtggctggagctcctggagccccttgtggatgtncggttatggactctccgagagcactgttggcattgtggggctggggcgcataggtcaggccattgctcgacggactgaaaccatttggtgtccagagatttctctacacggggcgccagccagggccttcaggaagcagcagagttttcaggcagagtttgtgcctattgcttcagctggctgccgagttcagacttcattgtagtgttcctgcttcc

SEQ ID NO: 2890 - DNA, 307 bp, Rattus norvegicus
  Genbank Accession No. H31128
  misc_feature (1)..(307): n = a or c or g or t
agttctctaagtctctttaataaaaagggctttaggagctagagaaatggctcacctgatataaaggtgcctgccaccaagcccagtgaccaagcccagaaccacaccatggaaggagagacccatttctgtaaattgtcctctgatactaacaaaancaaatgaataaagtattttaattaaaattaatanaangggtttnaaanctgaaactcagntatctgccagcctgaattagtttcatatgtaaaaaccaggngtggctttncctagagtgtcaagcctcttttctggaaaagggggaact

SEQ ID NO: 2891 - DNA, 355 bp, Rattus norvegicus
  Genbank Accession No. H31144
  misc_feature (1)..(355): n = a or c or g or t
gacgtaaaatagaaacagactttatttctctggaagaagcagatatccatggctgggacanagctttggcaacanaggcgatgggaacacatcaaatggacacaggggaggaacaggcatcaaacaggacaagtactggtgccgctggggtctccctccacacccggggcctggggccctggtccctgccagagaagatcctggcgcctcttctgtttctnagccacttcaggctgtttacanttacaagatctaagaccagccaagcccgagttcacagtgaagccacaggtcacattctgtccaacactccacattcctacaggggttccctgggaaaagggggcctggtcct

SEQ ID NO: 2892 - DNA, 352 bp, Rattus norvegicus
  Genbank Accession No. H31351
  misc_feature (1)..(352): n = a or c or g or t
acctcaggatgtgactttatttggaaatggccactccagatgaaggtggggctctgctacagtagacagggtgagccccaacccaaagactgggatccttgtacagaaggtaagtttggagaccgacgcagtggagatgaaggcaaagatggagagatgtttgtacaagccctggggtacacacaagtntcagtgaccatcagacccaagaggattcactcttctagcttcggagagaaccagcccactgacaccagaccttggccttgcaaattccataactgtaacaatgccacgtgctgttagaagagcctacgtttagtactagttacttatgtcagtgctaggacta

SEQ ID NO: 2893 - DNA, 357 bp, Rattus norvegicus
  Genbank Accession No. H31489
  misc_feature (1)..(357): n = a or c or g or t
ctgagacagggttctctgtgtagcgcaggctgccctgcaacttgttctgtagaccaggctgcccttgaactcacagagatccacctgcctctgtcttccgagtgctgggattaaaggtgtgcgccacctctgccaggctccccaggagtcattcatgccatcaggttagttgaggcttatgggcctccccttgtgtctcttcgtactcctcccacggtttcagctgaggaccaggaatcatcaaggtcttgagaattggttgcttagggggtgcccacgggggcacaatcttggcatgcattctccagctnccatacgggttcatcaagtgcctttcaaacaccacatattccaggg

SEQ ID NO: 2894 - DNA, 343 bp, Rattus norvegicus
  Genbank Accession No. H31588
  misc_feature (1)..(343): n = a or c or g or t
gtattattagttttgggtaattatccctaagatgtctgagtncctccttccagctccttcagtaggctgttggagaatgaagagagtcagcagtcaaggtacagaaacactagagacttccgtgtcccattatctccctttgtcacacctgttaagttagtacttcttggaatcctattttgagtagttctttcaagtgacatcttcagggacctgacattttttacttggcatgaacatttgaaatattctgctaatatttggtgttttctgtcttcctatccccaagctctccatggactcccttaactctattttgcagaccaactggctgtcagacttt

SEQ ID NO: 2895 - DNA, 283 bp, Rattus norvegicus
  Genbank Accession No. H31620
gagagcatggctcagcgaatggtctgggtggacctggagatgacaggattggacattgagaaggatcagattattgagatggcttgtctgataactgactctgaccttaacattttggctgaaggtcccaacctgattatcaaacagccggatgagttgctggacagcatgtcagattggtgcaaggagcatcacgggaagtctggtcttaccaaggccgtgaaggagagtacagttacactgcagcaggcagagtatgaatttctgtcctttgtacgacagc

SEQ ID NO: 2896 - DNA, 298 bp, Rattus norvegicus
  Genbank Accession No. H31648
  misc_feature (1)..(298): n = a or c or g or t
actattcacgaagcatttattacataaagtatgacgtttattagctaattgantccttagcagtcaggtaggtaatgatgtccactcacagaggaataaactgactcactagcatttaaggaatttaaggtttgtcagctatgaagtggcagaggcaggattcagatccaggcagagcctgtaaccacaccacctcttagatcataagancagcaaagttcccaggggaaaacacagcaccgattacaaatgccagccgatggaatacaagacgggaagcagacaagtctgacttagg

SEQ ID NO: 2897 - DNA, 440 bp, Rattus norvegicus
  Genbank Accession No. H31707
acagtcatgacattatttatttacaagcacagatgaatccctgacctctcccaagacagtgaccctacctcagcccagttcaatacttcaactggaagtaaagccggaaggaggaattcagggatgcacagggttaggggaacatatcccatattaaatagttatatatatacacaacagttcctgtagttctgtacagagcagtggctgaccccaccccacgggacccgaaatgtggggagaagagactgagggtgttgaggccggagccagcccctggtgaagtgcaatagcagcagcaaggtcctaacggtacacaagagggaggggaacaccccctcccactttccacccccaccctgccctgggaatgtactgagggacaggaatggttctcaaagagcacatacaggaaggacatggctagaaccatctttagg

SEQ ID NO: 2898 - DNA, 469 bp, Rattus norvegicus
  Genbank Accession No. H31711
cccgtcacctgataaacacctgtttaattgtagggcacagtgagagcaatgagacattgctcccgtattctgagctgttcgcctccggcactgtctctctgctgtgctcagtggtgatgacgtcacacacacccttgctgcctagctggcaatgctggttttctctgctcttgagctctctttgggcttggagtagtcccagggccgcctgttctccgtgaatccataaagcttcctgagcgccactcgtgccgcttcttcctctgcaacaagtacagtttccccaggtccctctgcgatcagccttttgtcacagtataagccaacaaaatataaaggcaaagcagttgtgcttccagactgcctgggtgagtctggactcaggagctgagatgtttctcttcttcagctcctctacggagcagtcccatggggatttacgatggtccacatctcaaacaacttcttt

SEQ ID NO: 2899 - DNA, 438 bp, Rattus norvegicus
  Genbank Accession No. H31813
  misc_feature (1)..(438): n = a or c or g or t
ggcttcaatggattttattagccttctttcatgtactgactgggtataggaggccttccagaggaagaggcctgcaagtnagaggctcaggagaagccaaatcactgacacccagagctggttagggtgggatggacaagatctgagcgattcctcttctggaggagggaacgaacagtgctgctgaggcatgtnacccacccagccagacactcttcacagaacagttctggagggtgtggtgaaggatgtcctgctccatgcagggatgggtgtcannngaggaagggaggagtttatcagaaggcaagaggaagtaacaaactgagaggagcggaggaggaggaaagcagttaagctgccttcgtctgcaagcctccaggatggcacggaagatggctgcagccgcgacttctccaggatctggctgatctagtt

SEQ ID NO: 2900 - DNA, 421 bp, Rattus norvegicus
  Genbank Accession No. H31847
  misc_feature (1)..(421): n = a or c or g or t
gcagagantaaatactttattaactgattacagttgaaagtcatgancaaaaaggagtatattaaggcagagccatatatatacatacatatatatagatatatatatgtgtataaccaactgcaaagccggttctctctccacgttcacaacctctgcatcggtcgccctcaggcggtgtgctttctttctcttgattaaaggngcctcttggccactggttctggtccatttgatggtggctcatgggtcacggagtgcgcgactgtgagtttctcagnacatcgcaggcgtcaccacacagctgttggttggtgtgcgaaatctgacaactgaccagtcttcttcagaaaaacatggtatctttaaaagtgattggaatagtcttacctgaaaaaagtgtagacttctgagtcaatca

SEQ ID NO: 2901 - DNA, 445 bp, Rattus norvegicus
  Genbank Accession No. H31887
  misc_feature (1)..(445): n = a or c or g or t
ctactagagtttttatttattgaggtctctatcccaaccagtcatttaaaaaccaagtaccacagacctgaggggtaggagctaggaactgtacctcctcaccacacgaacagcagtggggaagaagatgagggcagcagaggtggagaagggagacgacaatagcagcagcaatggggcatcaatgtcacagagacagccactcggtcctcccccaatccctagctagagcccctatggcttggggtggaagaggtaagtcccaccccaggtccctcctctcagacagcctcctcagggctcaacccatttnttctgtcaggagactcaggcacatgggagaggaggaagtggggggaggagactttgggagaggcagggtntggtaggatnaaggcagaagtgggggggcattagcaaggttttaaccctgccattcccacca

SEQ ID NO: 2902 - DNA, 373 bp, Rattus norvegicus
  Genbank Accession No. H31897
  misc_feature (1)..(373): n = a or c or g or t
aattggaattcactttaataatttttaagtgacatatggcactgtaaggncaggaaggaaaaagtcacaaagtccacaaactcgtgaaggtgtcagctcaaaaggctagaagtcactgcactgttggntcgacgctcacagtaaacgttttgtaacgaaggcatgttgaatttagtgtcattcattacagagcagagggtgtttctcttatttggtcacgtgtttttcacttaagaaatattttaaaaatggtattcactttttatttcaacacgttcactgggcatctccaaaaccagcagcttctcaaangaaatcaaccagggttgtaaacataagatacaaggttctgactcccgacactcaggtttcg

SEQ ID NO: 2903 - DNA, 336 bp, Rattus norvegicus
  Genbank Accession No. H31907
  misc_feature (1)..(336): n = a or c or g or t
gcggctctgaaatggtttattgttgagttctgaaaacacatgtgggaacagggcaagtccaaccaagactacccttggtgtaacattnccggtccccaccagcagacatcaacatgttcttctgtgtcaaagaggagattccctgagtaaaggcatttccttaaagaatgtccaggcttcagtggctgtcctgggtggagatggctcttgctggctttcaggctagggcactacccatgacttcagagaaaccacttggtgttacaggcctcacctgctgagcttcctgcagtccaggctggatccctttccaggccagagacttctctaatttgg

SEQ ID NO: 2904 - DNA, 219 bp, Rattus norvegicus
  Genbank Accession No. H31964
  misc_feature (1)..(219): n = a or c or g or t
agttttaggacatttaattaacacttgatgtgcatatgantgggaaaactggagcnagggtggagggtggttccctgagctggggacccagagagtgatgctgacagatgggacccttggtagaaagacccattcctgagataagctgtgattcccatgctgactgggtgggtggagacttctccaagaacccagatgtgagcacagtcagttgggatt

SEQ ID NO: 2905 - DNA, 341 bp, Rattus norvegicus
  Genbank Accession No. H32189
  misc_feature (1)..(341): n = a or c or g or t
cagaaccatgcctatnatactgggatactggaacgtccgcgggctgacacacccgatccgcctgctcctggaatacacagactcaagctatgaggagaagagatacgccatggggacgctcccgactatgacagaagccagtggctgantgagaagttcaaactgggcctggacttccccaatgtggagagacagaggaggagcggattcgtgcagacattgtggagaaccaggtcatggacaaccgcatgcagctcatcatgctttgttacaaccccgactttgagaagcagaagccagagttcttgaagaccatccctgagaagatgaagctctactct

SEQ ID NO: 2906 - DNA, 396 bp, Rattus norvegicus
  Genbank Accession No. H32977
  misc_feature (1)..(396): n = a or c or g or t
aaaggtttggcactttattaaataagcnccaaaattacatacaaatcaaaagagtaagaaaaataaacactcagcaaaatgtctctnggtagcatccagcaccactgcagttaaagtatggcatagctgtggtatcaccatgctcgctctccccgtccccaaggatggcaggacagggacatcagctttccaaaccaaactgtcatcattcattgctatccctttctttaccatttaacatacagngaacacacttcaatggaatagactaataagccaagagctttattgatgcagcaggcactttacaatggancccaagagagcctgccttctctgagaagacaggatgtctgtacaaactctcatcaggttttttccacttcagaacccaag

SEQ ID NO: 2907 - DNA, 345 bp, Rattus norvegicus
  Genbank Accession No. H33149
  misc_feature (1)..(345): n = a or c or g or t
aatttaaaattatgcttttattaacattggaacagctcttttatatttatagtcttgacaccaaggtaatttaaagagcatttggtcgttgaggaaggcataagtngtagtatgcatccttgttccaaaagtctggacccttccatccacaccagcccttttccaatataacttgcaggncttcagcacctgtatagtgtgggtctagaattaggaatttgatctgccctgtagtttcattccatgcgactcctagtattgtgtgagccaatactcctcccccaatcattactgggagtgnccacatttctgggaaatgggttggctagttcccggtccttgagg

SEQ ID NO: 2908 - DNA, 381 bp, Rattus norvegicus
  Genbank Accession No. H33219
  misc_feature (1)..(381): n = a or c or g or t
cttttaaattattttattattgtataagctaaanggaaatttacacactgaaatctcaaaacccttgggcatgcatattaacccgttagaggttcttctacatgtctctcctgcttccataggaattgccccaaacgtttaaaacccacagcttgtttttttgtttttttactgtatatacagcctaaaccatagcaatctaggattatgtcattttacactgtgcaaaatcctcaaaaaatagtggtatgacagagcagaaagatctctacaaatttcattttaagacattcatataattnggtccttctccaaatcacaccaattaaaacaggcacattctctgtcaagcctccagtcacgncctgacagtgatcccgg

SEQ ID NO: 2909 - DNA, 329 bp, Rattus norvegicus
  Genbank Accession No. H33255
  misc_feature (1)..(329): n = a or c or g or t
aaccgtggaaaaacttctnagctttattacatgctctgcaaacaacccccaaaccttacgacccctccccacagaggcactttggagacactagccagaggaagcccaaaaccctcagagaccctgggcagcaggacacagggccttnttgaggcaggcctggcatcgtggatggacaggaaggcaaatntnttggccgaagcccaccagtagtccattgatctcactccatagcaccctgggtagccactnttccaggttcctacgtgtctcctctggggacttggtcatcttcttggtccacttcagtctgttggctattctgtgca

SEQ ID NO: 2910 - DNA, 422 bp, Rattus norvegicus
  Genbank Accession No. H33426
  misc_feature (1)..(422): n = a or c or g or t
aaagatttattcatgcagtttatgtatatgagtnctgtcttcatacacatcagaaggaatcagacctcatagatggttgtnagccactatggggttgttgggaattgaacttaggacctctggaagaactactgggtgctatcactcagacccaggtttttgggagagacagtgtcctgtgtagcctataactgattaggaatttgaatctcttctgcctccacctaccacatgctgggatgactgctaagagttgtagcttccagaaaggatgaacattaagacctttgtgcttctgtaacagaagttaaagaaccatgggaacattactttggtttcaacaggatggtgtttgttcaaggctgagagcctcaagtgagcaatttagcagagtctgtatacaaacagatttaccactgggg

SEQ ID NO: 2911 - DNA, 283 bp, Rattus norvegicus
  Genbank Accession No. H33528
  misc_feature (1)..(283): n = a or c or g or t
cccaaatctaaaactacctttatttgtggctggctcagcataagtngccttcatcagtgagcagaattataaaactgtacaagaggtaaaaaaataggccgtttaacttagtgaccctcatatcatgagctttgaaaatacacataaaattgtacaatctggcagtttataaaatataaagctaaaaagaatattttagttcccacaaagaggagtgaatcacacaatcagcacatatccattaaacanttaactgtccacagagaagacacatggcacaaga

SEQ ID NO: 2912 - DNA, 378 bp, Rattus norvegicus
  Genbank Accession No. H33629
  misc_feature (1)..(378): n = a or c or g or t
gagcaaacttgtatcagtttatttacaattgtaatttataaacagtaacacaaacatctttacattaatattatgaaaaaagtcccatagctgagatggttgaaaaatgagacttcaggacatttcaaagagggtgtcaagaaaatggaagaaatgaaatacaacagtttgggagaagagttataaatatcangtacctcacagggtgcaatctcatgcaaatgtcttcaaccactcaaatacactgtttttatttagatatcagantagagtncttttaattatgttatcttttatncacttgatttccattatgcaaattaaaacactggctactagtggggtacacctagatacttctatcaaccaaccccttgg

SEQ ID NO: 2913 - DNA, 455 bp, Rattus norvegicus
  Genbank Accession No. H33723
  misc_feature (1)..(455): n = a or c or g or t
aagggaagaagagtttattttgaaggntcacggtttgaagacacaatcattgtaggaaggtatggcaatagggacctgtagttgtgggagtatgtgactgatgcncttatcaggataaactatgaagaaaaggaaaganttctaggattcaactagctttcttccttctttttatattcagagtgcaatcaaatcctatgggaagtgtcacccacattcaaggcgagctttccctcctcagttaaacctctttggaaatatcctatcctggctggggtttttttgtcaacttgacactagctaaaggcaagtgggaaagggtaccctcagttgagaaaatgactctaccagagtgngcctgtgagcaaagcctaagggactttgttttaatgattgattgtgggagggcagcctattgggacgatgccccagacaggtaatcttgtatgggtgtt

SEQ ID NO: 2914 - DNA, 299 bp, Rattus norvegicus
  Genbank Accession No. H33832
  misc_feature (1)..(299): n = a or c or g or t
ctggcctctgtccctgagccccagccttgacctgccctctgtccttgtgccccatccctgtcccttttccccctgccaaccccatgcccccaggtcatctgctatatctactttacgcgcatnatcgccattctgcttcgagtggcggtgcccttccagtggcagtggctgtaccagctcttggtggagagttccaccctgggcttcttcgtgctcaacggctacaagttccagcnggcnggggggacaancccataanctggcaagttgccacaacaaggagggatgaaggagggacg

SEQ ID NO: 2915 - DNA, 335 bp, Rattus norvegicus
  Genbank Accession No. H33842
  misc_feature (1)..(335): n = a or c or g or t
cgatgacactgatgacgacctccctatatccaagaagaagaagaaaaggaagggcagtggcagtgaacaggaaggcgaagaggaggaaggtggagagaggaagaagaagaggaggagaagacctccaaagggagaagaaggttctgatgatgatgaaacagaaaatggccccaaaccaaagaagcgccgtccaccgagagcagagaaaaagaaggctcccaagccagaacgcctgcntccttcantgaaaggaaaaataaaatccaaagccattatatcatcaagcgatgattcttcagatgaggataaactgaaaattgcttgatgaaggacat

SEQ ID NO: 2916 - DNA, 373 bp, Rattus norvegicus
  Genbank Accession No. H33922
  misc_feature (1)..(373): n = a or c or g or t
caacatggaaaccaatgtcatttatgttgtccttggagctgtggctgtcattgcagctgtgatcattgcagctgtggtgactgttgtaaggaggaggaagagaaacacaggtggggaaggaggagactacgcccctgctccagcatgaagacagctgcctggagtggactgagtgacagacgatgtgttcaggtctctcctgtgacanccagagtcctcagttctctttagacaccagtgtctgatgttccctgtgattctatggcttcagtgtgaagaactgtggagcccagcctgccctgcacaactggaccctgtccctgcactgcctgtgttcctttcccagccaaccttncaggtccagcctggggca

SEQ ID NO: 2917 - DNA, 294 bp, Rattus norvegicus
  Genbank Accession No. H34047
  misc_feature (1)..(294): n = a or c or g or t
ctttagcacaagtggtctcctggtcacaagccggtgtggagccttctgtcatgggagtaggaccgattccagccataaagcaagctgttgcaaaggcaggctggtccctggaggatgttgacgtgtttgaaatcaatgaagcctttgcagcagtgtctgcagcaatagctaaagaacttggattaagccccgagaaggtgaacatcgatggaggagccattgccttgggacatcctctgggagcatctggctgtaggattctagtgaccttnttacacaacctgggagagagtt

SEQ ID NO: 2918 - DNA, 328 bp, Rattus norvegicus
  Genbank Accession No. H34243
  misc_feature (1)..(328): n = a or c or g or t
gtaattttctttgctggataatgctggccacattctgatctgtgtcactaaatttntnacggtgttactcgaaacattttgactatttgantgtactgagatgtcagaaaacaaaacaaggaagagaaatattgttaattaaaatatgctgctgccaaggaagctgcaagtcgaagcaaggactctgtaacccacgagatccaaatgctgcttgcatttcacagtagttaaccatgttaaagagagaatgctttaaaaatagactgttttaaagcccgccgtgcgcagtccatcttgatgttactaaagactgtgttccaaacgtctg

SEQ ID NO: 2919 - DNA, 684 bp, Rattus norvegicus
  Genbank Accession No. J00728
acgagtgctgacatgatcactctctgtgttcacaggaaagcgcatttgtcttggcgaaggcattgcccgaaatgaattgttcctcttcttcaccaccatcctccagaacttctctgtgtcaagccatttggctcccaaggacattgacctcacgcccatggagagtggcattgcaaaaatacctccaacgtaccagatctgcttctcagctcggtgatcgggctgaggcagccaggtgccccagttctgttgggaatggcctcatgtttctgcctctgggggacctgctgaaaaccaggctccaaggccactgctccacatcttcctattgcagttctccaaagtcccaaggcttgttcttattcctgtgaatggcactgaagaagtcaatcgactgtcttattttgacatgtgacagagatttcatgagtacacatctcatgctgagtcacttccctcttcctcctaatagcccacgtccccacttatcagccctccatggtctgtgatctgtgctaatggactctgtatatggtctcagtgctatgtctacagacttacatagtatgtatggttcaggtaaacagaatcacagagtgtgtgagcttcggtgtgttgtgcctttacttcacataatattatctaggttcctgtgttctacaggccacagtcacacacattcat

SEQ ID NO: 2920 - DNA, 6849 bp, Rattus norvegicus
  Genbank Accession No. J01435
  misc_feature (1)..(6849): n = a or c or g or t
ccctcacagtattaagtacccttaccctaccgctttcctcccaactaatcacatagaagtttaggatatacagttcaagagccttcaaagcccttagaaaacaaacaagtttaacttctgataaggactgtaagactatatcttacatctgttaaatgcaaatcaactgctttaattaagctaaatcctcaactagattggaaggattcaaacctacgaaaatttagttaacaactaaataccctacttactggcttcaatctacttctcccgcctatcagaaaagaggcgggagaagccttagtagaggagattctctacaccttccaatttgcaattcgacatgataatcaccttaaggctttttggtaaaaagggggctcaacccctgtctttagatttacagtctaatgcttactcagccattttacctatgttcgtaaacggttgactcttttcaactaaccctaaagatatcggaaccctctacctattatttggagcctgagcaggaatagtagggacagctttaagtattctaattcgagctgaactaggacagctaggcgcactcctaggagatgaccaaatctataatgtcctcgtcacagcccatgcattcgtaataattttctttatagtaatacctataataattggaggcttcggaaactgacttgtaccactaataattggagcccctgatatagcattcccacgaataaataacataagcttttgactgcttcctccatcatttctactccttttagcatcctccatagtagaagctggagctggaacaggatgaacagtatatccccccttagccggaaacctagcccatgctggggtatccgtagatttaactattttttccctccacctagccggggtgtcttctatcttaggagctatcaactttatcaccactatcattaatataaaaccccctgctataacccaatatcagacacctctctttgtatgatccgtactaattacagccgtcctactacttctctcactgccagtattagcagcaggtatcactatactccttacagaccgaaatctaaatactactttcttcgaccccgctggaggcggaggcccaattctttatcaacacctattctgattcttcggccacccagaagtgtacatcttaattcttctagggtttgaaattatttcacatgtagttacctattactctggaaaaaaagaacccttcggatatataggtatggtatgaaccataatatctattggcttcctaggatttattgtatgagcacatcacatattcactgtaggcctggatgtagacacccgagcctactttacatctgccactataattatcgcaattcctacaggcgtaaaagtattcagctgactcgctacactacatggaggaaatatcaaatgatcccccgccatattatgagccttagggtttatcttcttattcacagtagggggcctaacagggatcgtactatctaactcatcccttgacattgtacttcatgatacatactacgtagtagctcacttccactatgtcttatctataggagcagtattcgccatcatagcttgcttcgtccactgattcccactattctcaggctataccctaaatgacacatgagcaaaagccctctttgccattatatttgtaggtgtaaacataacattttttcctcaacacttcctaggattagcagggatacctcgtcgttactctgattatccagatgcttataccacatgaaatacagtctcctctataggctcattcatctcacttacggccgtccttgtaatgatcttcatgatttgagaagccttcgcatcaaaacgagaagtgctctcaatttcctactcttcaactaacctagaatgactgcatggatgccccccaccttaccacacattcgaagaaccttcctatgtaaaagttaaataagaaaggaaggattcgaaccccctacaactggtttcaagccaatttcataaccattatgtctttctcaatgagatattagtaaaataattacataaccttgtcaaggttaagttatagacttaaatctatatatcttacatggcttacccatttcaacttggcttacaagacgccacatcaccaatcatagaagaacttacaaactttcatgaccacaccctaataattgtattcctcatcagctccctagtactttatattatttcactaatactaacaacaaaactaacacacacaagcacaatagacgcccangaagtagaaacaatttgaacaattctcccagctgtcattcttattctaatcgcccttccctccctacgaattctatacataatagacgagattaataacccagttctaacagtaaaaactataggacaccaatgatactgaagctatgaatatactgactatgaagacctatgctttgactcctacataatcccaaccaatgacctaaaactaggtgaacttcgcttattagaagttgataatcgggtagtcttaccaatagaacttccaattcgtatactaatctcatccgaagacgtcctgcactcatgacccatcccttcactagggttaaaaaccgacgcaatccccggccgcctaaaccaagctacagtcacatcaaaccgactaggtctattctatggccaatgctctgaaatttgcggctcaaatcacagcttcatactcattgtactagaaatagtgcctctaaaatatttcgaaaactgatcagcttctataatttaaactcattgcgaagcttagagcgttaaccttttaagttaaagttagagacaacaaatctccacattgacatgccacaactagacacatccacatgatttattacaatcatctcctcaatagccacactatttaatttatttcaattaaaaatttcttcccaaacctttcctgcacctccctcacccaaaactatagccacagaaaaaacgaataacccttgagaatcaaaatgaacgaaaatctatttccctctttcattacccccacaataataggtctaccaattgttgtgaccattattatgttcccatcaattctattcccatcatcagaacgcctaatcagcaaccgactacactcatttcaacactgactaatcaaacttatcatcaaacaaataatgttaattcacacaccaaaaggacgaacctgagccctaataattgtatccctaattatatttatcggctcaaccaaccttctagggcttcttccccatacatttacccctaccactcagctatctataaacctaagcatagccatccccctatgagcaggagccgtaattctaggcttccgacacaaactaaaaaattctttagcccacttcttaccgcaaggaacccccatctcactaattcccatactaatcatcatcgaaactatcagcctatttattcaaccgatagcactagcagtacgactaacagcaaacattacagcaggccatctattaatgcatctaatcggaggagctaccctagtacttatagacatcagcccaccaaccgctacaattacatttattattctacttctacttacagtacttgaatttgtcgtagccttaattcaagcctatgtattcacccttctagtaagcctgtacctacatgataacacataatgacccaccaaacccatgcataccatatagtaaacccaagcccatgaccactaacaggagccctatcagctcttctactcacatccggcttagtaatatgattccattacaactccacaattctcctatcattaggcctcctgacaaacatcctaactatatatcaatgatgacgagatatcatccgtgaaggaacataccaaggccaccacacccctattgtacaaaaaggcctccgatacggaataatcctgtttattgtctccgaagtattcttctttgccggatttttctgagcattttatcattccagcctagttcctacccacgacctaggcggttgctgacccccaacaggaatcacccctttaaatcccctagaagtaccccttctaaatacatcagtcctcttagcatcaggagtctcaattacatgagcccatcacagcctaatagaaggcaaccgaaaccatataaaccaagccctactaatcaccattctcttaggattatatttcactatcttacaagcctcagagtatttcgaaacatcattttctatctcagacggaatttacggctcaacattcttcatagcaacgggatttcatggccttcacgtaattattggctcaactttcctaattgtctgtctactacgacaactaaaattccacttcacatcaaaacatcatttcggatttgaagccgcagcatgatactgacacttcgtagatgtagtttgactattcctatacgtttctatctattgatgaggatcctactcccttagtataaacaatacaactgacttccaatcagttaattctgaaaaaactcagaagagagtaattaacctacccattatcatcacaattaacatcaccttatcttttatcctcatttcaattgcattctgattgcctcaaataaacttatactccgaaaaagcaaacccatatgaatgtggcttcgacccaacaagttctgcacgccttcctttttcaataaaatttttcttagtagccattacatttctactattcgacctagaaatcgccttactacttcccctcccatgagcgattcaaacaaccaataccgctacaataatagcaactgcctttattttagtcactattttagctcttggcctaagctacgaatgaacacaaaaaggactagaatgaacagaataattggtaattagtttaaataaaattaatgatttcgactcattagattatgataataatcataattaccaacaatgacatctgctttcctaaatttaactatagcctttacattatctctactaggtacttttatatttcgctcccacttaatatctactctcctctgcctagaaggaataatactatcactatttgtcataacttcaacatccacattaaactccaactccataatctccataaccatcccaattaccattctagtttttgcagcctgcgaagtagcagtaggtttagccttactagtaaaaatttcaaatacccacggaacagactacgtacaaaacctcaaccttctacaatgttaaaaatcattttcccatctatcatactcctcccactaacatgactctcagccaacaaaaaaatctgaaccaatgtcacctcctacagctttctagtgagcctattaagcttatcactcctatgacaaaatgacgaaaattacctaaatttctcagttatattctcctccgatccattatccaccccactaatcattctaacaacttgactcctcccactaataatgctcgctagccaaaatcacataaaaaaagaaaatataatgcatcaaaaactttacatctcaatacttattagcctccaaattttactcatcataacattctccgcaacagaactaattttattttatatcctgttcgaagccactctaatcccaacactaattatcattacacgatgaggcaaccaaacagaacgcttaaatgcaggaatttatttcctgttttatacactaattggctccatcccactcttaattgccctcatttcaatccaaaactcaataggaacactcaacttcctaatcctctccctcacaacacaccccctaccctcaacatgatccaacaccattctatgactagcatgtataatagcatttataatcaaaataccattatacggagtccatctatgattaccaaaagcccacgtagaagctccaattgcaggctctataattttagcagcaattctcctaaagctagggggttatgggataatacgagtttccatcattctagaccccctaacaaaatctttagcctacccattcatcatcctctcattatgaggcataattataactagctcggtctgcctacgccaaacagatctaaaatcattaattgcttactcatcagtaagccatatagccctagtcatcacagccattataatccagacaccatgaagcttcatgggagctacaatactaataatcgcccacggcttaacctcatcactcttattctgcctagcaaacaccaactacgaacgaattcacagccgaactataattatagctcgaggattacaaataatcttttcattgatagcaacatgatgattattagcaagcttagccaacctagcactaccacccctaattaacctcataggcgagttattcattgttatagcaacattttcctgatcgaacccctctatcatccttatagcaactaacattgtcactacaggaatatactcaatatatatgattatcacaacccaacgaggaaaactaaccagccacataaacaacctccaaccttcccacacacgagaattaacactcatagctctacacattattcccctcatactattaacaatcaaccctaaactcatcacaggcctaacaatatgtagatatagtttacaaaaaacattagactgtgaatctaacaacaggaaatcaaattccttatttaccaagaaagtatgcaagaactgctaattcatgcacccatacctaaaacatatggctttcttacttttataggatagaagtaatccattggtcttaggaaccaaaaaccttggtgcaactccaaataaaagtaata

SEQ ID NO: 2921 - DNA, 1912 bp, Rattus norvegicus
  Genbank Accession No. J01436
ccggtactcctcagtagccatagcagttgtatacccaaatacaaccaacatcccacccaaataaattaaaaatactattaaacctaaaaacgaacccccaaaccctaaaactattaagcacccaatacatccactaacaatcaatccaaacccaccataaataggtgaaggcttcaacgccaaccctagacaaccagtcaaaaacagtaaacttaaaataaacatataatttgtcattatttctacacagcatttaactgtgactaatgacatgaaaaatcatcgttgtaattcaactatagaaacacctaatgacaaatatccgaaaatctcaccccctattcaaaatcatcaaccactcctttatcgacctccccgccccatctaacatctcatcatgatgaaacttcggttctctactaggagtatgcctcatagtacaaatcctcacaggcttattcctagcaatacactacacgtctgataccataacagcattctcatcagtcacccacatctgccgagacgtaaactacggctgactaatccgatacctacacgccaacggcgcctcaatatttttcatctgcctattcctccatgtgggacgaggactatactatggatcctacactttcctagaaacctgaaacattgggatcatcctactatttgcagtcatagcaactgcattcatgggctatgtactcccatgaggacaaatatcattctgaggagctacagtaattacaaacctattatcagctaccccttacattgggactaccctagtcgaatgaatctgaggaggcttctcagtagacaaagcaaccctaacacgcttcttcgcattccacttcatcctcccattcattatcgccgcccttgcaattgtacatcttcttttcctccacgaaacaggatcaaataaccccacaggattaaactccgacgcagacaaaatcccattccatccatattatacaattaaagacctcctaggtgtatttatattactattattcctaataaccctagtactattcttcccagacctactaggagacccagacaattatacacccgctaaccccctcaacaccccaccccacatcaaaccagaatgatattttctctttgcctacgctattctacgctccattcccaacaaactaggaggggtcgtagccctaatcttatcaatcctaatcttagccttcctaccattcctgcatacctcaaaacaacgcagcttaacattccgcccaatcacccaaatcctttactgaatcctagtagccaacctcctagtcttaacatgaatcggaggccaaccagtagaacacccatttatcattattggtcaactagcctccatcagctatttttcaattatcctcattctcataccaatctctggaattgttgaagacaaaatgttaaaatgaaattaatgtcccgatagtataaaaattactctggtcttgtaaaccaaaaatgaagagtcagtcttctcaggacaatcaagaagaaggaactacctccccaccatcaacacccaaagctgatattctacttaaactacttcttgtcagtacataaaatgatatggacattaaaaaacatttatgtatatcgtacattaaattattttcccaagcatataagcatgtaatatatatctaatgatttaggacatagatttaaactcaactataaattcacaacaacatgtctattctcaaatacattagataatgtctattagacatatctgtgttattagacatgcaccattaagtcataaacctttctcttccatatgactatccctgtccccaattggtctctatttctaccatcctccgtgaaatcaacaacccgcccactcgtccccctcttctcgctccgg

SEQ ID NO: 2922 - DNA, 909 bp, Rattus norvegicus
  Genbank Accession No. J02592
tacagcatgggggatgctcccgactatgacagaagccagtggctgagtgagaagttcaaactgggcctggacttccccaatctgccctacttaattgatgggtcacacaagatcacccagagcaatgccatcctgcgctaccttggccggaagcacaacctttgtggggagacagaggaggagaggattcgtgtggacgttttggagaaccaggctatggacacccgcctacagttggccatggtctgctacagccctgactttgagagaaagaagccagagtacttagagggtctccctgagaagatgaagctttactccgaattcctgggcaagcagccatggtttgcagggaacaagattacgtatgtggattttcttgtttacgatgtccttgatcaacaccgtatatttgaacccaagtgcctggacgccttcccaaacctgaaggacttcgtggctcggtttgagggcctgaagaagatatctgactacatgaagagcggccgcttcctctccaagccaatctttgcaaagatggccttttggaacccaaagtagcaccacaaagtccagacctagggatactcatgagtgccctgctggctgtgggcctagagcatggctctggcgcccaccacatgcagctttctcctcctttccattccctgttcctccatctcctcttcccagcccttgcctcagtcaagcctcagttccctggtctctccatttcttcattagtcccctcccttgtctctgccctgcatccaacccttccctcactgattttcggaggactgtaccagacccctgaatccccagcctggcctgagagattagatctcactgtgctgccctggtccccaggaggacccattttatttgcaataaagtgtgaaccacaaa

SEQ ID NO: 2923 - DNA, 3615 bp, Rattus norvegicus
  Genbank Accession No. J02649
ctgagcaataaaggggtacatacacttgtctgctcctagaaatcgatacatgcacacgactgcttcgaagggaaggatgctcttcatgaatgtcacgatgtacatgagacgaggggtgcagatcatgggctggtcagtgaggatggccttcatggcctgcttcacacagtaatcgggcttcaaagagggcagagcacctagccaccatggggaaggagaattatgaattgtactcagtggaactggggactggccctggtggggacatggctgccaagatgagcaagaagaaggcgggaggcgggggaggcaagaagaaggagaagctagagaacatgaagaaggagatggagatgaacgaccaccagttgtcagtgtctgagctggagcagaagtaccagaccagtgccaccaagggcctgaaggcgagtctggcagctgagctgctgctgagggatgggcccaatgcactccggccacctcggggcacccccgagtacgtgaagttcgcccggcagctggcaggcggtctgcagtgcctcatgtgggtggctgcagccatctgcctcattgcctttgcgattcaggccagcgagggagacctgaccactgatgacaatttgtacctggcgttggcactcattgctgtggttgtggtcactggctgttttggctactaccaggagttcaagagcacaaatatcatcgccagcttcaagaatcttgtaccccagcaagccacagtgatccgagacggggataagttccagatcaacgcggatcagcttgtggtgggcgacctggtagagatgaaaggcggggaccgcgtcccagcagacatccgaattctgtcagcccagggctgcaaggtggacaactcctcgcttactggagagtctgaaccgcagacccgctcacctgagtgtacacacgagagtccccttgagacccgcaacatcgccttcttctccaccatgtgtctggagggcacggcgcagggcttggtggtgagcaccggtgatcgcaccatcattggacgcatcgcctctctggcttcgggtgtggaaaacgagaagactcctatcgcgatcgagatcgaacattttgtggacatcattgctggcctggccatcctcttcggtgccacattctttgtggtggccatgtgtatcggctataccttccttcgggccatggtcttcttcatggccattgtggtagcctatgtgcctgaggggctgctggctactgtcacggtctgcctgtcactgacagcaaagaggctggccagtaaaaactgtgtggtcaaaaatctggaagcagtggagaccctgggttccacgtcagtcatctgctcagacaagacaggaactcttactcagaaccgcatgacggtgtctcatctatggtttgacaaccatatccacacggcggacaccacagaagaccagtcagggcaaacgttcgaccaatcgtcggagacctggcgggcgctgtgccgcgtgctcaccctgtgcaaccgcgctgccttcaagtctggccaggacgccgtgccagtgcccaagcgcatcgtgatcggagacgcatctgagactgcgctgctcaagttctcggagttgacgttgggcaacgccatgggttatcgggaccgcttccccaaagtttgcgagatccccttcaactccaccaacaagtttcagctgtccattcacactctggaggatccgcgcgacccccggcacttgctggtgatgaagggcgccccagagcgcgtgctggagcgttgcagctccatcctcatcaagggccaggagctgcccctggacgagcaatggcgtgaggccttccagacagcctaccttagcctgggaggcctaggcgaacgcgttcttggtttctgccagctctacctgaatgagaaggactacccgcctggctacacctttgatgtggaggccatgaactttccgagtagtggcctctgctttgcgggacttgtatccatgattgaccctccccgggccaccgttccagatgctgtgctcaaatgccgtacggcaggcatccgggtgatcatggtgactggtgaccatcccatcacagccaaggccattgcagccagtgtggggatcatctcggaaggcagcgagacagtggaagacatcgccgcccgcctccgaatgcctgtagaccaggttaataagaaggatgcccgggcctgtgtgatcaatggcatgcagttgaaggacatggacccgtctgagctggtggaggcgctgcgcacccaccctgagatggtgtttgctcgaaccagtcctcagcagaagctggtgattgtggagagctgtcagcgactgggtgccattgtggctgtaacaggggatggtgtgaatgactccccagccctgaagaaggctgacattggtgtagccatgggcattgctggctccgatgctgctaaaaatgctgctgacatgatcttgctggatgacaacttcgcttccattgtgacgggcgtggagcagggccgactgatctttgacaacctgaagaaatccatcgcctatacactgaccaagaacattccagaactgacaccctaccttatctatatcactgtcagtgtgcccctaccccttgggtgtatcaccattctcttcatagaactctgcacagatatctttccatctgtgtccctggcatatgaaaaggccgagagtgacatcatgcacctgcgcccacggaaccccaggcgggaccggttggtcaatgaacccctggctgcttattcctattttcagattggtgccattcagtcatttgccggctttgctgactacttcacagccatggcccaggagggctggttccctctgctgtgtgtggggctgcgaccacaatgggaggaccaccatctacaagatcttcaagacagctacggccaggaatggacatttggtcagcgtctgtaccagcagtacacctgttacaccgtgttcttcatcagcatcgagatgtgccagattgctgatgtcctcatccgcaagacacgccgcctctccgctttccagcagggattcttcaggaacaggatcctggtgatcgccatcgtgtttcaggtctgcattggctgcttcctgtgctactgcccagggatgcccaacatcttcaacttcatgcccatccggttccagtggtggctggtccccatgccctttggccttctcatctttgtctatgatgagatccggaaacttggagttcgctgttgcccagggagctggtgggaccaggaactctactattagaggggtaatcacctctccatccactatcagctgggacaaaacatcgtgtaatctgtccccagccctatggaactgtgcccacttctgcagcccatgacaccattggagggactctaccctttacccctttcactccatagtcccacacccaggaaagtactgggatgggaggggctaaacagcggttggcagctcctgtggaggtgtgtccatctcaaggactccatctggacaagagggttgtgtggggctctgttacaaattcctcatgttctgctggacagtaataaagccatgtcatatcacc

SEQ ID NO: 2924 - DNA, 900 bp, Rattus norvegicus
  Genbank Accession No. J02780
cgcgagcccagtggagcgagtgagctatggccggcctcaactcactggaggcggtgaagcgcaagatccaggccctgcagcagcaggcggacgacgcagaggaccgtgcgcagggcctgcagcgcgagctggatggcgagcgcgaacggcgcgagaaagctgaaggagatgcggccgctctcaaccgtcgcatccagctggtggaggaagagctggaccgggctcaggagcgactggccacagccctgcagaagctggaggaggcagagaaggctgctgacgagagtgagagaggcatgaaggtgatagagaaccgagccatgaaagacgaggagaagatggagatccaggagatgcagctcaaagaagccaagcacatcgctgaggaggctgaccggaagtatgaggaggttgctcgtaagttggtcatcctggagggtgagctggagagagcagaggagcgggcggaggtgtctgaactaaagagtagcgacctggaagaggagctcaagaacgtaactaacaatctgaaatcactggaggctgcttctgaaaagtactctgaaaaggaggataaatatgaagaagaaatcaagcttctgtctgacaaactgaaagaggctgagacccgagctgagtttgcggaaaggacagtttctaaactggagaagacaatcgatgacctggaagaaaaacttgcccaggccaaagaagagaacgtgggcttgcatcagacactggaccagacactaaacgaacttaactgtatataaaccaaaccagaagagtcctgtcttgataccaactccactccagagagtgcaccctgtcttcctctcttataagaagttccgcttactaccatgtctccaccttgctggaaaggccaagcagaaaaat

SEQ ID NO: 2925 - DNA, 1639 bp, Rattus norvegicus
  Genbank Accession No. J02827
tccgcggccaagatctggaggccgagccgtggcctgcgccaggctgccctcttgctgttggggcgacctggggctcggggcttggctagattccaccccagcaggcagcagcaacagcagttcccatccctggatgacaagccccagttcccaggggcctctgcagagtttgtagacaagcttgagttcatccagcccaatgtcatctccggcatccccatctaccgcgtcatggaccgacagggccagatcatcaaccccagtgaagatccccacctgccccaggaggaggtcctgaagttgtacaggagcatgacgctgctcaacaccatggaccgcattctctatgagtcccagcgacagggccggatctccttctacatgaccaactatggcgaggaggggacacatgtggggagtgccgctgccctggagcgaacggacctggtgtttggccagtaccgggaggcaggtgtgctcatgtaccgggactacccgctggagctgttcatggcccagtgctacggcaacgtgagtgacccaggcaagggacgccagatgcccgttcactacggctgcaaggagcgtcacttcgtcaccatttcctctccactggctacgcagatccctcaggcggtaggggcagcctatgctgccaagcgggccaatgccaatcagatcgtgatctgttactttggcgagggggcagccagtgaaggggatgcccacgccggtttcaattttgctgccaccttggagtgtcctatcatcttcttctgccggaacaatggctatgccatctccacaccaacctctgagcagtaccgtggggatggcatagcggctcggggccctgggtatggcatcatgtcaatccgtgtggacggcaacgatgtgtttgcggtgtacaatgccactaaggaggcccgacggcgggctgtggctgagaaccagcccttcctcattgaggccatgacctacaggatcgggcaccacagcaccagtgacgacagctctgcgtaccgttcggtggatgaggtcaattactgggacaagcaggaccacccgatctcgagactgaggcagtacctgctgaaccagggttggtgggatgaggaacaggagaaggcctggcggaagcagtcacgaaagaaggtgatggaggcctttgaacaggctgagcggaagctaaagcccaacccaagcctcctcttctccgatgtgtaccaggagatgcctgcccagctgcgcaggcagcaggagtccctggctcggcacctgcagacctacggggagcactaccccctggaccactttgacaagtgaggccctaaccaccacaaggtgtcctgctctgagtggagctggggggcggcaggacgctgccccccgctgctaaccagtgctgctgacgtgctgagcagccagtgtggcacgcactgcggctcccccaggctacttcactggggcaccacatttgcagccattgctgcagctccatcactcccttcacctgttacagtgccttttaggggtggggaggaaccagggccagggcagaccctttggcagggtggccctggatttgctcagagaaatagctgattggcagagtaagtaaaccacagctctgcctttg

SEQ ID NO: 2926 - DNA, 5224 bp, Rattus norvegicus
  Genbank Accession No. J03914
aaggcagggagttgacggtgaagaaggaacaatgccaggaagataatgaacagggttgcactttgcccatcaaaagtctctaactgcacatctggtggaaacagcacaccagagcaagaacagggagctgccgacacaggtgctagcccattcctgtctttgattactgactgcttagactggttcctgagccagtatagatatatttttttccctgtccctggatccatagctccttcccccaacaatccctcccgtggaatgtctgaaatttgaaacactgtaggccaatggtccaatagaaagccataaccaggtcccgcctcctccttgcctaagacattatcaggaagctcagacttgcaagacccaggtttgtctgctctgtacaccctaccagcacgatgcctatgacactgggttactgggacatccgtggggtgagtgagagcctcttctgctgggtgggacatgtgtggggtgaggagtagctaggatgtgatttccaggagacagattgagtgctgaagttgttggaaagttttgcctctcagggcaagttcaaacacaggggggcttgtgcttatgtggcctgtgtgtgagcttgtgtcgtgactgttcagtgtaaggtgtaggctcaccaagagattgcacagtcagactgtcaggcttttccaatctgtgacttgtgatatgtcatcttcccagctggctcacgccattcgcctgttcctggagtatacagacacaagctatgaggacaagaagtacagcatgggggatggtgattacacctgcttctcagacccctgctcccctgaccctggtgctcagcaactctgctctgaccccctgttgctcagctctacacagctcctggagttgggtttagaaactgtcccttctagaaaccttgaattttggagggctgacttttgaaaatcttagtgatatacagaagcattctctgtccttggggtgtgtgaagtaggtgaaattgcagatcttggggtgttctcatgactcactccttggagggatccctagagaaggaagctgggatactggggtgatttcttttgacatcctcttgtccaccacagctcccgactatgacagaagccagtggctgagtgagaagttcaaactgggcctggacttccccaatgtaggtggagggaaggggaggtgtggggaaggcctagtgctctcacctcatctcctggcctggctgaggggttggcatcagtgtttctgcttgcctgtttcatccctgctggctgcacagtgtttctgtgttgggctgtgtcctggctctcccactcagtcgacaccgtgctcatggagggtttcctggggcagcacactgagtgccagggccatgtctatcctcacccagggaagggattcagctaccccataacccatctgaccatccctgattgtctatccagctgccctacttaattgatgggtcacacaagatcacccagagcaatgccatcctgcgctaccttggccggaagcacaacctttgtgagtggggctgactgcagggtggggacagaagccatccctcttggcttggctggagcaggatgctgagagtgggtctgtgttgtgtgtgctgcaggtggggagacagaggaggagaggattcgtgtggacgttttggagaaccaggctatggacacccgcctacagttggccatggtctgctacagccctgactttgtgagttccaccagccctgagttgaagctggccctgcactcttgctcttgtatcagctctagccccgtttgccaccacagcctctcagtgctactcatggtacagtgtttgaaattgccgacagagtaacccccaagctcagtttgccaaatgaaaacttctagtcatttgctctaagatcgtatccagactctccacagcgacatttagtccctgctaggacagacagagtgtgatccctccagttctagctgctggttctgtcctgagctgtgtctttctgttgccctggggtcttgccatgtctgcagccctcatactcacactatgagaagacactggggctagggaacacttcctcccaaatggcttcccagagctgtgtccttgacacccacagagagaagcagatgctcccaataggcaactcagtcagtcaaaggccttggatcctcggctcctgtttcattttgtcctctcaaattcccctcatttctttggaacctgtactgaagtcctcactgccccagtaggcagaacactacctgtttcctgggccgtttcagttgtttgcttctgcctcatgtgaggtcagagttcagagtcaggtgcctacaactgtctcatgcaaggtggttctgataatgatggtggagtccagggaacagagctgtatcttgttgggctgtttccaaagaacagtctaatcatggtgttgctctaactaaacacgtgggcctcaacccagactgaatctcacgaaggtgactgcttctctgcacgctggggcctgtacagccctgtgaggccagcctctgccagggagcctgtgtctgaaggtagtgatggttgttctctgcttcaggagagaaagaagccagagtacttagagggtctccctgagaagatgaagctttactccgaattcctgggcaagcagccatggtttgcagggaacaaggtaaaggcagcgggtggggagaaggatttgccatttcttcccaggtgtcaaattctagcactcacccttggcttcctgcagattacgtatgtggattttcttgtttacgatgtccttgatcaacaccgtatatttgaacccaagtgcctggacgccttcccaaacctgaaggacttcgtggctcggtttgaggtgatgtcctgaccccgcttcctcttgacctacttcccttccccccttccagaatgcctttctactccttgaaatggagatgaaaatggctagcttctgttgagcatagaactgtgttctgctctttcgtcccttgcatggagtttcccagcacaccctgcatgttgtgtaggattatcagctccttaggatcattttggaagcggattgtaaagactcagttcctcagggagtcagtaccattggaaggggacgtggtttttttccagtgtgcttctagcttccaagaacagggggcaatagatctaccggataccaaaggaaaaaagccataggttgcaatagagcctggattttccagccctgaagcctatggaaattcaggacatgcccggaatgtatagggagcactattcaggattgatgcacagtaccaagatacagtatccatatctggcctatacaattctttgctcagtcagacccctgagtggggaagcactgggacccagggctacagttagtgtgagtagacagctcactgctgttggaggattttatcctccaacatcctgtttctttcctttccttttcctccttggtgacatcttgatgtttgactgtagaatcattacagtgagactgtactgccatcgtcatcttctctagtgtggcctccgtgtggcacagttctgagctcagtacgatgtggaaacctgcgtctctgtccaggcatgcagagtggcaggcacgcctgactatgatgtacatgtgatccccacaagccccactttattagagatttgggggatcgaggccatagtccaatgggaatcttagcgtggggtcttctcctctgtccctgctgcacacgtgatgcgtttttccttagttttcattggcttgccttctggtccagcctgctcggctctggagattgtgtgagaactgttgaacagtgtggtgggagagtgtgggaggctgcagtccaaggccagccaagcctggcttcttgggtaaggctgccctggaactttgaattcatcacagtttatctgggcaccgtactggaaagatagcacacagcacagtgccattctgtagaatgttctctagcagggctgagtctaggcaggatggacacactaagtatgcatttagctcccagtgttctgagtgtagatttttctgcatcaggagaatggccaaggccactccattggccttgctgtgtcacctatccctctgctcattcagtcaggatttcctgaggtactgggtgagatctttgctctcttccaaagtacactggcatgttactggtccctttgacctgtttggtcctttcccaatgtggaaacgcagggcaagaaggagcctgcaggtaaaaaagaaaagaaaagaaagcgagaattgcgtaaccgggtagcaacaaggtagcttagggagtgaaccgagggaatcagaatggaggctgctgagcccctccctgtgtagaccgggatgcagactctcgctgttcctgctgagcctgtgtgcctggcttcctcctggcaggagcacagcactgttttgcgggattctgtggagagctccctcttcttctatacctgcaccacagctgcagatggacgcagctgaacgcagtgccagtttcccctacatcagaggacattaaagcatccccttaccagagttgtgcccctgagcaacccgggctgtgttggggttcttagagatgtcccagatcctcaattctcgctttctcctcctcctcccttcagggcctgaagaagatatctgactacatgaagagcggccgcttcctctccaagccaatctttgcaaagatggccttttggaacccaaagtagcaccacaaagtccagacctggggatactcatgagtgccctgctggctgtgggcctagagcatggctctggcgcccaccacatgcagctttctcctcctttccattccctgttcctccatctcctcttcccagcccttgcctcagtcaagcctcagttccctggtctctccatttcttcattagtcccctcccttgtctctgccctgcatccaacccttccctcactgattttcggaggactgtaccagacccctgaatccccagcctggcctgagagattagatctcactgtgctgccctggtccccaggaaggacccatttgatttgcaataaagtgtgaaccacatttgtccagtgtcctgttttgctgtctgtgacactcagggctgactgtgttgacttggttgattttgttttgttgctcgcaggaggagctagagggatggactctgggctatttga

SEQ ID NO: 2927 - DNA, 1612 bp, Rattus norvegicus
  Genbank Accession No. J03959
ggcccattaccatgacgactatggaaagaatgatgaagtggagtttgtccgaactggctatgggaaggacatggtcaaagttctccatattcagagggatggaaaataccacagcatcaaagaggtggcgacttcggtgcagttgactctgaggtccaaaaaggattacctccatggtgataattccgacatcatccccacagacaccatcaagaacacagtgcatgtcctggcgaagttcaaagggatcaaaagcatcgagaccttcgctatgaacatctgcgagcacttcctctcttcctttagccatgtcacccgagcccatgtctacgtggaagaggtcccctggaagcgttttgaaaagaatggagtcaaacacgtccatgccttcatccacaccccgacgggaactcacttctgtgacgtggagcaggtgaggaacggacctcccatcattcactctggaatcaaagacctcaaggtcttgaaaacaacccagtctggatttgaaggattcatcaaggaccagttcactactctccccgaggtgaaggaccgatgctttgccactcaagtgtactgcaagtggcgctaccagaatcgggacgtggatttcgaggctacctggggcgctgtccgggacattgtcctgaagaaatttgctgggccctatgacagaggtgaatactcaccttccgtgcagaagaccctctatgacatacaagtgctgaccctgagccagcttcctgagatagaagacatggaaatcagccttccaaacattcactactttaacatcgacatgtccaaaatggggctgatcaacaaggaagaggttttgctgcctctggacaaccctacggcaaaataaccgggacggtgaggaggaagctgccttccaggctgtgacgttatggctccagccagttgtgatgcttgggataactgtgtgctcacctgcaaaaatttcaactcaagatactgattgctctgctctgtgtgaagtaattgctcttccgtttctagtttagcaaggggcttgtagctgtgcgcacgtggagccctgcattagcagacacgcaggctccgtggcgtggccttgggcagattcctttaaaactgtgatcggagaatcacagcgatatttctccttgctgttcttgtgccctctgcctcagactctgtctttaggatcgacgttaaccaaatagcgtaaagcactggctgctgccacatccgtgatctgaacatgagatcaaacactgtcatcatcctaggatgtctggtgtaccaaaaacgaataaaaccatgtgaaaaaaaaatcatcctagtgttttgaaaatctctggctgaagctcccaagctgaggagtgatttgcatttgattgaggctccaacaggaaagacagttttgtttgaagggtgagtctcctggtctgtggatcagactgaagggcacatctagaaggggtcacatgaacccaagctggcctcgggagagcgagaaagaccatgaagttgggtgcgtgaggaagatctgggatgaactgggatgggaggtgactattatcaaaatacattatataaaattctcaaatacttaataaaaacc

SEQ ID NO: 2928 - DNA, 1898 bp, Rattus norvegicus
  Genbank Accession No. J04197
cgcccacttgtacatctgggagcagaagaaaaagagggagctggagataatctgtgagaggctccgaagcccagtacatccccctgactcagccctcgcccacctcgctgctgtgactacagcaacagacaagacagctaggaagataggaagtgaggtccaataccttgtgggcagtggtgtcattagctgcaacgctaagatgtctcgagagatgggagaactcactcaaaccaggttacagaagatctggattccacacagcagcagtagcagcgtgctgcaacggcgaaggggctcctccataccacagttcactaattctcccacgatggtgatcatggtgggtttaccagctcgaggcaagacctacatctctacgaagctcacacgctatctcaactggataggaacaccaactaaagtgtttaatttaggtcagtatcgacgagaggcagtgagttacaggaactatgaattctttcgcccagacaacacagaggcccagcttatcaggaagcagtgtgctctagcagccctaaaggatgtccataagtatctcagccgcgaggaaggtcatgttgcggtttttgatgccaccaactataccagagaacggagatcgttgattctacagtttgctaaggaacatggttataaggttttttttattgagtctatttgtaatgaccccgaaattattgcagaaaacatcaagcaagtgaaacttggtagtcctgattacatagactgtgaccaagaaaaggttttggaagactttctaaagagaatagagtgctatgagatcaactaccaacctttggatgaggaattggacagccacctgtcctacatcaagatcttcgacgtgggcacacgctacatggtaaatcgagtgcaggaccacgttcagagccgtacagcctactacctcatgaacatccatgtcacacctcgatctatctacctatgccgccatggtgagagtgaactcaaccttagaggccgcattggaggtgactctggcctctcagctcggggcaagcagtatgcctatgcactagccaacttcatccggtctcaaggcatcagctccctgaaagtatggactagccacatgaagaggaccattcagaccgctgaagccctaggtgtcccctatgaacagtggaaggccctgaatgagattgatgcgggtgtctgtgaagagatgacctatgaagaaattcaggaacactaccctgaggaatttgcactacgggaccaggataaatatcgttaccgctatccgaagggagagtcctatgaggatctggttcagcgtcttgaaccagttataatggagctagaacggcaagaaaatgtactggtgatctgtcaccaggctgtcatgcggtgcctcctggcatacttcctggataaaagttcagatgagctgccctatctcaagtgtcctctgcatactgtgctcaaactcacacctgtggcttatggctgcagagtggagtccatctacctgaatgtggaggctgtgaacacacaccgggacaagcctgagaatgtggacatcacccgtgaagctgaggaagccttggacactgtacctgcccattactgagccttttcaagtgatcagattgtctctgtgctcacccccttcctcctgtaggagctgctgcccttgttctcgcttaagcagactctggctatggcctgagagtgccctacctccagtgaagaagtccgtagcagctcccaaacaggtctcaattcctagccacaactaaggcacctacctagttgtggataaagttccgttttaaatattctctgataaataaagatgtttatttctgcctataggacaggaagaggttataaagcttctttcattgcgg

SEQ ID NO: 2929 - DNA, 2381 bp, Rattus norvegicus
  Genbank Accession No. J04733
cgactatggagcgtcaggtgctgctgagtgagccccaggaggcggcagcgctgtaccggggccttagccgccagccttcgctgagcgccgcctgcctgggtccggaggtcaccacgcagtatgggggcctctatcggaccgtgcacactgagtggactcagagggacttggagcgaatggagaacatccgattctgccgccagtacctagtgtttcatgacggagactcggtggtgtttgccgggcctgcaggcaacagtgtggaaacccggggggagctgctgagcagagagtctccttcaggcaccatgaaagctgtgcttcgcaaggccggaggcacagtctcaggagaggaaaaacagttcttggaggtctgggagaagaaccggaagctcaagagtttcaacctgtcagcgctggagaagcatgggcctgtctatgaggatgactgctttggctgcctttcctggtcacactcagagacacacttgttgtatgtggcggagaagaagcgtcccaaggctgagtccttctttcagaccaaagccttggacatcagtgccagcgatgatgagatggccaggccgaagaagccagaccaggccatcaagggggaccagtttgtattttatgaagactggggagaaacgatggtttccaaaagcatccctgtgctctgcgtgctagatatcgacagtggcaacatctctgtgcttgagggagtccctgaaaatgtgtcacctggtcaggctttttgggcccctggagacacgggggtggtgtttgtgggctggtggcatgaacccttcaggctcggcatccgctattgcaccaatcgcagatcagctctgtactatgtggacctgagcggagggaagtgtgaactactctcggatggttccctggccatctgttctcctcggctcagcccagaccagtgtcgcatcgtctacctacagtatccatgtctagcccctcatcaccaatgcagccagctctgcctgtacgactggtacaccaaggtcacctcagtggtggtggacattgtaccccggcagctgggagagagcttctctggaatctactgcagtcttcttcctttgggatgctggtcagctgacagccagagagtagtctttgactctgcccagcgcagtcggcaggacctgtttgctgtggacacccagacgggcagcatcacctccctgacagctgcggggtcagcaggaagctggaagctgcttacaattgacaaagaccttatggttgcccagttctccacacccagtttgcccccaagcctgaaagttgggttcctgcctcctcctgggaaggagcagtctgtgtcatgggtgtccctggaggaggctgaacctattcctggcatccactggggcgtccgtgtgctacacccacctccagaccaagagaatgtacaatatgctgaccttgactttgaagcaatccttttgcagcccagcaatcctccagataagacccaggtccccatggtagtcatgccccatgggggaccccattcgtccttcgtcactgcctggatgctgttcccagccatgctctgcaagatgggctttgcagtacttctggtgaactatcgtggctccactggctttggccaagacagcatcctttctctcccaggcaatgtgggccaccaggatgtgaaggatgtccagtttgcagtggagcaggtactccaggaggaacactttgatgcaagacgcgtggcccttatgggtggttcccatggtgggttcctctcctgccacctgattggtcaatacccggagacctacagtgcttgtatagcccggaacccagtgatcaacattgcctccatgatgggctccactgacatccctgattggtgtatggtggagactggcttcccttatagcaacagctgcctcccagatctgaatgtgtgggaggagatgctggataagtcacccatcaaatacatccctcaggtaaagacaccagtgttactgatgctgggccaggaggaccgacgggtacccttcaagcagggtatggagtattaccgtgccctcaaggcccggaatgtgcctgtccggctcctgctgtaccccaagagcaaccacgcgctgtcagaggtggaggcggagtcagacagcttcatgaacgctgtgctttggctgcacacacacttgggcagctgaagccctatgttcttcttgagctgggcagcccgtcttgcactttgctcttggtaagctccaggatctgaccgaacagccaaacagtctcctaggctgtggactcagtgaatgggcagaggactaagaactatgttatcataataaaggaagacacagaaaaaaaaaaaaaaaaaaaaa

SEQ ID NO: 2930 - DNA, 2470 bp, Rattus norvegicus
  Genbank Accession No. J05035
acctcagctatggagttggatgagctgtgcctgctcgacatgctggtctacttggaaggtttcatggccttcgtgtccattgtggggctccggtcggttggctctccgtacggccgctactcgccgcagtggcccggcatccgagtgcccgcgcgacctgcctggttcatacaggagctgccctcgatggcctggccgctgtacgagtacattcgtcctgcagccgcgcgactgggcaacctgcctaaccgcgtcctgctggctatgtttctgatccactacgtgcaaaggacgctggttttcccggttctgatcaggggagggaagcccaccctcctggtcacctttgtcttggccttcctgttctgcaccttcaacggctatgtacagagcagatacttgagccagtttgcggtttatgctgaagactgggtgacccatccctgtttcctgacaggctttgccctgtggttagtgggcatggtgataaatatccactcagaccacatcctgaggaatctgagaaaaccaggggaaactggatacaagatacccaggggaggcctgtttgaatacgtatctgcagccaactattttggggagctcgtggagtggtgtggctttgcactggccagctggtccctccagggtgtagtgtttgcactgttcacactcagcacactgctcaccagagcgaagcagcaccatcagtggtaccatgagaagtttgaagattaccccaagtcaagaaaaatactgattccatttgtgctttagtgctctgttagcgctgttgcctcccatgagctgagtctgtctgtctccctggtgactttgctctgagcacttacgaatgaattgttttccttaattctcctgcagcccctttctcaggaaaggctgggggtgggggggtgtcgtcccctggtaaaggacaaagccaatgataaactaatccaccacatgcagttaggggctacactgcctgctggatccgaagcaggtagccctgagtcattatggcgctctctgacttcagcaatcagcagcccttacaatcctgcaagattccacccaagtcagcagcagtcacgggcctccttcactgatgtgtgttctgcctgctcagcccctgccacagaggcctggaggtgtgggagtgtggcctaagcacagtctgccatccttgaccgcagacctcttggacccacccccactccctccagacactggtaagagaagccttcctgcaacatgtcctgtcctcaggaggtgagacagcagagtgcttccattcactcgatgaccccatttttgctcttcctttgggctagaattcattaaggtccttaaaaacaaaacaaaactttttcttaatagtacaaaacaaaatatcaaaacaaaatttgttattttgaatgcacccaaggaccaatcatgtcacacaaagaaagctcagggctagcctgggctgtgtagggagaccctgtttgggaaaaaaaaaatgaagataacaaccagctaactgtccaaagaagtgaccgcagtaataaaagacgccgcccacacaggcaccagcttgggagaaagatgtgcgcctgggattgtaaacccactgttgctctgggcaggctgaggcccactggtgaagagccattcccaccggacccatgcacactgcctcggggcagcgtctgcactcacctctcacccgctgccaccacagctaaagaacagaacggatagaactgtgtgctctgaacccagtgaagatgctgcatgaagacctgcaggcacacctgatggcgtgcacggtgcccaccactcgcctgactcggaccatctctgtgtgcccgctgccacctctgtgtgccctttccagctggctttcccatcagggcttcctcagctcttctgctctcagacagaaactattctctgttcctctggttcgcagaatgtctagatttgacccagaaaacttcatgacacagctacttcattttaacaaagagcagtgtttaatggggaactacccttcaatcctttaccctccccttttctggccaagtaactgcttgaaaacctaaagcactaaacattgtaggtctcctctcaaaacctcaggcctgtctggtgtgttctgaaacgtttgtgtggaaggagatattcagctgagaccctgggaatgtttgctgtgaacttgacctcccttggagggcatggtgctagataaacttggaacctaggactccaggttgctaggcggatgccctgacactaagccacatcacacattagctctgtgatgcctctttctttatgaaggaccaagctgcccacatactaagtgagattaatttaagaggaatcctgtcctaacactgtatacttcattccctacaactcaacttacttgtatgaaccatgattgttaaggaaattaataaactacatttataagtaaaaa

SEQ ID NO: 2931 - DNA, 2178 bp, Rattus norvegicus
  Genbank Accession No. J05181
cagagcggagctgcggccaggaggaggacgcggccatggggctgctgtcccaaggctcgccactgagctgggaagagacccagcgccacgccgaccacgtgcggagacacggcatcctccagttcctgcacatctaccacgcagtcaaggaccggcacaaggacgtgctcaagtggggtgacgaggtggagtacatgttggtgtcctttgatcatgaaaataggaaagtccagttgttactgaatggcggcgatgttcttgaaactctgcaagagaagggggagaggacaaaccccaaccacccaaccctctggagaccagagtatgggagttacatgattgaagggacacctggccagccgtacggaggaacgatgtccgagttcaacacagtggaggacaacatgaggaaacgccggaaggaggctacttctgtattaggagaacatcaggctctttgcacgataacttcatttcccaggctaggctgccctggattcacactgccagagcacagacccaacccagaggaaggaggtgcatctaagtccctcttctttccagacgaagccataaacaagcacccccgctttggtactctaacaagaaacatccggcatcggagaggagaaaaggttgtcatcaatgtgccaatattcaaggacaagaacacaccatctccgtttgtagaaacatttcctgaggatgaggaggcatcaaaggcctctaagccagaccacatctacatggatgccatgggatttgggatgggcaactgctgtcttcaggtgacattccaagcctgcagtatatctgaggcaagatacctttatgaccagttggccactatctgcccaattgttatggctttgagtgctgcatcgccattttaccgaggctacgtgtcagacattgattgtcgctggggagtgatttctgcatctgtagatgatagaacacgggaggagagaggactggagcccctgaagaacaatcgctttaaaatcagtaagtctcggtatgactcaatagatagctacctgtccaagtgtggagagaagtacaatgacatcgacctgaccatcgacacggagatctacgagcagctcttagaggaaggcatcgatcaccttctggcacagcacgttgctcatctctttattagagacccactgaccctttttgaagagaaaattcatctggatgatgccaacgagtctgaccattttgagaatattcagtccacaaactggcagacaatgaggtttaagcctcctcctccaaactcagatattggatggagagtagagttccgaccaatggaggtacagttgacagactttgagaactctgcctatgtggtatttgtggtactgctgaccagggtgatcctctcatacaaactagacttcctcattccactgtccaaggttgacgagaacatgaaagtggcacaggagcgagatgccgtcttacaggggatgttttatttcaggaaagacatttgcaaaggtggcaacgccgtggtggatgggtgtagcaaggcccagaccagctccgagccatctgcagaggagtacacgctcatgagcatagacaccatcatcaatgggaaggaaggcgtgtttcctggactcatccccattctgaactcctaccttgaaaacatggaagtcgacgtggacacccgatgcagtattctgaactacctgaagctaattaagaagagagcatctggagaactaatgactgttgccaggtggatgagagagtttattgcaaaccatcctgactacaagcaagacagtgtaataactgatgagatcaactatagcctcattttgaaatgcaatcaaattgcaaatgaattgtgtgaatgtccagagttacttggatcaggctttagaaaagcgaagtacagtggaggtaaaagcgacccttcagactagacatccagcaaagtggatggcagctgcagccctgaccccgagcccactcagacgctgtgaagaccaagatggcctacagtgttccagttgcccacaagtgactagaagcttccttcagtaggtgaatctgagtttgtatatgtatatactaaagtatttttatgattattaacaatgtattttaataacactgtatctacagtcatggtgaactggcttgtacattttt

SEQ ID NO: 2932 - DNA, 2296 bp, Rattus norvegicus
  Genbank Accession No. J05470
cctgcttgctcaggaactccctcagccgccgcgttctctagccgccgttgctgcccgggacgatgatgccgcgcctgctgtttcgtgcctggccccgctgcccctcgcttgtcctgggagcccctagtaggcccttaagtgctgtctcggggccggacgattatctgcagcacagcatcgtgcccaccatgcactaccaggacagcctgcccaggctgcctatccctaaacttgaagacaccatgaagagatacctcaatgcacagaagcctctcttggatgacagccagttcaggagaacagaagcgttgtgtaagaattttgagactggcgttgggaaggagctgcatgcccacctgcttgctcaggataagcagaataagcacaccagctacatctcaggcccctggttcgatatgtatttaactgctcgagactctatcgttttaaactttaatccatttatggcattcaatccggacccaaagtctgagtataatgaccagcttaccagggcaaccaacttgactgtttctgcagtccggtttctgaagacacttcaggctggccttttagaaccagaagtgttccacttgaacccttccaaaagtgacacagacgccttcaaaagactcattcgctttgttcctccctctctgtcctggtatggagcctacctggtcaacgcatatcccctggatatgtcccagtatttccggcttttcaattcaactcgtatacccagacccaatcgtgatgaactctttactgacaccaaggctagacacctcctggtcctaagaaaaggacatttctatgtctttgatgtcctcgatcaagatgggaacattgtgaatcccttagagattcaggcacatctaaagtacattctctcagacagcagccctgtgcccgagtttcctgtggcatatctgaccagtgagaaccgagatgtctgggcagagctcagacagaagttgatttttgatggcaatgaggaaaccctgaagaaagtggactctgctgtcttctgcctctgcctagatgacttcccgatgaaggatcttattcacttgtcacacaccatgctgcacggcgatggcacaaaccgctggtttgataagtcctttaacctcattgtagccgaggacggcactgctgcagtccacttcgagcactcgtggggggatggggtggcagtgcttaggtttttcaatgaagtgttcagagacagcactcagacccctgccatcactccccagagccagcctgccgccaccaactcctctgcgtctgtggagacgctcagcttcaacctcagcggtgctctcaaggctggcatcactgctgccaaggagaagttcgacaccacggtgaaaaccctcagcattgactccattcagttccagagaggtggcaaggagttcctgaagaagaagcagctgagccccgatgcggtggcccagctggccttccagatggccttcctgagacagtatggccagacggtggctacctatgagtcctgcagcactgcagccttcaagcacggccgcacagagactatccgcccagcctccatctttactaagagatgctccgaggcgtttgtcagggacccctccaagcacagtgtgggcgagcttcagcacatgatggctgagtgttccaaataccatggccagctgaccaaagaagcagcgatgggccagggctttgaccgacacttgtatgctctgcgctatctggcaacggccagaggactcaacctacctgagctctatctggatcctgcataccagcagatgaaccacaacatcctgtccaccagcactctgaacagcccagcagtgagccttgggggctttgcccctgtggtccctgatggctttggcattgcatatgctgttcacgatgactggataggctgcaatgtctcctcctactcaggacgcaatgcccgagagtttctccactgtgtccagaagtgcttggaagacattttcgatgctctagaaggcaaagccatcaaaacttagcttcctagtcgctgaaaagcctccattcttcctcatgaacatggatgttcatgtagctggaaggtgccatcttgtgcccaacaaaactaatcccaaggtgcttccacagccagtgctgcaggctgagctggaagagcccaactgaaggtagtgagaggtcgcagctgtaaagccctctttgttcaggagatagggtttggaaaactaactcagctgtatttattgtttaaatagaaataaaacctggtgttgcttag

SEQ ID NO: 2933 - DNA, 2225 bp, Rattus norvegicus
  Genbank Accession No. J05499
accagatggcccaaagaggaggcctaggatgcaccccatgacaggtctgtgttccaggagggggaggaggggcatcctcaggctcctgcttcccatctcttcccccaaacagtgatgcctcgaacagtggcatgttgcctcgacttggtgacctgcttttctacaccattgcagaggggcaggaacgcatccccatccataagttcaccacggccctgaaggccactggactgcagacgtcagacccacggctccaggactgcatgagcaagatgcagcgcatggtccaagagtccagcagtggtggcctcttggaccgagaactcttccaaaagtgtgtgagcagcaacattgtgctcctgactcaggcattccggaagaagtttgtcattcctgactttgaggagttcacaggccatgtggatcgtatatttgaggatgccaaagagctcactggaggcaaagtggcagcctacatccctcacctggccaagtcaaacccagatctttggggcgtctccctgtgcactgtggatgggcagcgacactctgtgggccacacgaagatccctttctgcctacagtcctgtgtcaagccactcacttacgccatctccgtgagcaccttaggcaccgactacgtgcacaagttcgtgggcaaggaacccagtggtctgcgctataacaaactctccctcaacgaggaaggaatccctcataaccccatggtcaatgctggtgctattgtggtcagctccctgatcaagatggactgtaacaaagcagagaagtttgactttgtgttacagtatctgaacaagatggctgggaatgaattcatggggttcagcaatgccacattccagtcagagaaggagactggggatcggaattacgccattggctattacctcaaggagaagaagtgcttccctaacccagtggacatgatggctgcccttgatctctatttccagctgtgctctgtggaggttacctgtgagtcaggcagtgtcatggcggccactcttgccaatggcggcatctgccccatcacaggggagagcgtgctgagtgcggaagccgtgcgcaacaccctcagcctcatgcactcctgtggcatgtatgacttctcgggccagtttgccttccacgtgggcctgccagccaagtcagctgtgtcgggagccatcctcctggttgtacccaatgtcatggggatgatgtgtctgtcacccccgttagacaagctggggaacagccacaggggcatcagcttctgccagaagttggtgtctctgtttaacttccacaactacgacaacctgcggcactgtgctcggaagttagacccacggagggaagggggggaagttcggaacaagaccgtggtgaacctgttatttgctgcatatagtggagatgtctcagctcttcgaaggtttgccttgtctgccgtggatatggagcagaaggactatgattcccgcacagccctacatgtggcggcagcggaaggacacattgacgttgtcaagtttctgatcgaggcttgcaaagtgaatccttttgtcaaggacaggtggggcaacattcccctggatgatgccgtgcagttcaatcacctggaggtggtcaaactgcttcaggattaccatgactcctacatgctgtctgagactcaagctgaggtagcagctgagactctgtcaaaagagaacttagagagcatggtgtgagcacaggccaggggcagcccctgctcaagaaaaagcatgagccggccacacatttaacccaaggccaccaaaaatactattgcaagctgcttcagtggggatcaacacagccatctggtgacacaggccagtgttttctgtgagaatcaaaatgccccattccctcatcggacagcacagagaaaagcttcagtggacacctgagcagagctagccacggagacctcaaggtatagcttaagtgacatcctccaccagaaagtagcccaggcttttacccaggtccccatttcaacttccttggagagcctctagctacatgcatatgtatctgtcacagagcaagagaggtgggtgagagcccaatcacctggctttagaaatctgcagagatctgtccatcttagccaagacatgctgctactgctgacaggagttttatagacaaagtattttgtgttcaaataaactttaattaccggaatt

SEQ ID NO: 2934 - DNA, 3332 bp, Rattus norvegicus
  Genbank Accession No. J05519
tcagaggcaagctccacacaggctctttccacagccagtcacagccgccaaccagtctttggtgacagtcttcttgctgcctgggcccaccggctccctcagactctcctgcctccgctgtcagcgggtcacgacgtcattccggtcgcctgcgcaccttcgctgctgggagcgcgacgcaggcgcattgactgagtttccccgggagatccctgagcacgtgggttgtgctgtcccgtacgcgcgcggagggactggaacctgaattttgctggtgttcttcgtgggtagcagactagaagggccatggcaccagcgggaatcctgaacgggaaagtggtctccgcgcaaatcaggaatcgactgaagacccaggttactcagatgcaggagcaggtacctggcttcacccctggcctggcaatcctgcaggttggcgacagagatgattccaatctttatataaatgtgaagctgaaggctgctcaagagatcgggatcaaagccactcacattaaattaccaagaacttccacagagtcggaggtgttaaaatacgtcatctccctgaatgaggatgccactgtgcacggattcatagtacagctgcctttagactccgagaattccattaacacagaggcagtcatcaatgccattgcccctgagaaggatgtggacgggttgacgagcatcaatgccgggaagcttgccagaggtgatctaaaggactgcttcattccgtgcacacccaaaggatgcttggaactcatcaaagagacaggagtgcagattgcaggaaggcacgccgtggtggtcgggcgaagtaaaatagttggtgcacccatgcacgacctgcttctgtggaacaatgccacggtgaccacctgccactccaagactgccgatctggacaaggaggtaaataaaggagacattctggtggttgcaacaggacagcctgagatggtgaaaggggagtggatcaagcctggagctgtggtcatagactgtgggatcaattatgttccagatgatacaaaaccaaatggaaggaaagttgtgggtgacgtagcatatgacgaggccaaggagaaggcgagctttatcacgcctgtccccggtggcgtggggcccatgaccgtggcaatgctgatgcagagcacagtagagagcgcacagcgcttcctgaagaaatttaagccagggaagtggacaattcagtataacaagctgaacctcaagacgcctgtaccaagtgacattgctatatcacgatcttgcaaacccaagctcatcggtaacctggcccgagaaattgggctactcactgaggaggtggaattgtatggagaaacaaaggccaaggtcttactgtcagcactagatcgcctgaagcatcagccagatgggaaatacgttgtggtgactggaattactccaacacccctgggagaagggaagagcacaaccaccatcgggcttgtgcaagcccttggcgcccacctgcatcagaatgtttttgcgtgtgtgcgacagccttctcagggccccacctttgggataaaaggtggcgctgcaggaggcggctattcccaggtcattcctatggaagagtttaatctccacctcactggtgacatccacgccatcactgccgctaataaccttgtggctgctgctattgacgctcggatatttcatgagctgacccagacagacaaggctctctttaatcgtctggtaccctcagtaaatggagtaagaaagttctctgacatccaaatccgcaggttacggaggctaggcattgagaagactgaccccgctgcgctgacagatgatgagataaacagatttgcaagactagatattgatccagaaaccataacatggcagagagtgctggatactaacgatagattcctgaggaagatcaccattggacaggctccaaccgagaaaggccacacacgcacggcccagtttgatatctctgtggccagtgaaatcatggcagtcctggccctcactagttctctggaagacatgagagcaaggctgggcaaaatggtggtagcgtccagtaagaaaggggagcctatcagctgtgaagacctgggcgtgagcggggcgctgacggtgctcatgaaggatgcgatcaagcccaatctcatgcagaccttagagggcacgccggtatttgtccatgctgggccttttgccaacattgcacatgggaattcctccatcattgcagaccggattgcactcaagctggttggccctgagggctttgtagtgacagaagcaggattcggagcagacataggaatggaaaagttcttcaacatcaagtgccggtattctggtctccagcctcatgtggtggttcttgttgccactgtcagggctcttaagatgcacgggggtggccccacggtcaccgctggactgcctcttcccaaggcttacacagaagaggacctggacctggtggaaaagggcttcagtaacttgaggaaacagatagaaaatgctagaatgtttggagtgcctgtcgtggtggccatgaatgcattcaagacagatacagatactgagctggacctcatcggccgcctctccagagagcatggggctttcgatgctgtcaagtgcacccactgggcagaagggggccagggagccttagccctggctcaggctgtccagagagcttcacaggcccccagcagcttccagctcctctatgacctcaagctctcagttgaagataaaatcaggattattgcacagaagatctacggggccgatgacatcgaattgctccctgaagcacaaaacaaagcagaaatctacacaaagcagggctttgggaatctacccatctgcatggccaaaacacacttgtctttatctcacaacccagagcaaaaaggggtgcctactggcttcgttctgcccatccgggacatccgggccagcgttggggctggtttcctgtaccctttagtaggaacgatgagcacaatgcctggactccctactcgaccctgtttttatgatatcgatttggaccctgaaactgaacaagtgaatggattgttttaaacagatcttccatctccaagaggctactctgtctggccagtgtctgttcaggcccactgaggaagtgtgcagagaagtcttgaaagtctgtgcctgccctgaagagcttcagaaatagtggaagtttctctaaagcctttcatagccttaattcagatcatgtataaattaacataaatcatgcctatttacatagtaaaagtccacagaataaatga

SEQ ID NO: 2935 - DNA, 1021 bp, Rattus norvegicus
  Genbank Accession No. K00996
acagagttccatcatgagaacctcatgatctccctgctctctctcttctttgctggcactgagaccggcagcaccacactccgctatggtttcctgctgatgctcaagtacccccatgtcgcagagaaagtccaaaaggagattgatcaggtgattggctctcacaggccaccatcccttgatgatcgtaccaaaatgccatacactgatgcagtcatccacgagattcagagatttgcagatcttgccccaattggtttaccacacagagtcaccaaagacaccatgttccgagggtacctgctccccaagaacactgaggtgtatcccatcctgagttcagctctccatgacccacagtactttgaccatccagacaccttcaatcctgagcacttcctggatgccgatgggacactgaaaaagagtgaagcttttatgcccttctccacaggaaagcgcatttgtcttgacgaaggcattgcccgaaatgaattgttcctcttcttcaccaccatcctccagaacttctctgtgtcaagccatttggctcccaaggacattgacctcacgcccaaggagagtgacattgcaaaaatacctccaacataccagatctgcttctcagctcggtgatcgggctgaggcagccaggtgccccagttctgttgggaatggcctcatgtttctgcctctgggggacctgctgaaaaccaggctcaaggccactgctcacatcttcctattgcagttctccaaagtcccaaggcttgttcttattcctgtgaatggcactgaagaagtcaatcgactgtcttattttgacatgtgaacagagatttcatgagtacacatctcatgctgagtcacttccctcttcctcctaatagcccacgtccccacttatcagccctccatggtctgtgatctgtgctaatggactctgtatatggtctcagtgctatgtctacagacttacatagtatgtatggttcaggtaaacagaatcacagagtgtgtg

SEQ ID NO: 2936 - DNA, 1362 bp, Rattus norvegicus
  Genbank Accession No. K01721
accttcctcttccagtgcatcacagccaacatcatctgctccattgtgtttggagagcgctttgactacacagaccgccagttcctgcgcctgttggagctgttctaccggaccttttccctcctaagttcattctccagccaggtgtttgagttcttctctgggttcctgaaatactttcctggtgcccacagacaaatctccaaaaacctccaggaaatcctcgattacattggccatattgtggagaagcacagggccaccttagacccaagcgctccacgagacttcatcgacacttaccttctgcgcatggagaaggagaagtcgaaccaccacacagagttccatcatgagaacctcatgatctccctgctctctctcttctttgctggcactgagaccggcagcaccacactccgctatggtttcctgctcatgctcaagtacccccatgtcacagagaaagtccaaaaggagattgatcaggtgattggctctcacaggccaccatcccttgatgatcgtaccaaaatgccatacactgatgcagtcatccacgagattcagagatttgcagatcttgccccaattggtttaccacacagagtcaccaaagacaccatgttccgagggtacctgctccccaagaacactgaggtgtatcccatcctgagttcagctctccatgacccacagtactttgaccatccagacaccttcaatcctgagcacttcctggatgccgatgggacactgaaaaagagtgaagcttttatgcccttctccacaggaaagcgcatttgtcttggcgaaggcattgcccgaaaggaattgttcctcttcttcaccaccatcctccagaacttctctgtgtcaagccatttggctcccaaggacattgacctcacgcccaaggagagtggcattgcaaaaatacctccaacgtaccagatctgcttctcagctcggtgatcgggctgaggcagccaggtgccccagttctgttgggaatggcctcatgtttctgcctctgggggacctgctgaaaagcaggctccaaggccacctgctccacatcttcctattcagttctccaaaagtcccaaggcttgttcttattctgtgaatggcactgaagaagtcaatcgactgtcttattttgacatgtgaccagagatttcatgagacacatctcatgctgagtcacttccctcttcctcctaatagcccacgtccccacttatcagccctccatggtctgtgatctgtgctaatggactctgtatatgtctcagtgctatgtctacagacttacatagtatgtatggtttcaggttaaacagaatcacagagtgtgtg

SEQ ID NO: 2937 - DNA, 960 bp, Rattus norvegicus
  Genbank Accession No. K01933
tgaacccagctgctggcgataaactccccaagtgtgaggcagtgtgtgggaagcccaagcatcctgtggaccaggtacagcgcatcatcggtggttccatggacgccaaaggcagctttccttggcaggccaagatgatctccagacatggactcaccactggggccacactgatcagtgaccagtggctgctgaccactgcccaaaacctcttcctgaatcacagtgagaatgcgacagccaaggacattgcccctaccttaacactctatgtggggaaaaaccagctggtggagattgagaaggtagttctccaccccgagcgctctgtggtggatatcgggctgatcaagctcaaacagaaagtgcttgtcactgagaaagtcatgcctatctgcctgccttccaaagactacgtagcgccaggccgcatgggctatgtgtccggttgggggcggaatgtcaactttagatttactgaacgtctcaagtatgtcatgctgcctgtggctgaccaggagaagtgtgagctgcactatgagaaaagcacagtgcctgagaagaaaggcgctgtaactcctgttggggtacagcccatcttgaataagcataccttctgtgctggccttaccaagtatgaggaagacacttgctatggtgacgctggcagtgcctttgccgtccatgacacggaggaggacacctggtatgcagctgggatcctgagctttgacaagagttgtgccgtagctgagtatggtgtgtacgtgagggcaactgatctgaaggactgggtccaggaaacaatggccaagaactagttcagggctgactagagggctgcacacagtggggcagggcaattcaccctggaagaggaagtagaagggttggggacataatctgagggctgctagccctgcattgctcagtcaataataaaaaacgagctttggaccc

SEQ ID NO: 2938 - DNA, 615 bp, Rattus norvegicus
  Genbank Accession No. K02816
tttcttcgagctcttcaggcagtgattctgacagcgaagttgaaaaaaagttaaagaggaaaaagcaagttgttccagagaaacctgtgaagaagcaaaagcctagtgagagttctagagcactggcatcctccaagcagagtagcagcagcagagatgataacatgttccagattggaaagatgagatatgtcagtgttcgggactttaaaggaaaaattctaattgatattagagaatattggatggactcagaaggtgaaatgaaaccaaggagaaaaggtatttctttaaacatggaacaatggagccagctgaaggaacagatctctgacatagatgacgcagtaagaaagctgtaaagtctgagccatatcaagcctgtactgtcgtagctgttttacttcgctgtcttttcacattggcttttgttttctaaaatgttgtttttcacgctgttgtatatttggattgcagaacaatttgtaagacaaatacttttttttaatgtgcattattaaaatgttctaagtgaagctaattgtcgactttattaaagaggattgctttgtgccccttacctagtgtaaaataaagtcagatcattacaatctt

SEQ ID NO: 2939 - DNA, 593 bp, Rattus norvegicus
  Genbank Accession No. K03045
ggctgcagcctcctctcgctaaggaaaggctgcctgcccgttctagggagtcagtggttagcaagttggtcagggccccggggctactgtgtctctctgacttacagacgatgaccactggatcatcgatacggactacgacaccttcgctctgcagtattcctgccgcctgcagaatctggatggcacctgtgcagacagctactcctttgtgttttctcgtgaccccaatggcctgaccccggagacacggaggctggtgaggcagcgacaggaggagctgtgcctagagaggcagtacagatggatcgagcacaatggtggagcaactcttcctgagggacttagcagggctgggaggataagaggtgcagcatctgtgcaagtgggttacccgaggcctcctttggaccaagtctgattaaatttttccaggactgccatcagccacacagacaaggaccaaaggtttctcttcccctaaacgctaggcacttttctataaccaaagttgtgaaaccactctcttcttatgtttttgctccccacatttgctgctagtgcacaagccgagaccatcgcaagataaggtt

SEQ ID NO: 2940 - DNA, 551 bp, Rattus norvegicus
  Genbank Accession No. L00117
gcgccttccagccgtcgggtacatggagccttggtccatgaatgctggctcacagccattctaagacctgtccttgcttgtcttggcgtacaccgaggcatcttgtcgtacaacacctactctctctgactgtcccataaacccagtgtgctgccacacccaacaagtgagaggacaggttacggactgagtatcctgtcttttcctcaggtcattgcctacaactgaacgtcttcctgagtccagtggcctccccaagatggtgcttagctctgcaataagatctgaagtaagcgagaaggagttagggctggggttatcgctcagcggcagaacactttctaatatgtgcgaagcctgggttccatccctaatactgcagcgggggcaggggagtgctgctggtgtctctctgctctttctccagtatctggggcaaaggtggttaatgaaaaacagctctgagactgagccagatacagaaaggcaaataaaactcaatgtgttatcatactgtgtgttcgcgttggtaattaagcccctacaggaaa

SEQ ID NO: 2941 - DNA, 2350 bp, Rattus norvegicus
  Genbank Accession No. L00191
gtgcccggaagcaagtccaccgccaccatcaacaacattaaaccaggagcagactacaccatcaccctgtatgctgtcactggccgtggggacagtccagccagcagcaagccagtttccatcaattatcaaacagaaattgacaagccatcccagatgcaggtgacggatgtccaggacaacagcatcagtgtcaggtggctgccttcaacttctcctgtgacaggttacagagtgaccaccgctcccaaaaatggcctaggaccaacaaaatctcaaactgtcagtccagatcaaacagaaatgaccattgaaggtttgcaacccaccgtggagtatgtggttagtgtctatgctcagaaccggaacggagaaagccagcccctggttcagactgcagtgaccaccattcctgcgccaaccaatctgaagttcactcaggtgtcacccaccaccttgactgcccagtggacagcgcccagtgttaagctcactggctaccgagtgcgggtgaccccgaaggagaagacaggaccaatgaaagaaatcaacctttctccagacagcacctccgtgattgtgtcagggctcatggtggccaccaagtatgaagtcagcgtctatgctctcaaggacacattgacaagcagaccagctcagggagtcgtcacgactctggagaatgtcagccctccaagaagggcccgtgtgaccgacgctacagaaactaccatcactattagctggagaacgaagacagagacgatcactggcttccaagtcgatgccattccagccaatggccagaccccggttcagaggaccatcagcccggatgtcagaagctatactattacaggtttacagccaggcactgactacaagatccacctgtacacgctcaacgacaatgcccggagctctcctgtggtcattgatgcctccacggccattgatgccccatccaacctgcggttcctgaccaccacacccaactccttgctggtatcatggcaggcaccccgtgccaggattactggctacattatcaagtatgagaagcctggatcccctcccagagaagtggtccctcggccccgccctggtgtcacggaggccaccatcactggtttcccatcaggtctggagccaggaaccgagtacaccatctatgtcatcgcactgaagaacaatcagaagagtgagcccctgattgggaggaaaaagacaggtaaagactcctaaccgaccgttggtttgcagggtgaagttctctacgttttgacacatcgctcctggatttttttttttctagcagaatggcttatatattgtactattaggcacaaatcacctaacatgctctaaaaatgtcttatttatttttctacagccttaagcttcttttaccttgcagaaattcaaattagattgtttgaattggggttgaggtgggggggggctttttaatggtgagagtaaaacctctccgatttgtgttgatttgtttattatttgatttctgaacttcagatatttcagttagttgcaaaggcttaactggagcagagatggctgtctgtggggctcagcggttcaaagctttgtctgtatgagaattcaaactaacattttttcccccatctaaactataaagaaatctgtgaaaagaagaaaaaatccagatttctttctagagtgttctgtgatctgagaaccgctggctgtctgggagcattgatcgggttgatatacagttgttgcctggattgatggtgattggttgcttcttctttgagcttaacgcgctttgcttttttggctctaacctctctcttggctagatgagcttccccaactggttacccttccacaccccaatcttcatggaccagagatcttggatgttccctccacagttcaaaagacccccttcgtcaccaaccctgggtatgacaccgaaaatggtattcagcttcctggcacatcccaccaacaacccagtgttgggcaacaaatgatctttgaggaacatggctttaggcgaaccacgccacccactgcggccacccccgtcaggcttaggccaagaccatacctgccgaatgtagatgaggaggtccaaatcggtcatgttcccaggggagacgtagactaccacctctatcctcatgttccggggctcaatccaaatgcctctacaggacaagaagctctctctcagacaaccatctcttggacgccattccaggagagttctgagtacatcatttcatgccaacctgttggcactgacgaagagcccttacaggtatatattacagcccttattatgagtgtctctctagat

SEQ ID NO: 2942 - DNA, 685 bp, Rattus norvegicus
  Genbank Accession No. L00320
acgagtgctgacatgatcactctctgtgttcacaggaaagcacatttgtcttggcgaaggcattgcccgaaatgaattgttcctcttcttcaccaccatcctccagaacttctctgtgtcaagccatttggctcccaaggacattgacctcacgcccaaggagagtggcattggaaaaatacctccaacgtaccagatctgcttctcagctcggtgatccggctgaggcagccatgtgccccagttctgttgggaatggcctcatgtttctgcctctgggggacctgctgaaaaccaggctccaaggccactgctccacatcttcctattgcagttctccaaagtcccaaggctttttcttattcctgtgaatggcactgaagaagtcaatcggctgtcttattttgacatgtgacagagatttcatgagtccacatctcatgctgagttacttccctcttcctcctaacagcccatgtccccagttatcagccctccatggtctgtgatctgtgctaatggactctgtatatggtctcagtgctatgtctacagacttacatagtatgtatggttcaggtaaacagaatcacagagtgtgtgagcttcggagtcttgtgcctttacttcacataatattattctaggttcctgtgttctacaggccacagtcacacacattcat

SEQ ID NO: 2943 - DNA, 441 bp, Rattus norvegicus
  Genbank Accession No. L00686
gaattcatgacacctgcagacatgtcttacagccaattgattagccaccatttgtctgtttgtgctgcctaattgctctgtctatggctcctgagggattactgagcagatgtggtcacagcagcatccttgatttttgtcttagagtgaaatctgttagtgtcccttttgagtactgggttgcctatgtgttggtctccacgtgaggcccttaacttaactgggatagtctatccctaactgcctatttcatcactaaaaactcttcactttacctgggtggcaaatgcctttaatcccagcactcaagagacagagacaggaagctcttggttagttcaaggccagcctggtctacagttcctatcctgagttccaggatagccaaggctacacagagaaaccctgtcttgaaaaaacaaaataaaacaaatgcaattc

SEQ ID NO: 2944 - DNA, 966 bp, Rattus norvegicus
  Genbank Accession No. L01267
cagcgtccggctctggactgtctatcgctctctgacgttcagtcccgggtcgctgcttgtgcgcgcacgccgcctcacacgacaaacttatggcggagcgcggggaactcgatctgacgggcgccaaacagaacaccggcgtgtggctggtgaaggttcctaaatatttgtcccagcaatgggcaaaagcccctggaagaggtgaagttgggaaactgaggattgccaagaatcaaggaaggactgaggtatcatttactttgaatgaggatcttgcgaatattcatgatatcggtgggaaaccagcttcagtcagtgctcctagagaacatccatttgtcttgcaaagtgttggaggacagacattaacagtgttcaccgagagctcctcagataaactgtcattggaaggaatagtggttcagagggcggaatgccgacctgctgccagtgaaaactacatgaaactaaagagattgcaaatagaagaatcttccaaacctgtaaggctctcacaacaggctgacaaagttgtaaccaccaattacaagcctgtcgctaaccatcagtacaatattgaatatgaaaggaagaagaaagaagatggaaagcgagctcgggcagacaaacaacacgtcctagacatgctgttctcagcctttgagaaacatcagtactataatcttaaggacttggtggacatcacaaagcaacctgtgggatacctgaaagaaatcttgaaagaaatcggcattcagaatgtaaaaggaattcacaagaatacgtgggagctgaagccagagtacaggcattaccaaacagaggagaagagcgactgagagaagcgtgtgcaacagttacaggcagatctctgccaccacacgctgactgcctgcccaccctgacaggacaaagacaactgagtctgtctgccattcctcagtaaactgttaaagctgggactcc

SEQ ID NO: 2945 - DNA, 1330 bp, Rattus norvegicus
  Genbank Accession No. L03201
gggactctctcatgccgccatacggagatggctgttttgggtgcccctggtgtgctctgtgacaatggagcaactgcagagagacctaccctggaccaccactgggatctctggaagaaaactcgcatgagaaggaatacagatcagaatgaagaagacgtacgacgtctcatctgggaaaagaatctcaagtttataatgcttcacaatctggaacattctatgggaatgcattcatacagtgtgggcatgaaccacatgggagacatgacacctgaagaagtcataggttatatgggctctctgagaattcccaggccctggaatagaagtggcactctcaagtcaagctctaatcagacattgcccgactctgtggactggcgagaaaagggctgcgtcactaatgtgaaataccagggctcttgtggttcctgctgggctttcagcgccgagggggcccttgaagggcagctgaagctgaaaacggggaagctggtgtctctcagtgctcagaacctggtggattgctcaaccgaagaaaagtacgggaataaaggctgcgggggtggcttcatgaccgaagctttccagtacatcatcgatacgagcatcgactcagaagcttcctatccctacaaagccatggatgaaaagtgtctctatgacccaaaaaatcgagctgccacgtgttcaaggtacattgagctccccttcggcgatgaagaagctctgaaagaagcagtggccactaaagggcctgtctctgtgggcatcgacgacgccagccattcctccttcttcctctaccaaagtggtgtctatgatgacccctcctgtaccgagaatatgaatcatggtgttctcgtggttggctatgggactcttgatgggaaagactactggcttgtgaaaaacagttggggccttcactttggtgatcaaggatatattcggatggcgagaaataacaaaaatcactgcgggattgctagctattgctcttacccagaaatctaaaccgtttcttctttttctaatgggtcacaaagacggaatacactctaatttaattttgtctgctccatccggaggacccaagtgtgtcgtgatcagtgtgtacatactgtgctaactggcttacagcttgtttgttttataactttacctctctctgaaaagtctgtaagcaaggacgcgctgaggatggagctggcagtctgtcctagatattctttctatgcttgcaccctgtcgtctaatgtgtctaataaccctttgtaacacagatatccccaaagtgcctaataaaatctgtcatttcaagctc

SEQ ID NO: 2946 - DNA, 3933 bp, Rattus norvegicus
  Genbank Accession No. L05541
taagcttatttctgctgataaggataaagacatcgttacagcaagtactcacatctccaggcaacacgtgaagggccaggctgcaggcttcatctatagtatgatcaacacccccacgtccctcccagtccccaacgttgcatcttagccacagctgctcatactggatggggagggtgctggtggggttgggggaggactcgacgaggctccgcctctctgagggactattgacagttaaaggttgctgacaggaggagtgtccttgagtggggagctgatatgttgcccatgctccagtaaatagctctaaactcatgaaagcaaccataactatttcagtgggtcacaaaagacataaatgtacgcgaaagtaggggggcttactgggaacaaaaagttttagcgggtaagaaggagatagtaacaaaggagggtgactgtgaccaaaagccattatgtgcacgtatggaaattttcgcttcccctcccgtatatatttgctgaatctgtggccggacgaatggatacagcaaccacttttcacagatgctctccagagaagtgcctccaatccggtgtggaggagaaccatcaaaacatcctggggaggtgtgcggcggtcccgagccccgccctcaagtggcaggctgtccccctcgtcacgtgttggcggctagccaatcatccagggtgggcgggggaaaactatggaatggtgagtttatccccgtgcactttcttgacggactttaggttaattcgtgtgacctcatgtcgcaaagcggagccgatcctgagcagcgccagcaggcttcagaggcggacgccatggcagcgaccttccgggcgagcggtaattactgggcggcctggacccgctgcaggccttgtggcaccgaaagcgtttaaccctttaactcccctctggcagcctttagcttctagaaacactgcgcggacctagcgtccctgaacttgggcctgctaaggcattagagccattggggaagagggagacagggaattttgctgactgatccttgactgactgtcccccagaacaccagcatattcgctacaacccgctccaggatgagtgggtgttagtgtcagcccatcgcatgaagcggccctggcaaggacaagtggagccccagcttctgaagacggtcccccgccatgacccactcaaccctctgtgtcccggggccacacgagctaatggggaggtaagcccgaatacacagccaccaagtggaataggaggaaatagtttttccttattactgctcttcgcccacaagagggagcagtgcacccccttttgagtcagttcccagcaagcaattttgaaccttagaaagggcctttcgcccccccccccgcagcctgtgtaccccttgaattgggtcagatggttgtatttctagcctattcttgtcagtaggtgaatcccccctatgatggcaccttcttatttgacaatgacttcccggctctgcagcccgatgctccggatccaggtaccctcaatttaaccactgttggggagaagggagactggatctgaccggggaacctgtgttgcagagtgtaatacttctttattccaggacccagtgaccaccctctcttccgagtggaggccgccagaggagtttggtaactatgggtttccccgcttataacctccagccagggctgaagactaagacctgggcttgggccctgcccttagcacccaacccctatccctttgtcattcttccctcaccacctagtaaggtcatgtgcttccacccctggtcggatgtgacgctgccactcatgtctgtccctgagatccgagctgtcatcgatgcatgggcctcagtcacagaggaactgggcgcccagtacccttgggtgcaggtctgtgagggggcggtgtaactttggtctgggggagtagcagtattgcttccacagggtatggcgaggaggggttggcttgatgactgtgtgactgctgagtccttctccttttacccaatagatctttgaaaacaaaggagccatgatgggttgctctaacccccatccccactgccaggcaagtatgtggtaggctgtaatggctttcttggctgagtgtactgactgcggacaggggatagggcaaaagaaatacattgataatttggaggcttagagctagtggactcgcctgctgtttcttctttgtcctcgccccttgacaggtttgggctagcaatttcctgccagatattgcccagcgtgaagagcgatcccagcagacttatcacaaccagcatggaaagcctttattattggaatatggccaccaagagctcctcaggaaggtgggagagagctaggccctgtgtccgcagggagtccctggccctttaccctcccagggagaccttcgggaaagggggataggacatcagcagccatctaaaggaatccattggtgacttagagtagggtgctagcacaagtggagagactcgaattcttttgcttgcctgccactcacccccttcccccgtcacacacttcacttccattctgtgtgtccaggaacgtctggtcctaaccagtgagtactggatagttctggtccccttctgggcagtgtggcctttccagacattactgctgccccgacggcacgtgcagcggctacctgagctgacccctgctgagcgtgatggtgagtctcccgggtaggaccgggggactgggtgctgagtagaatagccctgacgggaccagcatctattccccggggtgaaaatcgggctctgattccagatctagcctccaccatgaagaagctcttgaccaagtatgacaacctgtttgagacgtcctttccttactccatgggctggcacggtaaagcttttggtgttggagtagttccaacagtatttctgggctcctagattctggcttagggaactacaaccctacgaggtctcaaagcacttgttggctttaaaacaacagtccagagcaggggtgctggggctcagagaggagagacctggtgacactgttactgattgctctaatgcttgagctccctggtgggaaataccaggagatgtaataacgggcacctggcctagtttaggggaggggctagactgaaggctggcaaagagcctcccatatcgtctgtcttcttcttgtcaggggctcccatgggattaaagactggagccacctgtgaccactggcagctccatgctcactattaccccccactcctgcgatcggctactgttcggaaattcatggttggctatgaaatgcttgcccaggcccagcgtgacctcactcccgaacaggtcagggttcacgccctgggtcgtaacatcctctcccctcatttcctcacgggatctcaggatcttggcagtcaccaccccaaccagcctcataaaaatcttcacattcctagaactcagtccctgctcagctccaccccctggtgactccagctatcccgaactactcttcccatcccataagccctcctcagtatttctcgggccctgaactcctcatgcaattccaagtgactctttctctccccaattgcttcttgtccccttacaggctgcagaaagattaagggtgctccctgaggtacactattgcctgacgcagaaagacaaggaaacagcagccaccgcttgactgtgaccacagcagggcattgaatctttgtacccgacagacctgggacctggagttcgggcagatgtgacatcaataaaactgtgtctcatgttctaaccttgttttctgacaccagaggagtgtggacttttacattctggagtctgggtaaggctaagtgtgattccaaacactctttgcctacagattttcaaaagttcgatgcacgaattc

SEQ ID NO: 2947 - DNA, 405 bp, Rattus norvegicus
  Genbank Accession No. L07407
attctctcttcgagctttagagagatggagacagacacactcctgctatgggtgctgctcctctgggttccaggctccactggtgacattgtgctgacccagtctcctgctttggctgtgtctctagggcagagggccaccatctcctgtagggccagtgaaagtgtccgttcatctatgcactggtaccaacagaaatcgggacagcaacccaaactcctcatctacggtgcatctaacctagcatctggggtccctgccaggttcagtggcagtgggtctgggacagactttaccttcaccatagatcctgtagaggctgatgatattgcaacctattactgtcagcagagtaggaatgatccgtacacgtttggagctgggaccaagctggaactgaaacgg

SEQ ID NO: 2948 - DNA, 2798 bp, Rattus norvegicus
  Genbank Accession No. L10669
gtccaggcctctttcagaccaggataagagaaagcaaatcagtgttcgtggcctagccggcgtggaaaatgtgtctgacctgaaaaagaacttcaaccgccacctacatttcaccctggtcaaggatcgcaatgtggccactccgagagattactatttcgcactggctcacaccgtgcgggaccacctcgtggaccgctggatccgcacacagcagcattactatgcgaaggaccccaagaggatttactacctgtctttggagttgtacatggggaggacactgcagaacaccatggtgaacctggccttggagaatgcctgcgatgaggccacctaccagctgggtctggacatggaggagctggaggagatcgaggaggatgcagggttgggcaatggaggcctgggacgcctggcagcttgcttcctggactccatggctacactggggctagctgcctatggctacgggatccgctatgagtttgggatttttaatcagaagatctgtgggggctggcagatggaagaagctgatgactggcttcgctatggcaacccctgggagaaggcccgcccagagttcacgctgcctgtgcacttctacggtcgagtggagcacaccagtcagggtgccaagtgggtggacacacaggtagtgttggctatgccctatgacactcctgtgcctggctatcgaaacaacgttgtcaacaccatgcgcctctggtcggccaaggcacctccttacttcaacctcaaggacttcaacgttggcggctacatccaggccgtgctggaccgaaacctggctgagaacatctcacgtgttttgtaccccaatgataagttctttgaagggaaggaattgcggctgaagcaggagtactttgtggtggccgccaccctccaggacatcattcgccgtttcaagtcctccaagtttggctgccgtgatcctgtgcgcacaaactttgatgctttccctgataaggtggccatccagctcaacgacacccacccttctttggccatccctgaacttattaggattctggtggacctggaacgactggactgggacaaggcctgggatgtgacagtgaagacctgtgcctacaccaaccacacagtgctgcctgaagccctggagcgctggccagtgcacctcatggagacactgcttccccgccatctgcagatcatttatgagatcaaccagcgtttccttaatcgggtggcggccgcattccctggggacgtagataggctgcggcgcatgtcactcgtggaggaaggagcggtgaaacgcatcaacatggcacacttgtgcattgctggttcccacgcagtcaacggtgtggctcgcatccattcggagatcctcaagaaaaccatcttcaaggacttttatgagctggagcctcacaagttccagaacaagaccaatggcatcacccctcggcgctggttggttctgtgtaaccctgggctggcagaggtcattgctgagcgcatcggtgaggagtacatctcggatcttgaccagctacgcaagctgctctcctatctggatgatcaagcctttatccgtgatgtggccaaagtcaaacaggaaaacaagcttaaattctctgcctacctggagaccgaatacaaagtccacatcaaccccaactccctcttcgacgtccaggtgaagaggattcatgagtataaacgccagcttctcaattgccttcacatcatcaccttgtataaccgcatcaaaagggagcccaataggttcatggtgccaaggactatcatgattggaggcaaggctgcacccgggtaccacatggctaagatgatcatcaagcttatcaccgccattggggatgtggtcaaccacgaccctgcggtgggagaccgcttccgagtgatcttcctggagaactaccgagtctcactggctgagaaagttattcccgctgctgacctctcagagcagatctccaccgcgggcactgaggcctcaggcactggcaacatgaagttcatgctcaacggggctctgaccatcggcaccatggatggtgccaacgtggagatggcagaggaggctggggaagataacttcttcatcttcggcatgcgggtggaggacgtggaaaggctggaccagagagggtacaatgcccaggaatactacgaccggattcctgagcttcggcagatcatcgaacagttaagcagtggcttcttctcccctaaacagcctgacctgttcaaggacatcgtcaacatggtcatgcaccatgaccggttcaaagtctttgcagattatgaggaatacattaaatgccaggacaaagtcagtgagttgtacaagaacccaagagagtggacacggatggtgatcaggaacatagccacctctggcaagttttccagtgaccgtaccattgcccagtatgcccgggagatctggggtcttgaaccttctcgtcagcgcctgccagccccagatgagaagatctgagcttccacaccagaccccatacctgcctttgagtctgtttgcaattcccggaatcaggcccactccaggggttgggcccctggaattacatctgggcccccccttttggaagcctcttttaccagtctctaggtcctgatgccagtgtgactaaagaccctgccctcttcttttccctcaactccctaccccctttatttatgtatggggtctaaccaatgcacccactcccccaataaatcgactctccatgaccttccttaaaaaaaaa

SEQ ID NO: 2949 - DNA, 643 bp, Rattus norvegicus
  Genbank Accession No. L11319
aaagggcagcggttcctcttggtgattgtatcgcgccctcttgctgctaattaccgcgttctccattcctccacatgctgtctctagactttctagatgatgtacggcgaatgaacaagaggcagctgtactaccaagtcctaaattttggaatgattgtctcctcggcactaatgatctggaaggggctgatgttgataaccggaagtgagagtccaattgtagtggtgctcagtggcagcatggagcctgcgtttcacagaggggatctccttttcctcacgaaccgagttgaagatcctatacgtgtgggggaaatcgttgttttcaggatagaaggaagagagattcccatagtgcatcgagtcttgaagatccatgaaaagcaagatgggcatatcaagtttttaaccaaaggagataataatgccgttgatgaccgaggcctctataaacaaggacaacactggctggagaagaaagatgttgtagggagagcaagagggtttgttccgtacattggaatcgtgacgatcctcatgaatgactatcctaaatttagttatgcagtactgtttctgctgggtttatttgtgctggtccatcgtgagtaagaagccggcctcgctggtcctgggaggct

SEQ ID NO: 2950 - DNA, 900 bp, Rattus norvegicus
  Genbank Accession No. L12380
gcggctgctaaggaccgagtctggtcgggcggcctgaggtctctggccagtatcgcttccacctgtccacaaacatggggaatatctttgcaaacctcttcaagggcctttttggcaaaaaagaaatgcgcattctcatggtgggcctggatgctgcagggaagacaacaattctatacaaactgaagctgggcgaaattgtgaccaccattcccaccattggtttcaacgtggagactgttgaatacaagaatatcagcttcaccgtgtgggatgtgggtggccaggacaagattcggccgctgtggcgccactacttccagaacacccaaggcttgatcttcgtagtggacagcaatgacagagagcgtgtgaacgaggcccgtgaagagcttatgaggatgctagctgaagatgagctccgagatgccgttctcttggtgtttgccaacaagcaggacctccccaatgccatgaatgcggccgaaatcacagacaagctggggctgcactctctacgccacaggaactggtacattcaggctacctgtgccaccagcggagacgggctctatgaaggactagattggctgtctaatcagctccggaaccagaagtgaaccagacccctccttccccctcacttcctcttctccgccctcagctttcctctcatgtggcaaacgtgcgactctgtggtcctgagtgccagaagctgtctccatgggttggtcacagtgtgcatcgcaccgtgctgtacatgtgcagacgcagcctgcagccaggtttttatttaatgtaaatagtttctgtttccactgaggcagtttctggtactcctatgcaatattacttagctttttttattgtaaaaagagaatcaactcactgtcagtacct

SEQ ID NO: 2951 - DNA, 123 bp, Rattus norvegicus
  Genbank Accession No. L13235
cagaagtttaaagtaatccttggctacctagtgagtgtaaggccagcctggaatcaataagagttggtttcaaagaagcaggaggagaaggaggaacaggaacaggaggaggagcagggggag

SEQ ID NO: 2952 - DNA, 126 bp, Rattus norvegicus
  Genbank Accession No. L14001
gagcccaagaggtgtctctgagagacgagggttcagagcaggggctcatttcaggaggaagagccatttgaagcctctttatacacatatgctaggatgtcaggatagctcttctcctccatctct

SEQ ID NO: 2953 - DNA, 209 bp, Rattus norvegicus
  Genbank Accession No. L14002
cagatactctcgacctcttacatttggagagttttgagcagacaggaagaagacggagcctgggagcagctgttctccaatagtcaaattaagactgttcctctctgagctctgtacttcaaccagcacctttaggcagaagccatcaaatcagaaatgtctgttaataattaaagtctatgattgccaccaaaaaaaaaaaaaaaaaa

SEQ ID NO: 2954 - DNA, 115 bp, Rattus norvegicus
  Genbank Accession No. L14003
aatcccaatattaagaggttaaaaaataggaccagaagtttaaagtaatccttggctacctagtgagtgtaaggccagcctggaatcaataagagttggtttcaaagaagcagga

SEQ ID NO: 2955 - DNA, 242 bp, Rattus norvegicus
  Genbank Accession No. L14004
tcctgtcactcatgtggacctcagataagagcacagatactctcgacctcttacatttggagagttttgagcagacaggaagaagacggagcctgggagcagctgttctccaatagtcaaattaagactgttcctctctgagctctgtacttcaaccagcacctttaggcagaagccatcaaatcagaaatgtctgttaataattaaagtctatgattgccaccaaaaaaaaaaaaaaaaaa

SEQ ID NO: 2956 - DNA, 2619 bp, Rattus norvegicus
  Genbank Accession No. L14684
ctgaccttcctcccggaagtgctcctgtggctggagttgccggcgtgactttgagcgcttcccgctctgctgccggcgctgagcacaacagagcacagcgacgaggaaccctggaagtggctgttccagacttgtcatgcggctgctgcggatcactgcaggcctggggcgtgggccgctccctcgggtccctgccatcctgggttggcaggggaagcaggctaattggaagacctaccgatggtgttcgtcaggatcaattcccaatgagaaaatccggaacattggaatctcggctcacattgattctgggaagacgacgttaacagaacgggtgctgtactacaccggcaggattgccacgatgcacgaggtgaaaggtaaagatggagtcggtgctgtcatggactccatggagctagagagacagcgagggatcactattcagtcagcagctacctacaccatgtggagagatgtcaatatcaacatcatagacactccaggccacgtggacttcacaatagaagtggaaagggccctgcgagtcctggatggtgcggtccttgtcctctgtgcagtcggtggagtgcagtgccagaccatgactgtcagtcgccagatgaagcgctacaacgttccctttttaaccttcattaacaaactggaccgaatgggctccaacccagccagggcccttcagcaaatgagatccaaactaaatcacaatgctgcatttgtgcaaatacccattggtttagagggggattttaagggaattatagacctcattgaagaacgagccatttactttgatggagactttggtcagattgttcgatatgatgagattccggctgatctgagggccgcagcagctgaccaccggccagagctaattgaatgtgtggctaattcagatgagcagcttggtgagctgtttctggaagaaaaaatcccctcagtgtctgatttaaagttagcgatccggagagctactctgagtagatcctttactcctgtgttcttgggaagtgctctgaagaacaagagagttcagcctctcctggatgctgttttagaattcctccccaatccatctgaagtccagaattacgctctactcaatcagaatgatttaaaagagaagaaaaaaatcctaatgaaccccaaaagagacgactcgcacccgtttgtaggcctggcttttaaattggaggcaggccgtttcggacagttaacttacgtccgcaattatcaaggcgaactgaagaagggaagcaccatctacaacacgaggacaggaaagaaagtgcgcgtgcagcggctggtgcgcatgcatgccgacatgatggaggatgttgaagaagtatatgccggagacatctgtgcgttgtttggcattgactgtgcaagtggagacacattcacaaacaaagacaacagtgacctttctatggaatcgattcatgttcctgatcctgtcatttcagtagcaatgaagccttctaacaagaatgatctggaaaaattttccaaaggtattgccaggtttacacgggaagacccaacatttaaagtccactttgacacagagagacaaggagacgattgtgtctggaatgggagaattgcacctgagatctatgctcagagaatggagagagaatatggctgtccttgtatcacaggaaagacccaaagtggacgtttagagaaaccgttactgcccctgtgccatttgattttacacataaaaagcagtcgggtggtgccggccagtatgggaaaagtgataggggtgctggagcccttggccccggaggacctaccgaagttggagttttccgatgagacctttggggccaatgttccaaagcagtttgttcccgccgttgagaaggggtttttggatgcctgcgaaaaagggcctctttctggtcacaagctttctgggctccggtttgttctgcaagatggagcacaccacatggtggattctaacgagatctctttcatccgagctggagaaggtgctcttaaacaagccttggccagtgccacattgtgtattattgaacctatcatgtccgtggaagtcatcgccccaaatgagtttcagggagcagtgtttgcaggaattaaccggcgccatggagtgattacagggcaagacggaattgaggactatttcacgctctacgctgatgttcccctaaataatatgtttggttattccactgagcttaggtcttgcacagagggaaaaggagagtacacaatggagtacaacagataccaaccatgttccccatccacacaagaagagctcgtcaataagtatttggaagctataggtcaacttcccgtaaaaaaaggaaaagccaagaactgactctcagtggtactttgaacgtactgacagtttgactacaagacgtaaggatgatggatgccggtagaatgaatttagacggctgaaacagatttaggagcccctgccatctcgtgttcaggagcttctatatacgtgcaagataactagataactatgtgtatttaaactgtatttttattatttagtaaaagatcttaaataaaattatattattggaattc

SEQ ID NO: 2957 - DNA, 1964 bp, Rattus norvegicus
  Genbank Accession No. L15619
ggctgccgcggcccggtcggctttctgcgctgtagcggtctctgccgttccttggaagcacagctccccttccccgccccagtcccagtccccgtccggccgcggacataaagatgagtagctctgaggaggtgtcctggatttcctggttctgtgggctccgtggtaatgaattcttctgtgaggtggatgaagactacatccaggacaaatttaatcttactggactcaatgagcaggtgcctcactatcgacaagccctagacatgatcttggacctggaacctgatgaagagctggaagacaaccccaaccagagtgacttgattgagcaggcggccgagatgctctatgggttgatccacgcccgctacatcctcaccaaccggggcattgcacaaatgttggaaaagtaccagcaaggagactttggctactgtcctcgagtatactgtgagaaccagccgatgcttcccatcggcctttcggacatcccaggagaggccatggtgaagctctactgccccaagtgcatggacgtgtacacacccaagtcctctaggcaccaccacacggatggcgcatacttcggcactggtttccctcacatgctcttcatggtgcatcccgagtaccggcccaagcggccggccaaccagtttgtgcccaggctctacggtttcaagatccatccaatggcctaccagctgcagctccaagccgccagcaacttcaagagcccagtcaagacgattcgctgagtgccctcccacctcctctgcctgtgacaccaccgtccctccgctgccaccctttcaggaagtctatggtttttagtttaaattaaaggaattgttactgtggtggggatatgaaataaaggaagagaaggctaaaaaaaaaaaaaaaaaccgaattcggcatctcacctaggtgtatacagctgcacattaccaatggctgcagaacacccaatcatgacctctagtgctttatagcaaaagtgtaaagtggtacctgggtgaccagcattgccatggttacatccatttgcgtaatcaagcagctgtgcaactgctcttctaacagatgaacagctgcatgcatctccagcaggcatggattgtctcttgtctatgatcctcagtgcgttcacttagagtatttctagagtttgagtccttgccgtgatagagccatgtagggaatgcactgattgcatgttaccccaagcgtcatgaaaccttccgacacggtgacctatttaatggtcttgtttgttgacatgacaaattaacattcttagagttacatctcgaaaaaagcatttgtgatagataagccctttgagccttgtggctaaatttttgtggctttgtttaactttcaaaggttatatatgcactaaccttttttgatggctaagtaggctttaaattacagtaaattttttcaaataaaactggctgtaaaatatattttgaattagagttgttcactttttcatagctacttatgtttttttcccaataatttatttcacatctctaccagtgaacgcagcccatcactagaaaatgaccttgtcctgatttcagtttcaactattagttttaaagctcactgttgaataagaggaagtggtggtgcattttaaattgactttcatgtgcttttaaaatatgacagatctccttgataatgtacttttatttgatctcaagttgtataaaaccaataaatttgtgttactttgattgcagtagtatcttatgcatagtgattccatgttatatgcagactagttaggcaactgttttcttagttacaagcttcacttttgtgcagttaaaaaaacaaaagtaggctacagtctgtgccatgttgatgtacagtttctgaaattgttttacaagactttgataataaaacccttaaactcacaaaaaaaaaaaaaaaaaacc

SEQ ID NO: 2958 - DNA, 3115 bp, Rattus norvegicus
  Genbank Accession No. L16995
gaattccggtccgcagcctaggggcggggcgcggacgacggagccatggattgcacatttgaagacatgcttcagctcatcaacaaccaagacagtgacttccctggcctatttgatgccccctatgctgggggtgagacaggagacacaggccccagcagccctggtgccagctctcctgagagcttctcttctcctgcttctctgggctcctctctggaagccttcctgggaggacccaaggtgacacctgcacccttgtcccctccaccatcggcacccactgctgtaaagatgtacccgtccgtgccccccttctcccctgggcctggaatcaaagaggagccagtgccactcaccatcctgcagcccccagcaccacagccatcgccagggaccctgttgcctccgagcttccctcctccacctgtgcagctcagccctgctcctgtgctggggtactcaagcctgccttccggcttctcaggaacccttcctgggaacacccagcagacgccatctagcctgccactgggctccacgccaggaatctcgcccacccccttacacacccaggtccagagctcggccgcccagcagccgccgccagcctcagcagcccctagaatgagcactgtggcctcacagatccagcaggtccccgttgtactgcagccacacttcatcaaggcagactcgctgctgctgacagctgtaaagacagacacaggagccacaatgaagaccgcaggcatcaacaccctggctcctgcgacagccgtgcaggcaggccccttgcagaccctggtgagtggagggaccatcctggccacagtcccactggtggtggacacagacaaactgcccatccaccgactagcagctggtggcaaggccctgggctcagctcagagccgtggtgagaagcgcacagcccacaatgccattgagaagcgctaccgttcctctatcaatgacaagattgtggagctcaaggacctggtggtgggcactgaggcaaagctgaataaatctgctgtcttgcgcaaggccatcgactacatccgcttcttacagcacagcaaccagaaactcaagcaggagaacctgaccctgcgaagtgctcacaaaagcaaatcactgaaagacctggtgtcagcttgtggcagtggaggaggcacagatgtgtctatggagggcatgaaacctgaagtggtagaaacgctgacccctccaccctcagacgccggctcaccctcccagagtagccccttgtccttgggcagcagaggcagcagcagtggtggcagtgactctgagcccgacagcccagcctttgaggataaccaggtgaaagcccagcggctgccttcacatagccgaggcatgctggacccgtcccgcctggccctgtgtgtactggtcttcctgtgtctgacctgcaacccattggcctcactgtttggctggggcatcctcactccctctgatgcttcgggtgtgcaccgtagttctgggcgcagcatgctggaggccgagagcagagatggctctaattggacccagtggttgctgccacccctagtctggctggccaatggactactagtgttggcctgcttggctcttctctttgtctacggggaacctgtgaccaggccacactccggcccggctgtacacttctggagacatcgcaaacaagctgacctggatttggcccggggagattttgcccaggccgctcaacagctgtggctggccttgcaagccctgggccggcccctgcccacctcaaacctggatctggcctgcagcctgctttggaacctcgtccgccacctgctgcagcgtctttgggtgggccgctggctggcaggccaggctgggggcctgcagagggactacaggctgagaaaggatgctcgtgccagtgcccgagatgcggctgtcgtctaccataagctgcaccagctgcatgccatgggcaagtacacaggaggccatcttgttgcttctaacctggcactgagtgcccttaacctggctgagtgtgcaggagatgctatatccatggcaacactggcagagatctacgtggcagctgccctaagggtcaaaaccagcctccccagagccttgcacttcttgacacgtttcttcctaagtagtgcccgccaggcctgcctggcacagagtggtgcagtgcctcttgccatgcagtggctctgccaccctgtaggtcaccgtttcttcgtggatggggactgggctgtacacggtgccccccaggagagtctgtacagcgtggctgggaacccagtggatccactggcccaggtgacccgactattctgtgaacatctcctggagcgagcattgaactgtatcgctcagcccagcccaggggcagctgatggacacagggagttctcagatgcccttggatatctacagttgctaaatagctgttctgacgctgtcggagctcctgcgtgcagcttctctgtcagttccagcatggctaccaccactggcacagacccagtggccaagtggtgggcctcactgacagccgtggtgatccactggctgaggcgggatgaggaggcagctgaacgcttatacccactggtagagcacattccccaagtgctgcaggaaactgagagacccttcccagggcagctctgtactccttcaaggctgcccgggctctgctggaccacagaaaggtggaatccagcccagccagcctggccatctgtgagaaggccagtgggtactgcgggacagcttagcctctacatcaactgccagttccattgacaaggccgatgcagctgctcctgtgtgatctacttcttgtggcccgcaccagcctatgcggcgccaacagtcagcagcttcagcccagggagctcacggtaccagcaatggaccccaggcctctgctctggagctgcgtggtttccaacatgacctgagcagcctgaggcgcttggcacagagcttcggcctgctatgaggagggtcttcctacatgaggccacagctcggctgatggcaggagcaagtcctgcccggacacaccagctcctggaccgcggaattc

SEQ ID NO: 2959 - DNA, 455 bp, Rattus norvegicus
  Genbank Accession No. L17077
gatctccttctcgctagagcctccttcacagcatggctgtcctggtgctgttgctctgcctggtgacatttccaacctgtgtcctgtcccaggtgcagttgaaggaatcaggacctggtctggtgcagccctcacagaccctgtccctcacctgcactgtctctgggttctcactaaccaacaacaatgtgaactgggtgcgacaggctacaggaagaggtctggagtggatgggaggagtctgggctggtggagccacagattacaattcagctctcaaatcccgactgaccatcactagggacacctccaagagccaggttttcttaaaaatgcacagtctgcaatctgaagacacagccacttactactgtgccagagacgggggctatagcagctctaccctctatgctatggatgcctggggtcaaggaacttcagtcactgtctcctca

SEQ ID NO: 2960 - DNA, 975 bp, Rattus norvegicus
  Genbank Accession No. L19927
cgagacattaccaggagactgaagtccatcaaaaacatccagaagattaccaagtctatgaagatggtggcagcagcgaagtacgcccgggctgagcgggagctgaagccagctcgagtgtatgggacaggctccttggctctgtatgagaaggctgagattaagggacctgaggacaagaagaagcacctcattattggtgtgtcctcggatcgaggcctttgtggtgctattcattcctccgtggctaaacaaatgaagaatgacatggctgccctcacagcagctgggaaagaagttatgattgttggaattggtgaaaaaatcaagagcatactttataggactcactctgatcagtttttggtgtccttcaaagacgtggggcggaagccccctacttttggagatgcatcggtcattgccttggagttgttaaattcgggatatgaatttgatgaaggctctattatctttaatcagttcaagtctgttatctcctacaagacagaagagaagcccatcttctctttcagtaccgtcgtggctgctgagaacatgagcatttatgatgacattgatgctgacgtgctgcagaattaccaggaatacaatctggccaacatcatctactactccctgaaggagtccaccaccagtgagcagagtgccaggatgaccgccatggacaacgccagcaagaacgcctctgatatgattgataaattgacgctgactttcaaccgcacccgccaggccgtcatcacgaaggagctgatagagatcatctccggggctgctgctctggattaatgagaatcaagttacatcctcagacaagaggtgaagaaggaaaaggcagctgattttaactgattgctgtccttgttagaagaaacttggtccactgagtcacaaagacagcaggatgtttgtaaattatcttacaataaacaacttacaatgagaaaaacg

SEQ ID NO: 2961 - DNA, 911 bp, Rattus norvegicus
  Genbank Accession No. L20823
atgcgggaccggctgccggacctcacggcgtgtaggaaaagcgacgatggagacaatgctgtcatcatcacggtggagaaggaccacttcatggatgccttcttccatcaggtggaggagattcgaagcagcatagccaggattgctcagcacgtggaggatgtgaagaagaaccacagcatcatcctctctgccccaaacccagaaggaaaaataaaagaagagctggaggacctgaacaaagagatcaagaaaactgctaacaggatccggggcaagctgaaggctattgagcagagttgtgatcaggacgagaatgggaaccgaacttcagtggatctgcggatacgaaggacccagcactcagtgctgtcacggaagtttgtggacgtcatgacagaatacaatgaagcacagatcctgtttcgggagcgaagcaaaggccgaatccagcgccagctagagatcactgggaggaccaccactgacgaggagctggaggagatgctggagagcgggaagccgtccatcttcatctcggacattatatcagattcacagattactaggcaagctctcaatgagatcgagtcacgccacaaagacatcatgaagctggagaccagcatccgagagctgcacgagatgttcatggatatggccatgtttgtcgagactcagggtgaaatggtcaacaacattgagagaaacgtggtgaactccgtagattacgtggagcacgccaaggaagagactaagaaagccatcaaataccagagcaaggccagacggaaaaagtggataattgctgctgtggtggtggctgtcattgctgtcctggctctaatcattggcttgacggttggcaaatgattgcgtagatggcgctgggtgcttgcctctccctcagg

SEQ ID NO: 2962 - DNA, 606 bp, Rattus norvegicus
  Genbank Accession No. L22190
tctagagtcgatctgcccagcagacaccagcaggatgaagctactcaccagcctggtcttctgctccctgctcctgggagtctgccatggagggtttttttcatttgttcacgaggctttcctaggggctggggacatgtggcgagcctacactgacatgaaggaagctggctggaaagatggagacaaatacttccatgctcgggggaactatgatgctgctcaaaggggtcccgggggagtctgggctgctgagaaaatcagtgatggaagagaggcctttcaggaattcttcggcagaggacacgaggacaccatggctgaccaggaagccaacagacatggccgcagtggcaaagaccccaattactacagacctcctggcctgcctcagaaatactgagcatcctcctattagttcagaaggctgtgttgggggcctgagggtggggtctgggcttcctatctaggaacactgaagatgctctctgggaatacatagtatacctctcatgtgtgtatcccacaagggtttcagaactgagttactcgagcagtagtaactgcttgaggaggagagggtaataaacaggaatttggaactgg

SEQ ID NO: 2963 - DNA, 3711 bp, Rattus norvegicus
  Genbank Accession No. L23413
gaagctgctgcacctggagcacccacccctctgtagaggggagttgatcagaggcccacataaccgtaattacttgtgagcctctgattatagtacaacttgctggattagctcaccggattagccgctcaggtaacactcatttgactggggaaacccatgactcagctatcttttgggtaaataatttaacagtgagcccagcggagtattctccacgggtcagcctcagaagtgcctctgtctgttaagagaagccagggtgattggaggatcagcccgccagcaagctgctgcccccagatattgcaaagcctacagagccggcctggtgtcccagattagccaaagagcctggtgtgacaggatggatgcttctcctgagcccccgcagaagggcgggacactggtactggtccgacggcagccccctgtgtcccagggcttgctggaaacactgaaggccaggctgaagaagagctgcacctgcagtatgccatgcgctcaggctctggtgcaaggtctgtttcctgtcatacgctggctgccccagtaccgccttaaggaatacctggcaggtgatgtcatgtcgggattggtcattggcattatcctggtgccacaggccatagcctactcactgctggctgggttgcagcccatctacagtctctacacttccttcttcgccaaccttatctacttcctcatgggtacctcccgccacgttaatgtgggcatcttcagcctgctgtgtctcatggtgggtcaggtggtggaccgagaactccagttggctggctttgacccctcccaggattctctagggcccgggaacaatgacagcaccctcaacaacacagccacactgacagttgggctacaggactgtgggcgggactgccatgccattcgtatcgccactgccctcactctgatggccgggctttatcaggtcctcatggggatcctccggctgggcttcgtgtctacctatctctcgcaacccctgctcgatggctttgctatgggagcttctgtgaccatcttgacttctcaggctaaacacctgctgggcgtgcggatccctcggcaccagggcctaggcatggtgatccacacttggctgagcttgctgcagaacgtgggacaggctaatctgtgtgatgtggtcaccagtgccgtgtgcctggcagtgctgctgacagctaaggaactctcggatcgctatcgacactatctgaaagtgccagtgcccacagagctattagttattgtggtggccacgattgcgtcccattttggacagctccatacacggtttggctcgagtgtggccggcaacattcccactggttttgtggccccacagataccagaccctaagataatgtggagtgtggccctggatgccatgtccctggccctcgtgggctcagccttctccatctccttggcagaaatgtttgcacgtagtcatggctactctgtcagtgccaaccaagagctgctagctgtgggctgttgcaacgtgctgcctgccttcttccactgttttgccactagtgctgctctgtccaaaactctggtgaagatagccactggctgccagacccagttgtccagtgtggtcagtgctgctgtggtgttgctggtgctgctggtgctggcgccattgtttcacgatctgcagcggtgtgtgttagcttgcatcattgtcgtcagcctgaggggggcgctgcgcaaggtgaaggatctcccacaactttggcggctaagccctgcggacgcactggtctgggtggctactgcagcgacctgtgttctagtcagcatcgaggctgggctgttagctggggtgttcttctcactgctcagcctggcaggccgcacgcagcgtccacgggctgcccttctggctcgaattggagactcgaccttctatgaggatgctgctgagtttgagggcctcctgcccccgcccgaggtgcgagtgttccgtttcacaggtccgctctactatgccaacaaggatttcttccttcggtcactctacagtctgacagggctggatgctgggtactcagccaccaggaaggatcggggcacagaggtgggtgtcagtaacagaagtcttgttgaccgcaaggatctgggttcagtgagcagtggggatgggctggttgtacccctggcatttggtttccacacagtggtcattgactgtgcaccactgctgttcctggatgtggctggcatggccacattgaaggacctgcgcaaaaactacagggccctggacatcaccctgcttctggcttgctgcagtccctcagtgagagacacactgagaaaagggggcttccttggggaagaccagggaactgcagaggagctgctgttccccagtgtacacagcgctgtggagacagcatgtgcccgccgtgaggagctgatggctgctgactctgccctctagcagggcccgcttcctcaagagccaagacctgtgtccacgagccagtcctgagctcttttgtaggagtgacatgaatgataaagtcattatagataaatccttggaccgcctttgccctggagaagccagggaactccaagtaggaaaggaaagtgcagtacccttaacacattggaggattccaaacattcagtgattgaggcgctctacctctgagcccactgctgccccctggtgcctattcaaccctagtagttgcacccacacacatgattccctcagccaacacagtgcccagtttgatagtctgtttatgttgtcatctgaaacagagtcctgcaaattatatgacctccatgatgccaaaaggacactttcccattccctgaaccatcgggtaccagatgtgagctggatatgtggccacacctcaagggtctgaatttccgaaaggcctccttaggcctggtgctcatcttgattggacccttgcaaaggcagccacctgctccagagtcacagtccagtgtcactgtctaaccgatgtgactgacataacctcaacctgactttcgggcacaatgtcccaatacagcttatactggtaaccacaacgtggcgtatgtatggtacaaagccaggcacagtagacacttaccccattctgctgtacttctaagaaaacctcaggaggaaaccacctgtgctccatccagggcctgcctttggcacagccaagcagacattcccctcctcctctgcccaacaggatgctctaactggaagcacaccccagccctgtgcactaccatgattctcccccacccacagcccagcattgtgttccacagctggccccaaaaacgtcagctccaccatctcggctctcttaaaacaagctctgaccagcaattcccagggtacccatttcagcgtcacccacctggctgtgatgaggtccagcagccagtgtatccggacctgctcaatgccactgtgaggcacagcacctatgtaggcaaggttcagttgctggtcccaactaaggtcgtactggtcagcctggtcgtgaggcagtggggggctagggataggacaaagaagtgaagtgtttgtcctaagcaggggcctgcatcataccagactttacacatgttatcacctgactacctagacccttgaggatgaactgtgtatctccagaatgtatgataaagtagcccactaaccag

SEQ ID NO: 2964 - DNA, 2015 bp, Rattus norvegicus
  Genbank Accession No. L24207
gcagagcatcagaggcccagctagagggacaacacagaggagtaatttgctgacagacctgcagggatggacctgctttcagctctcacactggaaacctgggtcctcctggcagtcgtcctggtgctcctctacggatttgggacccgcacacatggacttttcaagaaacaggggattcctgggcccaaacctctgcctttttttggcactgtgctgaattactatatgggtttatggaaattcgatgtggagtgccataaaaagtatggaaaaatatgggggttgtttgatggtcaaatgcctctgtttgccatcacggacacagaaatgatcaagaatgtgctagtgaaggaatgcttttctgtcttcacaaaccggcgggattttggcccagtggggattatggggaaagccatctctgtatctaaggatgaggagtggaagagatatagagccttactgtcacccacgttcaccagtggaagactcaaggagatgttccctgtcatcgaacagtatggagacattttggtaaaatacttgaggcaagagaaaggcaaacctgtccctgtgaaagaagtgtttggtgcctacagcatggatgtgatcaccagcacatcatttggagtgaatgttgattccctcaacaacccgaaggatccttttgtggagaaagccaagaagctcttaagaattgatttttttgatccgttgttcttgtcagtagtactctttccattcctcacgccagtatatgagatgttaaacatctgcatgttcccaaaagattcaatagaatttttcaaaaaatttgtgtacagaatgaaggaaacccgcctggattctgtgcagaagcatcgagtggattttcttcagctgatgatgaatgctcataatgattctaaagacaaagaatctcatacagccctatccgatatggagatcacagcccagtcaatcatttttatttttgctggatatgaacccaccagcagcacactttcctttgtcctgcattccctggccactcacccagatacacagaagaaactgcaggaggagatcgacagggctctgcccaataaggcacctcccacctatgatactgtgatggaaatggaatacctggatatggtgttgaatgaaaccctcagattgtatccaattggtaatagacttgagagagtctgtaaaaaagatgttgaaatcaatggtgtgtttatgcccaaagggtcagtggtcatgattccatcttatgctcttcaccgtgatccacagcactggccagagcctgaggaatttcgcccagaaaggttcagcaaggagaacaagggcagcattgatccttatgtatatctgccctttggaaatggacccaggaactgcattggcatgaggtttgctctcatgaatatgaaactcgctctcactaaagttctgcaaaacttctccttccagccttgtaaggaaacacagatacctctgaaattaagcagacaaggacttcttcaaccaacaaaacccattattctaaaggttgtgccacgggatgaaatcataactggatcatgattttccctcaaggagttctgctgaattcgtcagaaatgtggtgtctaagaacaccagaccctttaatttatgtcatgaataaaattcagatgaaattagggcttaatcgactttgttttgattcggtacatctttgatctttctcagtgtctacaatgtacccatctaatataaaggaaatgacaagtcagtgacagaacaggacttaacctttggtgattctcatgggactacctccatttgtttctggttgtctctgttaatttcttttgatagtaaccttgtctctgtaatttgatcaagaattttcatgaaaatgtgaactattgtgacacctttaattgtagatttggtatcagatgttttagatgcattattctacactaaatgttacatggaaaaaatgtgaataaacacttctttaaaaatccccaggggca

SEQ ID NO: 2965 - DNA, 1057 bp, Rattus norvegicus
  Genbank Accession No. L24374
cggcaacagacgattgttctcagagccactttgatggcagctatgaggctcaccctgttccgcattgtgtgtctgctgccaggctgcctggccctgccactgtcccaggaagccggagaagtgaccgcacttcagtgggaacaggcgcagaattatcttaggaaattttaccttcacgactctaaaacaaagaaggccaccagtgcagtggacaaactgagggaaatgcagaagttcttcggtttgccggagactggaaagctgtccccccgtgtcatggagataatgcagaagcccaggtgtggagtgccagatgttgcagaattctcactaatgccaaacagtcctaagtggcattccagaactgtcacctacagaatcgtgtcctatactacagacttgcctcggttcttagtagatcaaatcgtgaaaagagctctcagaatgtggagtatgcaaatcccactgaacttcaagagggttagttgggggactgcagacatcataattggcttcgcaaggggagatcacggagacaacttcccatttgatgggccaggaaacactctaggccatgcctttgcaccggggccaggcctcggcggagatgctcactttgacaaggatgagtactggacggatggtgaggactcaggagtgaacttcctgtttgttgccactcatgaacttggccactctctgggtctgggtcactcttctgttcccagttctgtgatgtaccctacctatcaaggagatcattcagaagacttcagtcttacaaaggacgacattgcaggcatccagaagttatatggaaagaggaacaagctgtgatagatgcagacagtttctggaatgagcaaacgcccttcctgagccacacttactcctttcttccttgtactgtggatgggttttgcacatccctctgagggtcattttgatggaatgagtctgacaaatctcaggtaacacgacagacaccagcaataaatgtcatgtgacatcagcaataaatgtcatgtgtgcaaataaaaaaaaaaaaaaaaaaccg

SEQ ID NO: 2966 - DNA, 1402 bp, Rattus norvegicus
  Genbank Accession No. L24907
gaattcggcacgagccaggccccagccgagcgccaacgctgaataggcaaactgaccaggagccctggctgtggctggggggcagtgggccatgccaggggcagtggaaggccccaggtggaagcaggcagaagacattagggatatttatgacttcagggatgttctgggcacgggtgccttctcagaagtgatcctggcagaggacaagaggactcagaaactggtggccatcaaatgcattgccaagaaggccctggagggcaaagaaggcagcatggagaatgagatcgccgtcttacacaagatcaagcaccccaacattgtagccctggatgacatctatgagagtgggggccacctctacctcatcatgcagctggtttcaggtggagagctgtttgaccgaattgtggagaaaggaggctacacagaacgggatcggagccgcctcatcttccaggtgctggatgctgtcaagtacctgcacgacctgggcattgtgcaccgggatctcaagccagagaacctgctatactacagtctggatgaagactccaaaatcatgatctctgactttggcctctccaagatggaggacccaggcagtgtgctctccacagcctgtgggactccaggatatgtggcccctgaggtcctggcccagaagccctacagcaaggccgtggactgctggtccataggagtcattgcctatatactgctctgtggctacccgccgttctatgatgaaaatgatgccaaactttttgaacagattttgaaggctgagtatgagtttgactctccttattgggacgacatctctgactctgccaaagatttcatacgtcatttgatggagaaagacccagagaagaggttcacctgtgagcaggccttgcagcacccctggattgcaggagacacagctctggataagaatatccaccagtcagtgagtgagcagatcaagaagaactttgccaagagcaagtggaagcaagctttcaatcgtaccgctgtggttcggcacatgaggaagctgcagctggggcaccagccaggagggacagggacagacagctagccacggagagctgctgacacccacagctggggggccagcagctggctgctgctgtcgagactgctgtgtggagccaggctcagaactccccctgcaccacccccaagctctagggccatggactgaacatcaaggagtcagggtttcgtccgtgaggggttggaggcagcctgcttcctcctcaccccagaactggggagtttctgaccccatacttcttccctcccctctcactcttcactgcattttccatacaaatgtttctattttattgttccttcttgtaataaagggaagctctgtgccgaattc

SEQ ID NO: 2967 - DNA, 2245 bp, Rattus norvegicus
  Genbank Accession No. L26267
agggagattctgaatccccctgagaaagaaacacaaggtgaggggcccagcctgttcatggccagcaccaagaccgaagcaattgccccggcatccaccatggaagacaaggaagaggatgtggggtttcaggataacctctttcttgagaaggcgctgcagctcgccaagcggcatgccaacgccctcttcgactacgcggttacgggagatgtgaagatgctgctggcggtacagcgccatctcaccgcggtgcaggatgagaacggggacagtgtcctacacttagccatcatccaccttcatgctcagctcgtgagggatctgctagaagtgacatctggttcgatctctgatgacatcatcaacatgagaaacgatctgtatcagacacctttgcacttggccgtgatcaccaagcaggaagatgtggtggaggacttgctgagggttggggctgacctgagtcttctggaccgctggggcaactctgtcctgcacctagctgccaaagaaggacatgataaaatcctcggggtcctactcaagaacagcaaggcagcactccttatcaaccaccccaacggggaaggtctgaatgccattcacatagctgtgatgagcaacagcctgtcatgtctgcagctgcttgtggctgctggggcagaagtcaacgctcaggagcagaagtctgggcgcacggcactgcacctggccgtggagtacgacaacatctcgttggccggctgcctgctcctggagggtgacgccctcgtggacagcaccacctacgatgggacgacacctctacacatagcggctggaagagggtccaccaggctggcagctcttctcaaagcagcaggagcagaccccctggtggagaactttgagcctctctatgacctggacgactcttgggagaaggctggagaagatgagggagtagtgccaggcaccacacccctggacatggctgccaactggcaggtatttgacatactaaatgggaaaccatatgagccagtgttcacatctgatgacatactcccacaaggggacattaagcagctgacagaagacacgaggctgcaactctgcaagctcttggaaattcctgatcccgacaagaactgggccactctggcgcagaagttaggtctggggatattgaacaatgccttccggctgagtcccgccccttctaaaactcttatggacaactatgaggtctctggggggaccatcaaagagctggtggaggccctgcgacagatgggctacacagaggccattgaagtgatccaggcagccttccgcaccccggaaaccacagcctccagccccgtgaccactgctcaggcccacttgctgcctctctcgtcctcctccacaagacagcacatagatgagctccgagataatgacagcgtgtgtgacagtggtgtggagacatccttccgcaaactcagcttctcggagtccctcactggagatggcccactgctatctctgaacaaaatgcctcacaattatgggcaggatggacctatagaaggcaaaatttagcctgctggcggttccccacactgtaaaccaaagccctgaaaggccatcatatcgttccgaaggagaaggcaaaaaacgcatcccaaggtgctggaaggtcaccggcctgcagggtcaatcttgatgtcattcgaggccttccgaatttggcttcctttcttggctctgaaatgaaatttagttgtcatatacagatggtgtctagcaatcacggctgcactcggtgtggcttggggtatggtggcttgagcttttccagctgctattggattacacttgctttgtgttgtcactgctgtccctctgctgggtccccgctgtcattaaggtatcgcagtccccacctggtgttctttctagccatctacagtacagtcatgcactcaaattaagattaaggaaaaagatatttttaagtgagtaacttcatgcgcaataaaaaaaagacatggctttttctaatgtggtttatctgtgatttaaaaaaaaaaaacacatgaacttaacaatatttaaaacctgctacaatcagtgctgaaaatagtattttcccccttttctgcattttactattgtaaatatgttttctaaatcaaatactttaaaagaagaaatgttggatttataaatgctattttttattttacttttataataaaagtacaagcacactgtt

SEQ ID NO: 2968 - DNA, 1464 bp, Rattus norvegicus
  Genbank Accession No. L26268
atgcatcccttctacactcgggccgccaccatgataggcgagatcgccgccgcggtgtccttcatctccaagttcctccgcaccaaggggctcacgagcgagcgacagctgcagactttcagccagagcctgcaggaactgctggcagagcattacaaacatcactggttcccagaaaagccgtgcaagggatcaggttaccgttgtattcgcatcaaccataagatggatcctctgattggacaggcagcccagcggattggactgagcagtcaagagttgttcaggcttctcccaagtgaactcacactctgggttgacccctacgaagtgtcctacaggattggagaggatggctccatctgtgtgctgtatgaagcctcaccagcgggaggtagctctcaaaacagcaccaacgtgcaaatggtagacagcagaatcagctgtaaggaggaacttctcttgggcagaacaagcccttccaaaaactacaatatgatgactgtatcaggttaagatatagtctatggatggatcatcttataatggatggatagatttgattttttgctttgggtgggctcctcttggggatggattatggaataaccatgtcacagctgtgaagatctggcacaagatagagtggtaataatttttttttttaaagtgacagtgccatagtttggacagtacctttaagtgatttaagtagcctgtgagtccaagtaaaggatcactttatttggtagggagtgaagtcgcagggtggtttcagtttctcccagaccttatacccaatttgtcacaccagtccctttaaggaaattctgtatttcaaagaaccctcttttgcagtcagtcaaccttgcaggggaatttgcactatttacacttgaaagttaccagtaacttttttttggcagctcaataggaaagctcaatgttctaagcatggtagtactggaaatattacacggagacttttacctagcacttaaaaatgtataaatgtacataaagacacttagtacgcatgacctgggggaaatggtcagaccttgtgtttttggctttgagagtagcaagtgaccggaatctgccatgacaacaggcttttaaaagacccttacaaagacactgtctcaactgtggttagcaccagccagctctctgtacattcgcttgtagttttctaagattgagtgagtaaacttcttatttttagaaagtggaggtctggtttgtaactttccttgtactcaattgggtaagagtctttttccacaaaccgccatctattttgtgaactttgttagtcatcttttatttggtaaattatgaactggtgtaaatttgtacagttcatgtatattgattgtggcaaagttgtacagatttctatattttggatgagaaatttttcttctctctataataaattgtttcttatcttggcatttt

SEQ ID NO: 2969 - DNA, 3185 bp, Rattus norvegicus
  Genbank Accession No. L27487
gaattcgcggccgctgctcttttcctggggtaagctatttgagaaagaaagtaacctaacactaagtgcaggcggggcggggtgatgtaacaggaagctgtgatgtttcccttctgctgctgatcgcttacaatctgacaacactccccatctacccagaacaagccctctcttcgcagcggtgcacttctgctttaggaccggcgggctctgttgcctggacctcacgctgcctgccaagaagctttttgactcttccacacctcttctccgggaactcttttctactatctcagaaaatcaaattccctcctgagactattcacacagaatttccttaggagccgtgggcgggccctatgatgatacaccaacatcttgtgctaccaactgtcaaaaactttggatggtctaacactcaggtcatgacccttgtaattaagaaattctcgaagacaatattgagcatgattcaggagaaaatgtgatttgagtctggagacaattgtgcatgtatatttttcttaagatcttaaaaagaaagagaaaacaaatccagggttgtcggtcactgattgatagaagagaaaacaatattcagacgattgcttatgattgacaagaggtcctgcggccgctacccagcttgaacatatcgcacacttcagttggactctaatgatggataaaaagtgtacactatgttttctgtttctcttgcttcttaatatggctctcatcgcagcagagtcggaagaaggcgcgaaccaaacagacttgggagtcactaggaacaagatcatgacggctcagtatgaatgttaccaaaagatcatgcaggatcccattcaacaaggagaaggcctttactgcaacagaacctgggacggatggctatgctggaatgacgttgcagcaggaaccgagtcaatgcagtactgccctgattactttcaagattttgatccttcagagaaggttacaaagatctgtgaccaagatggaaactggttcagacatccagatagtaacaggacatggacaaactacaccttgtgtaacaacagcacgcatgagaaagagaagacagcactgaatttgttctacctaactataattggacatggattatctattgcctctctgatcatctcactcatcatatttttttatttcaagagcctaagttgccaacggattacattgcataaaaacctgttcttttcatttgtttgtaattcgattgtgacaatcattcacctcacggcagtggccaataaccaggccttagtggccacaaatcctgtgagctgcaaggtgtcccagttcattcatctttacctgatgggctgtaactacttttggatgctctgtgaaggcatttacctgcacacactcattgtggtggctgtgtttgcagagaagcagcacttgatgtggtattattttcttggctgggggtttcctctgcttcctgcctgcatccatgccatcgccagaagcttgtattacaatgacaactgctggatcagctcagacactcatctcctctacatcatccatggtcccatttgtgctgctttactggtaaatctctttttcctattaaatattgtacgtgttctcatcaccaagttgaaagttacacaccaagcagaatccaatctctacatgaaagctgtaagagccactctcatcttggtaccactacttggcattgaatttgtgctttttccatggcggcctgaaggaaaggttgctgaggaggtgtatgactatgtcatgcacattctcatgcactatcagggtcttttggtgtctacaattttctgcttctttaacggagaggttcaagcaattctgagaagaaattggaaccagtataaaatccaatttggcaatggcttttcccactctgatgctctccgcagcgcatcctatacggtgtcaacaatcagcgatgtgcaggggtacagccacgactgccccactgaacacttaaatggaaaaagcatccaggatattgaaaatgttgccttaaaaccagaaaaaatgtatgatctagtgatgtgaaaatacagaaatctcacttgttttgtgtcacttgaacctatgattttatagtcggaagatttaatagcaaatgggtttcttgaataccatgaagaaagccctcaaatgaaatgagaattgtgtggataaatgtttaacaaccctctctctatgggggagaaaagcctcaatttttattgttggccagtaaatactcctaccatagctgatttcaagttaccaacctgacatcaccgaatgtggaattggaaagaaaataagcacaatcaactcttgggagctgacatgcgtcgtcaaacctgcacaacaccgcatgctctcacagatggacctgtgcacactcacacccgcactgaccagaactctgctcctctgtctgagaagatcttgctcagtcttacagacatgaaaggaaagtttggtttttgttataaaactcctcatcctttgtcatttgatggtagtgaacggtttgtccagaaacactttaaccctctttataacttctcctgtagacgagacagagtttgctatctctgtcacctcgtgttcctttctttaagaaaagcaactgagcagaattcccatgggcttctcagttgctgctacatatggttgtatcctgtggcatatccattctgaatcactagggagacgtattgatagaagctacaaacactttgtcagctacctttttgccctctaaatcttgctgcaggagtaggaggaaatcagtcttcctgaatctgtaaatagaaactttggcctttccatttctactgtgtagataagtgatcaaccattttatatgaagggaatcaatgaaggatttatttttatcttgggaatctgagagagagagagagagagagagagagagagagagagagagagagagagattgttgtacaaatgaaactgtaagtactctgtcattttattttattgtttcaaatcaaaacacaacctaagtaactgttttaaagcagatggataatgcaactttatatgcgactaggtgtctgatactgtgtctgggctgatttattttatagaaaaaatggagtactgaattctatatttggtaaatattttaaggcggccgcgaattc

SEQ ID NO: 2970 - DNA, 1910 bp, Rattus norvegicus
  Genbank Accession No. L27651
gtccaagggtccatgtggtaagcagactgaaccgtcctagataccaaagagggacaccttgtgggtgggtagcatgggcttcgaagacctgctggacaaggtgggcggctttgggcccttccaacttcggaatctggttctgatggccctgccccgaatgctgctccccatgcactttctcctgcccgtcttcatggccgctgtgcctgcccaccattgtgccctgcccggtgcccctgccaacctcagtcaccaggacttatggctggaagcccatctaccccgggagactgacggcagctttagctcctgcctccgatttgcctatccccagactgtccccaatgtcactttggggacagaggtgtccaactctggggagcctgagggtgagcccctcacggtgccctgctctcagggctgggagtacgaccgctcagaattctcctccaccattgcaactgagtgggatcttgtgtgtcagcagagaggactgaacaaaattacgtccacctgcttcttcattggtgtgctggtgggagccgtggtgtatggatacttgtctgacaggtttggcaggcgccggcttctgctggtggcctacgtgagctccctggtgctgggtctgatgtctgcagcctccatcaactacatcatgttcgtagtcacccgtacactcaccggctcagccctggctggcttcaccatcattgtgctcccactggagttggagtggctggatgtggagcaccgcactgtggccggggtcatcagcaccgtcttctggtcgggaggcgtgctgctgctggcactggtgggctacctgatccggagctggcgctggcttctgctggctgccaccctgccgtgtgtcccaggcatcatcagcatctggtgggttcctgagtctgcacggtggcttctaacccagggtcgtgtggaggaggcaaaaaaatacttgctgagctgtgccaagctcaatgggcggcccgtgggtgagggcagcctgagccaggaggccctgaacaacgtggtcaccatggaaagggcgttgcaaagaccctcatacttagacctgttccgaacatctcagctccgacatatctcactgtgctgcatgatggtgtggtttggagtgaacttttcctactacggcctgactctggacgtgtctgggctggggctgaacgtgtaccagacacagctgctgtttggggctgtggagctcccctccaaaattatggtctacttccttgtgcgccgtctgggacgccgtctcacggaggctgggatgctgctgggcgctgctctgacctttggcaccagcctgctggtatccttggagactaagtcatggatcactgctctggtggtggtggggaaagctttttctgaagctgcttttactacggcctacctgttcacgtccgagttgtaccctactgtgctcagacagacaggattgggacttactgcactcatgggcaggctaggggcctctctggcccgactggcggccttgctggatggagtgtggctgttgctgcccaaagttgcttacggggggattgccctggtggctgcctgcactgcactcctgctgcctgagacgaagaaggcacagctgccagagaccatccaggatgtggagaggaagagtacccaggaggaagatgtgtaggtccgggactgagttggactagcgacagttctccacaggagctgggcacagaaggcagcctcttgtgactgggacatcagactcctccacctaaggatggagctgctcctgatgccctctgcctgtgctctccagcagcagaacaacttcccgcagcactgggccgctgggattctggactcccctctcatggccgggggcttctataaataaagacggttgctcatgg

SEQ ID NO: 2971 - DNA, 6878 bp, Rattus norvegicus
  Genbank Accession No. L28801
gccggggctgctaactgaagaggccatggacgcgctcgagtcgttgttggacgaggtggccctggaggggctcgacggcctgtgcctgcccgcgctgtggagccgcctggaatcccgctcgcctgccttccctttgccgctggaaccctacacgcaggagtttctgtggcgggccttagtcacgcacccgggcatcagtttctacgaggagccgcgagagcgacctgacctgcagctccaagaccgatatgaagaaatcgacttggaaactggaattttggagtccaggagggacccagtcactctggaagatgtctaccccattcatatgatcttagagaataaggatggcatccagggctcctgccgatactttaaggagagaaaggacatcaccagtagcatcaggagcaagtgtttgcagcctcgttgtacaatggtagaagccttcagcaggtggggtaagaagctcatcattgtggcttcccaggacatgcgataccgggccttgataggcctagagggggatcctgatctgaagcttcctgatttctcctactgcattttggagcggttaggtcgatcgagatggcaaggggagctgcaacgagaccttcacaccaccgctttcaaggtcgacgctgggaagcttcattatcacaggaaaattttgaacaagaatgggctcattacaatgcagtcacacgtgatccgactgcctactggagcccagcaacactccatcctcctcctccttaaccggtttcatgtagacaggaggagcaagtacgacatcctcatggagaagctgtctatgatgctgagcacacggagcaaccagatcgagactctgggcaagctgagggaggagctgggactgtgtgaaaggacgttcaagcgtctgtaccagtacatgctgaatgctgggctggccaaagtggtgtcccttcccttgcaggagattcaccctgagtgtggtccctgtaagaccaagaaagggactgatgtcatggttcggtgccttaagctcctgaaggagttcaggcgaaagatggaagacgaccatgacgacgatgacgatgaagaggccatctccaaggctgtacctcccgtggacatcgtgtttgagcgggacatgctcacgcagacctacgagctcattgagcgcagaggaacgaaaggaatttcccaagctgagatccgagttgctatgaatgtgggaaaactggaagcaagaatgctgtgtcggctccttcagaggttcaaggttgtcaagggattcatggaagatgaaggccggcagaggaccaccaagtacatttcctgtgtatttgcggaggagagtgacttgagccgccaatatgcgcgtgaaaaggcccgaggagagctgctaaccactgtgagcctcgcctcagtgcaagatgaatccctcatgcctgagggtgaagaggccttcctctctgactccgaaagtgaggaagagagcagctgcagtggcaagcgtaggggccgagggtcccgggggcattcaagagcctctggggatgctgggcctggctctcggcctcatcactccactccagccaagggcgggtggaaagtcctaaatctgcacccattaaagaagcccaaaagtgccgctgtggaaagatcccgccgaagctctgcttgtagggatggcctggacaccagcagctcatccgagctcaatataccctttgaccctcacagcatggacagtcacagtggtgacatcgctgtgattgaggaggtccggcttgataaccccaaggagggtggtggctcccagaagggcggacggcatggctcaggccaggacaagcctcacaaaacataccgactgctaaagcgcagaaatctgattatagaagctgtcaccaacctccgcctgattgagagcctgttcacgattcagaagatgatcatggaccaggagaagcaagagggtgtctccaccaaatgctgtaagaagtccattatccgcttggtgcggaacctgtctgaggagggtctcttgagattgtataggactacagtcattcaagatggcatcaagaagaaggtagacctggtcgtgcacccttccatggaccagaatgaccctcttgtgagaagtgctattgagcaggttcgcttccggatctccaactcaagcacagcaaacagggttaaagttccaccggccccagcaccccaagaggaagcagaagagggaaaccaagaaccagaggtcccaagtagatcagcagactctgaagcgaacacatcctcgaagccagaaagcacacgggtgaaaaagacagatgagaaaatgggcataaccccactcaagaattacaaacctgtcatagttcctggacttgggcgctccatagggttccttcccaagatgccacgccttcgggtgatgcacctgttcctgtggtacctggtgtatgggcatcctgccagccacactggggaacagcctactttccacagtgagaggaaaacaggcaagcaggagcccagcagaccaggggtccagccctcctcaggagatgactgggactcctctgaagccaaaaacagcacagaaagcagctcctgggaggcagaaatggaactctccacagagagagtgtatgtggatgagatctcatggatgcgctacgtccctcccatccccatccacagagacttcggctttggctgggctcttgtcagtgacattcttctctgccttcccctctccatctttgtccaagttgttcaagtcagctacaaggtggataacctggaggattttctgaatgaccctctgaagaagcacacactgatccgcttcctccctaggcacatccggcagcagctactgtataagaggcggtatattttctcggtggtggagaacctgcaacggctgtgctacatggggctgctacagtttggacccacagagaagtttcaggataaagaccaggtctttgttttcctgaagaagaatgcagtcattgtggacaccaccatctgtgacccacattacaacctggcccacagcagccggccttttgagagacgtctctacgtcttggattccatgcaggatgtggaaagctactggtttgacctgcagtgtatctgcctaaacaccccactaggtgtggtgcgttgtccatgtgcacagaagatctgccctgatccgggcagtgacccagaaggcagcttgcggaaggagcaagagagcgccatggacaagcacaacctagagcgcaagtgtgccatgctggagtataccacggggagccgagaagttgtggatgaaggcttagtccctggggatggactgggagctgctgggctggactctagcttctatgcacacctgaagcgcaactgggtctggaccagctatatcatcaacaaagccagaaagaacaacacctccgaaaatgggctcacaggaagactccagactttcctgtctaagcgcccaatgccacttgggtctggaggcagtggccgtctgcctctctggtcagaggggaaagctgatgctgagctctgtgctgacaaagaggaacactttgaactggaccgagaacctacccctggcaggaaccgaaaagtgcgtgggggcaagagtcagaagcggaagcggctgaagaaggagcccatcaggaagaccaagcgaaggagaagaggagagcatccagaagccaaaagcaaaaaactacgctaccaagatgaggctgaccagaacgccctccggatgatgacccggcttcgggtttcttggtccatgcaggaggatgggttactaatgctctgccgaattgccagcaatgtcctcaacaccaaggtgaaaggaccatttgtcacctggcaggtcgtgcgtgacattttgcatgctacctttgaagagtctttggataaaacatctcactcggttggacgaagagctcgctacatagtcaaaaatccccaggcctttatgaactacaaagtctgcctggcagaagtgtaccaagataaggcactcgttggagatttcatgagtcggaaggataactacgaagacccaaaggtctgtgccaaggagtttaaagaatttgtggagaagctgaaagagaagttcagctctggcctgaggaaccccaaccttgagatcccagacacactgcaggaactctttgccaaataccgggtgttggcaatcggagatgaaaaggaccgtgtcaggaaggaggatgaactgaatagtgtggaggacatccacttcctggtgctacagaacctgatccagagcacactgtccctctctaacagccagtccaactcttgccagtccttccagatcttccgcctctaccgggagttccgggagcctgtgctggtgcgggccttcatggagtgccaaaagaggagcctggtcaaccgacgccgtgtcagccactcccagggtcccaagaagaaccgtgctgtgccctttgtgcccatgtcctaccagctctcccagtcatactacaagcttttcacctggcgatttcccaccaccgtctgcaccgaatccttccagttctatgacagactacgggccaacggcatactagaccagcctgatcatttttctttcaaggacatggatagcaatgacccttcaagtgacctggtggcgttttctttggacagccctggaggacactgtgtgacagccctggccctcttctccttgggcctcctctctgtggatgtccgaatcccagagcagattgtggtggtagacagctccatggtggagagtgaggtcatgaagagcttggggaaagatggcggcttggatgatgatgatgaggaggaagacctggatgaaggttcagggaccaagcgtcagagtgtggaagtaaaggcccatcaggcctcacacaccaagtacctgctgatgagaggttactacacagtgcctggcatggtcagcacgcgcaacctgaaccccaatgacagcattgtggtcaattcctgccaggttaaattccgactgcgcaatacccctgcacccacccatcttgggcccactgggcccacagccacaccgctagaagagctccaggctggcccttcctgcctccctgcctcctttaccagcctggtggatccacagctgcacacccgctgcccagaagagtttgcccaccagatggcacagtctgggtacagccctgaggacgtggctgcgtccctagagatcctgcaggctgtggcagctgctgactgcttcggggttgacagggagaagctgagcagacagttctctgccttggagaagatagcggacaagcgcaccaggacgttcctggactatatccaggacctcttggaacagcaacaagtcatggaagttggaggcaacactgtgcgcctagtggccatggcctctgcccagccctggctcctgccttcagtgcgtctgaaagatgtggaaatagacaccaaggcctcaggggatgacagccaatctagactccctgcggggtcttccatcgaagaccacacctctgagggtgcaccaattcctccagtcagctccaatggcactaaaaagcgcccctactgctctattcagagccctgaaactgatgctgaggaagctacaaggctccctgccaagaagcccacattacaagatgtctgtgtggctgccagtcctaggcctggaacagaagagcagacagaggcccaggctcagtttgcagctcctgaagatgcaggtgcagagggccccaggcaggagagccaagagagtgttggtgtctcaggcctagagcagctgggctgtgagttccagcttccagaaaattctgaagaccccagaggacttacagagagcaacatggcccaggtagcatgggagagcggctgtgaaagagtatgttttgtcggtcgcccatggcgtggtgtggacgggcgcctgaacatgcccgtgtgcaaaggcatgatggaagccgtgctgtaccacatcatgtcaaggcccggtgttcctgagagctgcctgctacagtactaccagggcgtcctacagcctgttgctgtgcttgagctgctccggggcttagagtctctcggctgtatccagaagcggatgctgaagaagccagcgagtgtctcactcttctccaggcctgtggtggagggcctaggtcaggccagtgaggccgaggcactctcctgtcaggggagcactgtcaccttttatgaacctactctggactgtaccatccgtctgggccgtgtcttcccccatgacatcaactggaaacaaagtggatccatttatagatgcgtcccaggccagcagaggagcctctgcccgtgcttaattgttccgcctggactgtcccaagagccccgtccttcacacagctgttaccagagctcggcccagcctagcacaggtgtagcaactagcaggtgacttcagtcccctctgctctcggctgctcttggtcccaggtgcccagccttcctgcagccctgtgtcctgccctggactcaggctctagcatcagcagtatctgcaagggatgttgtttagggagcaggctgatgaccaagccctgagtcacctcacacgcaccacaccattcagactcagaggaagacacatcacaggtgtacctggcagagtctgctcctcttaaggtagggcatcccaacttggcctgaactgagctcaggtctccagctcccaagggcccctcccgccagaagcaaggcctgtaggttttgcttttgtttttgttttattttgcgctcttttcactagatacaagcccctggcatgtatttatttattttttaattaaagtaagatgaaatgc

SEQ ID NO: 2972 - DNA, 560 bp, Rattus norvegicus
  Genbank Accession No. L35921
ggaggtggaggaggaggagggggggggggggaagagggggaggagaaggaggattcattattgcagggattggactcagagaaacagacccagggcatggagacaggtggtgcctaggaggaggaggcggtcctgaggggctgcaccccaggggagggggcggggctgggaatgggatctgcagaaccgccagccatcccagccctgagctgcaacagccatgtccaacaacatggccaagatcgctgaggcccgcaagacggtggagcaactgaagctggaggtgaacatcgatcgcatgaaggtgtcgcaggcggcagcggagctattggctttctgcgaaacgcacgctaaggatgacccactggtgactcctgtccctgccgccgagaatcccttccgcgacaaacgactcttttgcaccctgctctgagcccccaagatagttttatcctcccgcgcagaaatatgaatccaataaacttggtgacttggtggtgcctgccatttaggggaaaatgaggcacggggcaaaaacgtgggggccacctttgtgggga

SEQ ID NO: 2973 - DNA, 3974 bp, Rattus norvegicus
  Genbank Accession No. L38482
tcgactacccatattccccaccagccaaccggttcctcaccaagatgtggcacccaaacatctatgaggtaagacactagaggcctgcttcaggcacactccaccacacacttctctgcctcccttgcacatgctccacccctcctctaaccctggtcactcttgcagacaggggacgtatgcatctccatccaccatcccccagttgatgacccacagagtgggagctaccctcagagcggtggaaccccacgcagaatgtcaggtgagaattgccatggaactgcaccgtgggcacccgcaaacaccctgtaccctaagatccacccttccctgctccagtcaggggttcccagagtctggggagctgagcttgcacctacggccctacaggaccatcctcctgagtgtgatctccctgctgaatgagcccaacaccttctcgcctgccaacgtggacgcctcggtgatgtacagaaaatggaaggagagcaaggggaaggaccgcgagtacacggacatcatccggtgagtgcttcctactgtgaagagtgatctggggtgtgggtggggtggggacttgttgtatgtttccattttttgcatcccgggctggatgtgtggaggactctggggcccccagagcacggagttgaccacccagggtggccaagatcccctctgccttgttgttgacttaactccatgagcaactgggctctctgggccacaccctcactgtctgacagagagcatcaatcacttgcatttcgtgcttctgaaacttagagcttttttttttttttttgcaaagtgggaagggggctgagcccactgtgagtctgtcctcagttagggaccagggctgcgacctgttgctgtctatgagtggcagtgtccacacctatcatcgcttcttagcaggagctcctggcctgtctggggccaggcagtctcccctacacccctcacgttgggtatgaagttgcacttgaggggttcagtctttgtcgcttagcttctgtgttttctgagacaggctttcatataactccgtatctccttgtggtccctctgatgtcaggatgacaacacacattcctcggaagtgaccccagtgcttgtctacacagtgacccaaacacagggcctgtcctgtccccaagcctgccctctcagagttggtacaggccgcagctcggtaggcagtgctggtctagcatgtgcacacacacagggttagtctctgtcttaggcaaggtggatgtagccagcatggtccttcatggaggtataagttactcaggaaggtctgagcgctgcactacggaggtgtccccttcaccatggtcaggtcagcaacggtcccggtcactggaagtccctgcagactgtcccctttgttttctgttcagactggctgaacagaactttgttcctcctgctcttcctcagctgagaggaaggctggctgccctagctgttctatatagttctggctgtcctggaagaggagaccctgggtctggccctgtcactgcactctccaccctcctggcagcctttaatccacttctggctgcttcctccctggatccctggcccagagcaggagcccaggctatttttaccattctgactccaggagccacttgctctgaccaggaggcctgtaccactcctggaactcaacctgagccagtatctagtcatgtccctgcctgagcacaaggacaggatagctaggagcctgtgagaaggaccttgagatggatctaggctattgggtgtgctgctgtcccacgtgcccctccaccatagccttgtccccattcccctattccttctgggcagctgaaaacagtgtctgctctgcttgactgcactgggacctgtgccccaagactctggcctgacggtggcctggcctctcaggcacctagttaattgctgcctgccctgtgcaaggaagcccttacatgttgcttcacccatggcctgtgggacctggaacctcagttgttccggaactgcccttcatcatggtgccctcaggtcaggctgcaatttgttgttggtgtgaggaggtgcatgttacctagcccacaactagggtagtgccccccacagtctgggattacagctgtttctgtggtgctgggagctggacatgggtccttatgcttacagaaggagcactctggctgcccctgttgtcggttatagccgaggtcagcctgaatctcatagtagttctcctgcctccgcctccaaggactgggtgacagaccgtctcccacagctggctgtggttacatttctgctggagttggtcactgagccactccttgtcgcctggccctctcctcccacctgctccctgcccccattcatctcatcgtcctgggccgtggcctcacccgccctgtctccccaggaagcaggtcctggggaccaaggtggacgcagagcgcgatggcgtgaagtgcccaccacgctggccgagtactgcgtgaagaccaagcgccggcgcccgacgagggctcagacctcttctacgacgactactatgaggacggtgaagtggaggaggccgacagctgctttggggatgaagaggatgactctggcaccgaggagtcctgacccacgtccctgaaataaacttacaaattttacctcagcaggacccgtgtgggcctcaggcgacagactacctcaccgaggttcaatgtgggctcccatcccatgatccttaggtcctcttaccctgtattccccatgggttttcctcggctttggagaagagctgtggtgcagggcagacaccccactcagccttcagaggatgacaagcctgggaggctgggaaccgactgcccaggggagccagagactccagcccaaagagggccagccccacagtctcctctctgcttttggtgtgtgtgaaatccaaataaaatagctttctgagaagctgagagaagcagccaggacgccggtggcactgggtactgagggctacctgggtacccaggcagggctgtgggatgggcaggaagaggtagcgatggtggcctgtttgttggggctcagtagcatacaggagccccaggcccagaagaaacttgctgcctgcaaatcccacccgcctgcatcgggcactgtggttgcgtccaccccaagcctgtgttcaggaggcctgggtcctgaggcctacaggggattggtattcccaacagtccttgtgttctgggcacttcctcagccctggaaactagtgctgcctgaggagtccctctgatacctgagctgcagcctggtgactccacagcaggggcaggctgagtgaattctctgaccacaccatgctgtgcagggcacctgcagtgaccccgtgctgagatagcagatctgctctgccacctgcatgtttacgggtgctgtggaaagaaagtgtcacttcctcttatgcgggcctgttaatgtccaaagttccagtcaacccatgccagtcagaactgatcagagaaggacacatcggaaaaaggtgttcaggcgatcctctgcccatacaatttgctgccagcctgatctacagttgcaaaaccagcgggaaggctcagtgggcaaaggcctgcaccaagcctagcagaggacccacttggctccaggtggtccctgtgggggttgaggtcagttgagacaaatcccccccccccccccggagttcaccccagtgctaaaaggagcagtgtgccaggagagggagcatcgcttggctgtagttgctgcccccagacacagggcaactttgacagcagagttgctttctaaaaccacacagcagggtgtgaaggaggaggagctgacacgtgggtaaggtgggtggtgcttggaaggccacttgtctccaccggaagagaaagtgtggggccccttcccccagggaccaccagtcctgtgccagg

SEQ ID NO: 2974 - DNA, 1882 bp, Rattus norvegicus
  Genbank Accession No. L38615
tggagtttgagcttggcgagcagctggacaacgagcgagttgggatggccaccagctggggaagcatcttgcaggatgagaagcagctggaagagttggcacagcaggccatagaccgggccctggctgagggggtgttgctgaggtccgcaaagaaccccagctcctctgacgtggtgacgtatgccccattcacgctcttcccctcaccagtgcccagcactctgctggagcaggcctatgctgtgcagatggacttcaacatcctggtagatgctgtcagccagaactccgccttcctggagcaaacactgtctagcaccatcaaaaaggatgagtatactgcccgtctctttgatatctacaagcaagtcctgaaagagggcatagcccagactgtgttcctgggcctcaatcgttcagattacatgttccagtgcagcgcagacggctccaaagccctgaaacagattgagatcaacactatctctgccagctttgggggcctggcctcccggactccggctgtgcaccgacatgttctcaatgtcctgaataagaccaacgaagcttccaagatcctgtccaacaaccccagcaagggactggccctggggatcgccaaagcctgggagctctatggctcagccaatgccgtggtgctactgattgctcaggagaaggaaaggaacatatttgaccagcgtgccatagagaacgagctgctagacaggaagatccatgtaatccgccgaagatttgaagatgtctctgaaaggggttctctagaccaaaaccgaaggctgtttatggaggaccaggaagttgctgtggtttacttccgagatggctacatgcccagtcagtataacgcacagaactgggaagctcgcctgctgctagagagatcatgtgctgccaagtgtcccgacattgccacacagctggctggcactaagaaggtgcagcaggaactgagcagggtgggcctgctggaagcgctgctcccgggccagcccgaggctgtggcccgcctccgtgccacctttgctggcctctattcactggacatgggtgaagaaggggaccaggctgtcgctgaggcccttgctgcccctagccactttgtgctgaagccccaaagagagggcggaggtaataacttctatggggaggaaatggtacacgctctggagcagctgaaagacagcgaggagagagcctcctacatcctcatggagaagattgaacctgagccttttaggaattgcttactacggcctggcagccctgcccaagtggtccagtgcatctcggagctgggtatttttggagtctatgtcagacagggaacaacacttgtgatgaacaagcatgtggggcatctgcttcgaaccaaagccattgaacatgcagatggaggtgtggcagcaggagtggcagtcctggacaacccctaccctgtgtgaagacatgttctgggcttcactcaagagaccttctatcctctgtacttggcactcctctcctgaggggctacccctgtacctgtgttaggggagggagcttgtctctttcatagacctccaggggctttagggaagggaaaatcccgggtcccttctctcagccttccatccaaggaccagaaaagctatgattccattggaagagttctggagctccccagatttggagtgggaatggaagctcctttgaggcaaaggcccacaaaccccacacatcttcattgccctctcgccagcctttccagcaggttctagtgccttgacctggggtaggaccaagtgacaggaggaagagggtagatgggcatagacttccccagctctgccctaaataaaacaatgctgattcaatg

SEQ ID NO: 2975 - DNA, 2991 bp, Rattus norvegicus
  Genbank Accession No. L38644
tgcttcccacccgacccccaacccccatccccagttggagccgccgcccgagaggccgggccgtcgtcttgggaggagtccccgccgccgtcacctccgccatggagctcataaccatcctcgagaagaccgtgtctccggatcggctggagctggaagcggcgcagaagttccttgagcgtgcggctgtggagaatctgcccacgttcctggtggaactgtccagagtgctggcaaatcccggaaacagtcaggttgccagagttgcagctggtctacaaattagactcttgacatcgaaggatccagatatcaaggcacagtaccagcagaggtggcttgctattgatgctaatgctcggcgggaagtcaagaactatgttttgcagactttgggcacagagacttaccggcctagttcagcctcacagtgtgtggctggtatcgcttgtgcagagatcccagtaagccagtggccggaactaattcctcagctggtagccaatgtcaccaaccccaacagcacggagcacatgaaagagtccacactggaagccatcggttacatttgccaagatatagacccggagcagctgcaggataaatccaatgagatcctgactgccataatccagggcatgcggaaggaagagcctagtaacaatgtgaagctggccgctaccaacgcgctcctgaactcactggagttcaccaaagcaaacttcgacaaagagtctgaacggcactttatcatgcaagtggtctgtgaagccacacagtgtccagatacaagggtaagagtggctgctttacagaatctagtgaagataatgtccttgtattaccagtacatggagacatacatgggccctgccctctttgcaatcacaattgaagcaatgaaaagtgacattgatgaggtagctctccaagggatagagttctggtccaatgtctgtgatgaggaaatggatttggccattgaggcttcagaggcagcagaacaaggacggcccccggagcacaccagcaaattttacgccaagggagcgctgcagtacctggtgcccatcctcacacagacactaactaaacaggatgaaaacgatgacgacgatgactggaacccttgcaaagcagctggggtgtgcctcatgctcctgtctacctgctgtgaagatgacattgtgccacatgtccttccctttattaaagagcacatcaagaaccctgactggcggtaccgggatgcagcagtgatggcttttggcagcatcttggaaggaccagagcctaaccagcttaaaccattagtcatacaggctatgcccaccctgatagaattaatgaaagaccccagtgtagttgttcgagatacaacagcatggactgtgggcaggatctgtgagctgctgcctgaagctgccatcaatgatgtctacttggcaccccttttacagtgtctgattgagggtctcagtgctgaacccagagtggcttcaaatgtgtgctgggctttttccagtctggctgaagctgcttacgaagctgcagatgtagctgatgatcaggaagaaccagccacctattgcttgtcttcttcctttgaacttatagttcagaagctgctggagaccaccgacagacctgatggacaccagaacaacctgagaagttctgcatatgaatctctaatggaaattgtaaaaaacagtgccaaggattgttaccctgcggtgcagaagaccaccctggtcattatggaacggttgcagcaggtgcttcagatggagtcccacatccagagcacgtcggacaggatccaattcaatgacctccagtctctactctgtgcaactcttcagaatgttctctggaaagtgcagcatcaagatgctttgcagatctctgatgtggtcatggcctccctgttaaggatgttccaaagcacagctgggtctggcggagtgcaagaagacgccctgatggcagtcagcacactggtggaagtgttgggtggtgaattcctcaagtacatggaggcctttaaaccattcctgggcattggattgaaaaattatgctgaatgccaggtgtgtttggcagctgttggcttagttggagacttgtgccgagccctgcagtctaacatcttacctttctgtgatgaggtgatgcagctgctcctagagaacttagggaatgagaatgtccacaggtctgtgaaaccacagattctgtctgtgtttggtgacattactcttgccattggtggagaatttaagaaatacttggaggttgtactgaatacactgcagcaggcctcccaagcccaagtggacaagtcagactttgacatggtggattatctgaatgagctaagagaaagctgcttggaagcttatacgggaatcgtccagggattgaagggagaccaggaaaacgtacaccctgatgtaatgctggtgcaacccagagtagaatttattttgtcttttattgatcacattgctggagatgaggatcatacggatggagtggtagcttgtgctgctggactgataggggacttgtgtacagcatttggaaaggatgtactgaaattagtagaagctaggccaatgatccatgaactattaactgaagggcggagatcgaagactaacaaagcaaagacccttgctacgtgggcaacaaaggaactgaggaaactgaagaaccaagcttgatctggtaccattgggatgatgacctgagacccccactggaaatctccaatcttttgaaagaacccggaagtgaggagtgtgcacggatgctgaatgtttgggaatgagaggatgagtgagtgaggcttgaaaacaccacactgaaaatcctgccacagccaacagcagcagcgctgttagtgagctaagtaagcactgactttgtagaaaacacaacatcagccatcttggaacagagaaacaatggatttacttacttact

SEQ ID NO: 2976 - DNA, 1362 bp, Rattus norvegicus
  Genbank Accession No. L41254
ctcacctagctcgggtcatctccaggggcactgaaacacagaggcattacctactaagtcacacacctggtaagtggatgtgagggaactgagcccagccagtaggtactggatctgtgatctcattagtagaccagagctaagtacagtagatagtaaccgggacttcagaacggaacctttgacaacagctgccattatacagaaagaagggatagggctttttctaaaactcagctacacaagggctatcacatacaacttgtaaatggggcctggaggaggacctggaggaggagaagggggctatgtctcacacactaatagacctttctagcaggtacctgtgctctgagtagatctgaggctgcttggagcaggcagagttcctggctgtagacatggaggctggaactgcaccctccagacctgttgctaaattctgagataatgtgtgacccaacctggttcctctggggccagatcttttcaagagtcaggacccagacacctggttaggaaagcctagcttaggacaagacctctcactcctagggaggacagacatctcccctggagtgtttgattttacctttgtgagttcccacctctgagaaagagatgatagtatctttataaagctcttcacgaagcccaatgtggtcactacagggtgttctgaacacgtaactagaattaagcaatccacatacccaggtaattaatcactagtgccatctgtagatgttaaagcggaaagcaatccttttcttcagataagcgcttgcccatgtggaattcgcatacctaattttcacaccagttctgcctcctcctagtggcgtgagctgtggcaggtcacagatcccagacccacctctgctctgcagcccacccagcagcctgcagcctcgccctgggttgatatggagggaataacctgtgcctttctcctggtgctagcaggtctgcctgtcttggaagccaatggtccagttgataaaggcagtcccttctactacgactgggagagcctgcaactgggaggaatgatctttggggggctcctgtgcatcgctggaattgccatggccctgagtggcaagtgcaaatgtaggcgcaaccatacgcccagttccttacctgagaaagtcactccactcatcactccaggctctgccagtacctgacgaactgaacacaggaccaagtttggaggcagctttttgatgacttcctgctgtatctcccctctggagatcttcctctccaaaatggcttccctagagcacacttaagtcttcagtgacagggaagggtgttccaaagttgattttatattaaactggtcttgctgctctg

SEQ ID NO: 2977 - DNA, 776 bp, Rattus norvegicus
  Genbank Accession No. L46593
atgagttcccagcagcagaagcagccttgcactgtaccccctcagctgcaccagcacgaggtgaaacagccttgccagccaccaccccaggaaccttgtgctcccaaaactaaggagccctgtcaccctattcctgagccctgcaaccccaaggtgccagagccctgccagcctaaggtgccagagccttgtcaacctaaggtgccagagccttgccagcctaaggtgccagagccttgccagcctaaggtgccagagccttgccagcctaaggtgccagagccctgccagcctaaggtgccagagccctgccatcccaaggcacctgagccctgccaccctgttgttcccgagccctgccagcctgttgctcctgagccctgccagcctgttgttcctgagccctgccccccaactgtcactccatcaccataccagcagaagacaaagcagaagtaatattgtccatagccaagcctgaagatctgatcaccagatgctgaggctgctttccatcctgcttatgagtcccattgccttgtgctacacatgctgtgacctccagtcttaatcctccatccttgcaccacctggggggttgtctctcatcctcatcctcaagaagttctcgagccactcaacattacccaaagtctcatgaatggctaatctttggattcatctgaatgggggtggggaataagacaagtatatgttcaatattcttcccctctaaaaacaccttttaactcaaaaaaaaaaaaaaaaaaaaaaaa

SEQ ID NO: 2978 - DNA, 413 bp, Rattus norvegicus
  Genbank Accession No. L48209
gctgaggagcctgaccggcccggcccggcggcttatggtgccgcgggctcaggtccactcgaagccgccgcgggagcagctcggggtcctggatatcaccattgggctcacttcctgcttcgtgtgttgtcttctacctgcgggctgggtcctgtcacacctggaaagctacaagaagcgggagtgaagggagcgtcttccctcatcctttgactagaccactcttgccagcccaccttgatcatgtttcctgcattcctggctggcttaccctgggatcatgttattcaattccagtcacctcttctgcaatcatgacctctcgatgtctccatggtgacaactgggaccacatatattggttctgcttgatggggtccccctttgtaacaataaagtctatttaaaccttg

SEQ ID NO: 2979 - DNA, 889 bp, Rattus norvegicus
  Genbank Accession No. M00001
agactgttggagagctccgggggaggtcgccacatccttcaggatgaaagctgcagtgttggctgtggccctggtcttcctgacaggttgccaagcttgggagttctggcagcaagatgagccccagtcccaatgggacagggtgaaggatttcgccactgtgtatgtggatgcagtcaaggacagcggcagagactatgtgtcccagtttgaatcctccactttgggcaaacagctgaacctgaatctcctggacaactgggacactctgggttcaactgttggtcgcctacaggaacagctaggcccagtgactcaggagttctgggctaacctggagaaagaaacagattggctgagaaacgagatgaacaaggacctggagaatgtgaaacagaagatgcagccccacctggatgaattccaggagaagtggaacgaggaggtcgaggcctaccgccagaagctggagcctctgggcaccgagcttcacaaaaacgcgaaggagatgcaaaggcatctaaaggttgtggccgaggagtttcgagaccgcatgcgtgtgaatgcagacgcgctgcgcgcaaagtttgggctctacagcgatcagatgcgcgagaacctggcccagcgcctgaccgagatcaagaaccaccctaccctgatcgagtatcataccaaggccagcgaccacctgaagacacttggtgagaaagccaaacccgcgctggatgacctgggccagggcctgatgccggtgctggaagcctggaaggccaaaatcatgagtatgatcgatgaggccaaaaagaagctgaacgcttagtgaggcgcccgtcaccactccccacccctgaattggctttcttacaataaacgtttccaaagtggg

SEQ ID NO: 2980 - DNA, 764 bp, Rattus norvegicus
  Genbank Accession No. M10934
aaggagaacttcgacaaggctcgtttctctgggctctggtatgccatcgccaaaaaggatcccgagggtctctttttgcaagacaacatcatcgctgagttttctgtcgacgagaagggtcatatgagcgctacagccaagggacgagtccgtcttctgagcaactgggaagtgtgtgcagacatggtgggcactttcacagatacagaagatcctgccaagttcaagatgaagtactggggtgtagcctcctttctccagcgaggaaacgatgaccactggatcatcgatacggactacgacaccttcgctctgcagtattcctgccgcctgcagaatctggatggcacctgtgcagacagctactcctttgtgttttctcgtgaccccaatggcctgaccccggagacacggaggctggtgaggcagcgacaggaggagctgtgcctagagaggcagtacagatggatcgagcacaatggttactgtcaaagcagaccctcaagaaacagtttgtagcaacgtcaaggatgtataaagttggaaaacttctgattagctctcatccagtcttcatctctatttatcttagaagtttagtttccccacctcccctcccttctctaggtggacattaaaaccatcgtccaaatacatgggaatgcctgaatccattcacacaaacgtgtatcttactgagaagttccccgagagacgtttgaggcttgggattccaaacttgatttattaaacgtatagtcacc

SEQ ID NO: 2981 - DNA, 682 bp, Rattus norvegicus
  Genbank Accession No. M11251
caaacataatcacatgtacccaggacacaaagaacatacagagaagcctccataatttaagattatacatgtaaatacaccctagacatgcaagaatagaccacccagtgcatctagactcagacaaagaaatatacatctgtacgtttatatcagaaatgatctttcacatagaaaaagcatatagcgtgcacgcacacacacaatcccatgccctagtaagtaaacagagctgacaaaactgagctgacaagtgcacacccatccccataaaacaagaggcctaagtcccagtgcccttttgtcctgtgtatctgtttcgtggtgtccttgccaacatgtatggtgtgggtaagggaatgaggagtgaatagctaaagcaggaggcgtgaacatctgaagttgcataactgagtggaggggcggattcagcataaaagatcctgctggagagcatgcactgaagtctaccgtggttacaccaggaccatggagcccagtatcttgctcctccttgctctccttgtgggcttcttgttactcttagtcaggggacacccaaagtcccgtggcaacttcccaccaggacctcgtccccttcccctcttggggaacctcctgcagttggacagagggggcctcctcaattccttcatgcaggtgagacattcacagggcctgg

SEQ ID NO: 2982 - DNA, 610 bp, Rattus norvegicus
  Genbank Accession No. M11851
ctccttgaattcttcagaggcagcagccagcctcagacaccatgtcaccaaagaaagccaagaagaggttagagggcggaagctccaacgtgttctccatgtttgagcagacccagatccaggagttcaaggaggccttcacaatcatggaccagaacagagccggcttcattgacaagaatgacctaagggacacgtttgctgccctcggacgagtgaacgtgaaaaacgaagagatcgatgagatgatcaaagaggctccaggtccaattaacttcactgtgttcctcaccatgtttagggagaaacttaaaggagctggcccggaggagacccttctcaacgccttcaaggtgtttgccccaaggcgaaggattactggagccgactgtgtccaagagatgctaaccacgcaagcagagaggttctccaaagaagagaccgaccagatgttcgcagcttttccccctaacgtcaccggcaaccttgattataagaatttggttcacatcatcacccacggagaagagaaggactgagccctgaaccgcggcctcgggtgacctatagcctgttctccatccccaggccctgctgtcccacctgcggg

SEQ ID NO: 2983 - DNA, 377 bp, Rattus norvegicus
  Genbank Accession No. M12112
ccatggagacaaggccagcgtcagagagctatcctgggcaaaaatcagtgccttcacccctggcttcccgtcactccttccagcaaggcagaggccgtctccttggagatggcgctaactgagaataaatgatgagcagcagcctcctggggtgtgggtttgtttggacactggggtgagagccaggagctggcactctgtataggaggactgccatcctggaaaaaaaaaatggaccaaacaactgtttgtgaaataaaaaaaaaaaaattccctttttatttgagaacacaaagtgggttttaacattaaaatgcacactgtccccttgttttgggtttgcaattagctgagtgtgagaccacgacctccgagtc

SEQ ID NO: 2984 - DNA, 1620 bp, Rattus norvegicus
  Genbank Accession No. M12450
gcaaaatgaagagggttctggttctcctgctggccttagcctttgggcatgccctagagagaggccgagattatgagaaggataaagtttgccaggaactctccacgctggggaaagatgacttcagatctctatcactaatcctatacagcaggaagtttcccagtagcacctttgaacaggtcagtcagcttgtgaaggaagttgtctccttaactgaggaatgctgtgctgagggagcagatcccaactgctatgacaccaggacttcagagctgtctattaagtcctgtgaaagtgacgccccctttcccgttcaccccgggacttccgagtgttgcacgaaggaggggctagagcggaaactctgcatggctgccctcagtcaccagccacaggaatttcccgcctatgtggagccgacgaatgatgagatctgtgaggcgttcaggaaggatccaaagggatttgccgatcagtttctattcgaatattccagcaattacggacaagctcctctgccacctttagttggttacaccaagagttatctctctatggttggctcctgctgtacttctgcaaaaccaactgtgtgctttttgaaggagagactccagatgaaacagttactacttctcaccactatgtcaaacagagtctgctcacaatatgctgcatatggaaaggaaaaatcaaggatgagccatctcataaaactagcccaaaaagtaccaactgctaacctggaggatgttctgccactcgctgaagaccttactgaaatcctgtccagatgttgtaagtctacctcagaggactgcatggccagagagctgcctgaacacacattaaaaatctgtggaaacttatccaaaaagaattcaaagtttgaagagtgctgttacgaaacaacacccatgggcatttttatgtgtagctacttcatgccaactgctgaaccacttcaattgccagccatcaagctgccaaccagcaaagacctctgtggtcagagtgccacacaagccatggaccagtatacatttgaactaagcagaaggacccaggttccagaagtgttcctcagcaaagttctggatacgaccctgaaaacccttagggaatgctgcgacactcaggactctgtctcctgtttcagcactcagagtcccctgatgaagaggcaactaacttctttcattgaaaaggggcaagaaatgtgtgcagattattccgagaacacatttactgagtacaagaaaaaattggcggaacgactgaggacaaaaatgcccaatgcctccccggaagagctggcagacatggtggccaagcactcagactttgcctccaagtgctgctccataaactctcctccacgctactgtagctcacagattgatgcagaaatgagagacatcctgcagtcctgatgcagggtatatgcaatgccttggacctagaactggaccactctggaaaaattgccagataacaaaatcaagcaaataccacagagatggccttccaggaggaccaccaggataattccatttttcccatctacaatgttttttgatgaattataaaaataaattgaaatatggtgcaaactct

SEQ ID NO: 2985 - DNA, 2169 bp, Rattus norvegicus
  Genbank Accession No. M13011
ggatccggaattcggccactggcttgcttgcctactcagtgctggagagagcccttgggttaggcatctattagcagtctcaagtggctagggctggctaagtgtgattctcattggcaggtggggcaggagctcctggtttggcaacccctgtagaagcgatgacagaatacaagcttgtggtggtgggcgctggaggcgtgggaaagagtgccctgaccatccagctgatccagaaccattttgtggacgagtatgatcccactatagaggtgagctctgactacctgccagaggtgggctctggcagtggtcatgggttagagtcccaaacaactaggtcttgaagttggtatgggcctgattcctacctgatcctgatccatcagggtatgagaggtgcaagggtaggcggattctctgtctaagaagaggtaggacccttaagctgtgttcttttgcaggactcctaccggaaacaggtagtcattgatggggagacgtgtttactggacatcttagacacagcaggtcaagaagagtatagtgccatgcgggaccagtacatgcgcacaggggagggcttcctctgtgtatttgccatcaacaacaccaagtcctttgaagacatccatcagtacaggtgaccacctatggctagcccgtggcccatggcatatgtgaggaaggttctgtgtgcacactgaggctttatgtctttttttgaatgtcatggacacgtcaggcctgcagtctgctagctggctcatatacaaccccatccccctccagggagcagatcaagcgggtgaaagattcagatgatgtgccaatggtgctggtgggcaacaagtgtgacctggctgctcgcactgttgagtctcggcaggcccaggaccttgctcgcagctatggcatcccctacattgaaacatcagccaagacccggcaggtgtgagcttgttcccctctccacaagctagtcagggattcaccataccccaccccagccggagcgagctcatcgccctctccctcaacacagggcagccgctctggctctggctccagctctggaccctctgggacccccccgggacccatgtgacccatgtgacccagcggccctcatgctgtaagtcttccgcaggccgcaggctggagggaggcaagggccagggtctgggcttatgccaaagttctgggttgacacatagctccagggcaggatggggtccatggagagagctgccctgagcaggccggagcggtgacccaggggcctagttcttcttgtctccagtgtcctatggagatttgctattttaagcccttaagtgttgttaggttgttaaccttgagacatactgggggtctgggagagtctgagctaagtggctctgatttttcagtggtatttaggagtgaacctacttaaagagagtggcctgtactttttagatggccagagcccagctccctattattttggttttgcagctgaggaagggagcctccagcatggggtgttacctgatccagtcagggagtttcttacccagagagcagagcacccctttcctcctcagagtcctctctgatccagtccctctgtccccagggtgtggaggatgccttctacacactagtacgtgagattcggcagcataaactgcggaaactgaacccgcctgatgagagtggccttggctgcatgagctgcaagtgtgtgctgtcctgacactaggtgaggcagggaccagcaagacatctggggcagtggcctcagctagccagatgaacttcatatccactttgatgtccctgctcccccaattctgccaatccccctgcctgcaggcatcagtcatgtcctttgtgcccgtcccgcaggctcaaggacgaggaggtgccggatgcagggaggaggaggtgctgtcggaaggaaggaaagaggagggaaggaaggaaacgatgctggagccagttcaaggatggtggacagatgtgccaagccttcgcatggacaatttgaacagactgtcatgaactatcccgttgccacgccacccaagtcctccgccccctctcagctcccttgggcgcctatgagggcacatgttgaatcacagtaaattatttgatggacttgacttgtctctgggctgg

SEQ ID NO: 2986 - DNA, 8048 bp, Rattus norvegicus
  Genbank Accession No. M13100
  misc_feature (1)..(8048): n = a or c or g or t
gaattcggcccaggataaacagatatataggtaaatgactggatagatacatggatttgatctctaactcaacttaggcaccatagaaaacaatccttgaattattttaataattttaaatcctagtttactgagaaacacgttgacgaggcagggcttcagcctctctgaagcagcactgcccctctgtggccacacaggaagtcttcactcagcagtttcctgacttaaggcctaggcctgaggaaatgcattgaatatttctctgggggacaatagttctgagaaggaaagagagtttgtctatgttgaggtcagttaaggatggttttctttccttccctcccagccttttctccatgcaacatcatgagtccccatctttctatcctgcctaaaaccacttccttctgggaaatgagaaaatccactcatacaaaatggaaacatcccgaggatcccggcccgcagcagctctctgcccccagaccctgtgagagagagacccaaccgcctggtcaggtgggcactcctgaggctgcagagggaagagaccaccaacactgctcacccctgcccacatccctggcccaagaggaaactgtataaggcctctgggtcctgtgggggagggcccaggagcggcaggacccctgtgcctgagagaccaccaccagaaccagaaggaaacagaccggataaacagttctctgcaccaaatcccgtggagggagagctgaaccttcagagagaaagacaagcctgggaaaccagaagagactgctctctgcacacacatctcggacgccagaggaaaaagccaaagaccatctggaaccctggtgcactgaagctcccggaaatggtgcacaggtcttcctggttgctgccgctgcagagagcccgtggtagcaccccacgagcgaacttgagcctcaggaccacaggtaagaccaacttttctgctgcaagaaagctgcctggtgaactcaagacacaggcccacaggaacagctgaagacctgtagagaggaaaaaccacacgccggaaagcagaacactctgtccccataactgactgaaagagaggaaaacaggtctacagcactcctgacacacaggcttataggacagtctagccactgtcagaaatagcagaacaaagtaacactagagataatctgatggcgaaaggcaagcgcaggaacccaagcaacagaaaccaagactacatggcaccatcggagcccaattctcccatcaaaacaaacatggaatatccaaacacaccagaaaagcaagatctagttccaaaatcatttttgatcatgatgctggaggacttcaagaaagacgtgaagaactccttagagaacaagtagaagcctacagagaggaatcgcaaaaatgcctgaaagaatcgcaaaaatccctgaaagaattccaagaaaacataaataaacaagtagaagcccatagagaggagacacaaaaatccctgaaagaattccaggaaaacataaataaacaagtagaagcccatagagaggagacacaaaaatccctgaaagaattccaggaaaacataaataaacaagtagaagcccatagagaggagacacaaaaatccctgaaaggaattccaggaaaacacaatcaaacagttgaaggaattaaaaatggaaatagaagcaatcaaaaaagaacacatggaaacaaccctggatatagaaaaccaaaagaagagacaaggagctgtagataaaagcttcaccaacagaatacaagagatggaagagagaatctcaggagcagaagattccatagaaatcattgactcaactgtcaaagataatgtaaagcggaaaaagctactggtccaaaacatacaggaaatccaggactcaatgagaagatcaaacctaaggataataggtatagaagagagtgaagactcccagctcaaaggaccagtaaatatcttcaacaaaaccatagaagaaancttccctaacctaaaaaaagagatacccatagacacacaagaagcctacagaactccaaatagattggaccagaaaagaaacacctcccgtcacataattgtcaaaacaccaaacgcacaaaataaagaaagaatattaaaaacagtaagggaaaaaggtcaagtaacatataaagggagacctatcagaatcacaccagacttctcgccagaaactatgaaggccagaagatcctggactgatgttatacagaccctaagagaacacaaatgccagcccaggttactgtatccagcaaaactctcaattaacattgatggagaaaccaagacattccatgacaaaaccaaatttacacaatatctttccacaaatccagcactacaaaggataataaatggtaaagcccaacataaggaggcaagctataccctagaagaagcaagaaactaatcgtcttggcaacaaaacaaagagaatgaaagcacacaaacataacctcacatccaaatatgaatataacgggaagcaataatcactattccttaatatctctcaacatcaatggcctcaactccccaataaaaagtcatagattaacaaactggatacacaacgaggaccctgcattctgctgcctacaggaaacacacctcagagacaaagacagacactacctcagagtgaaaggctggaaaacaaatttccaagcaaatggtcagaagaagcaagctggagtagccattctaatatcaaataaaatcaatttccaactaaaagtcatcaaaaaagataaggaaggacacttcatattcatcaaaggaaaaatccaccaagatgaactctcaatcctaaatatctatgccccaaatacaagggcacctacatacgtaaaagaaaccttactaaagctcaaagcacacattgcacctcacacaataatagtgggagatttcaacacaccactctcatcaatggacagatcatggaaacagaaattaaacagtgatgtcgacagcataagagaagtcatgagccaaatggacttaacggatatttttagaacattctatcctaaagcaaaaggatataccttcttctcagctcctcatggcactttctccaaaattgaccatataattggtcaaaaaacgggcctcaacaggtacagaaagatagaaataatcccatgcgtgctatcggaccaccacggcctaaaactggtcttcaataacaataagggaagaatgcccacatatacctggaaattgaacaatgctctactcaatgataacctggtcaaggaagaaataaagaaagaaattaaaaactttttagaatttaatgaaaatgaaggtacaacatacccaaacttatgggacacaatgaaagctgtgctaagaggaaaactcatagcgctgagtgcctgcaaaaagaaacaggaaagagcatatgtcagcagcttgacagcacacctaaaagctctagaacaaaaangaagcaaatacactgaggaggagtagaaggcaggaaataatcaaactcagagctgaaatcaaccaagtagaaacaaaaaggaccatagaaagaatcaacagaaccaaaagctggttctttgagaaaatcaacaagatagataaacccttagccagactaacgagaggacacagagagtgtgtccaaattaacaaaatcagaaatgaaaagggagacataactacagattcagaggaaattcaaaaaatcatcagatcttactataaaaacctatattcaataaaacttgaaaatcttcaggaaatggacaatttcctagacagataccacgtatcgaagttaaatcaggaacagataaaccagttaaacaaccccataactcctaaggaaatagaagcagtcattaaaggtctcccaaccaaaaagagtccaggtccagacgggtttagtgcagaattctatcaaaccttcatagaagacctcataccaatattatccaaactattccacaaaattgaaacagatggagcactaccgaattccttctacgaagccacaattactcttatacctaaaccacacaaagacacaacaaagaaagagaacttcagaccaatttcccttatgaatatcgatgcaaaaatactcaataaaattctggcaaacgaattcaagagcacatcaaaacaatcatccaccatgatcaagtaggcttcatcccaggcatgcagggatggtttaatatacggaaaaccatcaacgtgatccattatataaacaaactgaaagaacagaaccacatgatcatttcattagatgctgagaaagcatttgacaaaattcaacacccttcatgataagagtcccggaaagaataggaattcaaggcccatacctaaacatagtaaaagccatatacagcaaaccagttgctaacattaaactaaatggagagaaacttgaagcaatcccactaaaatcagggactagacaaggctgcccactctctccctacttattcaatatagttcttgaagttctagccagaccaatcagacaacaaaaggagatcaaggggatacagatcggaaaagaagaagtcaaaatatcactatttgcagatgacatgatagtatatttaagtgatcccaaaagttccaccagagaacgactaaagctgataaacaacttcagcaaagtggctgggtataaaattaactcaaataaatcagttgccttcctctatacaaaagagaaacaagccgagaaagaaattagggaaacgacacccttcataatagacccaaataatataaagtacctcggtgtgactttaaccaagcaagtaaaagatctgtacaataagaacttcaagacactgaggaaagaaattgaagaagacctcagaagatggaaagatctcccatgctcatggattggcaggattaatatagtaaaaatggccattttacccaaagcaatctacagattcaatgcaatccccatcaaaataccaatccaattcttcaaagagttagacagaacaatttgcaaattcatctggaataacaaaaaacccaggatagctaaagctatcctcaacaataaaaggacttcagggggaatcactatccctgaactcaagcagtattacagagcaatagtgataaaaactgcatggtgattggtacagagacagacagatagaccaatggaatagaactgaagacccagaaatgaacccacacacctatggtcacttgatttttgacaaaggagccaaaaccatccaatggaaaaaagatagcattttcagcaaatggtgctggttcaactggagggcaacatgtagaagaatgcagatcgatccatccttatcaccctgtacaaagcttaagtccaagtggatcaaggacctccacatcaaaccagacacactcaaactaatagaagaaaaactagggaagcatctggaacacatgagcactggaaaaaatttcctgaacaaaacaccaatggcttatgctctaagatcaagaatcgacaaatgggatctcataaaactgcaaagcttctgtaaggcaaaggacactgtggttaggacaaaacggcaaccaacagattgggaaaagatctttaccaatcctacaacagatagaggccttatatccaaaatatacaaagaactcaagaagttagaccgcaggaaacaaataaccctattaaaaatggggttcagagctaaacaaaaattcacagctgaggaatgccgaatggctgagaaacacctaaagaaatgttcaacatctttagtcataagggaaatgcaaatcaaaacaaccctgagatttcacctcacagtagtgagaatggctaagatcaaaaactcaggtgacagcagatgctggcgaggatgtggagaaagaggaacactcctccattgttggtgggattgcagactggtaaaaccattctggaaatcagtctggaggttcctcagaaaattggacattgaactgcctgaggatccagctatacctctcttgggcatatacccaaaagatgcctcaacatataaaagagacacgtgctccactatgttcattgccgccatatttataatagccagaaactggaaagaacccagatgcccttcaacagaggaatggatacagaaaatgtggtacatctacacaatggaatattactcagctatcaaaaacaacgagtttatgaaattcgtaggcaaatggttggaactggaaaatatcatcctgagtgagctaacccactcacagaaagacatacatggtatgcactcattgataagtggctattagcccaaatgcttgaattaccctagatccctagaacaaacgaaactcaagacggatgatcaaaatgtgaatgcttcactccttctttaaatgaggaaaaagaatacccttggctgggaagggagaggcaaagattaaaacagagactgaaggaacacccattcagagcctgccccacaggtggcccatacatatacagccacccaattggacaagatggatgaagcaaagaagtgcagactgacaggagccggatgtagatcgctcctgagagacacagccagaatacagcaaatacagaggcgaatgccagcagcaaaccactgaactgagaataggtcccccgttgaaggaatcagagaaagaactggaagagcttgaaggggctcaagaccccaaaagtacaacaatgtcaagcaaccagagcttccagggactaagccactacctaaatactatacatggactgaccctggactctgaccccataggtagcaatgaatatcctagtaagagcaccagtggaaggggaagccctgggtcctgctaagactggacccccagtgaactagactatggggggagggcggcaatggggggagggttgggagggggacacccataaggaaggggaggggggagggggatgtttacccggaaaccgaaagggaataacacttaaattatataagaaatactcaagttaattaaaaataataataataataataaaaagaattactcataaaataaagacaagatgatggataaaattaaaaaaacaaaaaaaacaaaaaaaaaccaaaatggaaacatgaaaatgctcactacttacaatagtgctttatgtaataagcaaatgactgcatttgacacgagttataatttattaaccccttagttagactacttgtacacatggtgattattaatccacaattattctttttcactaaaatccttatattttattctttgagattataatataatcacacaaattccctcttccctgtcatctcttcaaaaccttccatatagtcctccatgctgtcttttgaacgttatggcttcttttttatattcttgttttatattatatatatataatatatattataatatatatcatactatatatattcctcaggactgaccaatccatattggataaccaattggtgtgctcgtctcagggaaagaccatttccccaccatcagcattctcggtttccagtagttcattgtctagaatggagactgtgtgtgctttccccgtccactttagctgctgtgtttcagctcctcttgaggcagttatgttggtgagacctcatctgtgcggcttccaacattcctcagagacacagtgagttacacagtgtcacctgatcctctaactcccaccatctttcctgctgtcttctccagggtttcctgaacctcagcaggagcaggggttgtactgtagacacgcccaccttcactaggatccacagctcctcactttgatttgctgtggttttctgcaatggcttccatgtcctagtaaagtcatggagaccccataaccacgctgtactaaaccagacaatccctagctgcattctaagttcttgtccttatcccatacatgtgcatttagagagtctgcttattttgctcattatagaacgagtcaatcattctctttgagttgtaaaagctt

SEQ ID NO: 2987 - DNA, 3197 bp, Rattus norvegicus
  Genbank Accession No. M13101
gaattcaaggcccatactgaacatggtaaaagccatatacagcaaaccagttgctaacattaaactaaatggagagaaacttgaagcaatcccactaaaatcagggactagacaaggctgcccactctctccctacttattcaatatagttcttgaagttctagccagagcaatcagacaacaaaaggatgtcaaggggatacagatcgctaaagaagaagtcaaaatatcactatttgcagatgatatgatagtatatttaagtgatcccaaaagttccacgagagaactactaaagctgataaacaacttcagcaaagtggctgggtataaaattaactcaaataaatcagttgccttcctctatacaaaagagaaacaagccaagaaagaaattagggaaacgacacccttcataatagacccaaataatataaagtacctcggagtgactttaacaaagcaagtaaaagatctgtacaataagaacttcaagacactgaagaaggaaattgaagaagacctcagaagatggaaagatctcccatgctcatggattggcaggattaatatagtaaaaatggccattttaccaaaagcaatcttcagattcaatgcaatccccatcaaaataccaatccaattcttcaaagagttagacagaacaatttacaaattcatctggaataacaaaaaacccaggatagctaaaggtatcctcaacaatgaaaggacttcagggggaatcactatccctgaactcaagcagtattacagagcaatagtgataaaaactgcatggtattggtacagagacagacagatagaccaatggaatagaattgaagacccagaaatgaacccacacacatatggtcacttgatttttcacaaaggagccaaaaccatccaatggaaaaaagatagcattttcagcaaatggtgctggttcaactggaggtcaacatgtagaagaatgcagatcgatccatgcttatcaccctgtacaaagcttaagtccaagtggatcaaggacctccacatcaaaccagacacacccaaactaatagaagaaaaactagggacgcatctggaacacatgagcactggaaaaaatttcctgaacaaaacaccaatggcttacgctctaagatcaagaattgacaaatgggatctcataaaactgcaaagcttctgtaaggcaaaggacactgtggttaggacaaaacggcaaccaacagattgggaaaagatctttaccaatcctacaacagatagaggccttatatccaaaatatacaaagaactcaagaagttagaccgcagggaaacaaataaccctattaaaaaatggggctcagagctaaacaaagaattcacagctgaggaatgccgaatggcggagaaacacctaaagaaatgttcaacatctttagtcataagggaaatgcaaatcaaaacaaccctgagatttcacctcacaccagtgagaatggctaagatcaaaaactcaggggacaacagatgctggcgaggatgtggagaaagaggaacactcctccattgttggtgggattgcaaactggtacaaccattctggaaatcagtctggaggatcctcagaaaattggacattgaactgcctgaggatccagctatacctctcttgggcatatacccaaaagatgccccaacatataaaaaagacacgtgctccactatgttcattgcagccttatttataatagccagaagctggaaagaacccagatgcccttcaacagaggaatggatacagaaaatgtggtacatctacacaatggaatattactcagctatcaaaaacaacgactttatgaaattcgtaggcaaatggctggaactggaaaatatcatcctgagtgagctaacccaaacacagaaagacatacatggtatgtactcactgatatgtggctattagccaaatgcttgaattaccctaaatgcctagaacaaatgaaactcaagacagatgatcaaaatgtgaatggttcactccttctttaaaaggggaacaagaatacccttggcagggaagagagaggcaaagattaaaacagagactgaaggaacacccattcagagtctgccccacatgtggcccatgcatatacagccatccaattagacaagatggatgaagcaaagaagtgcaggctgacaggagccggatgtagatcgctcctgagagacacagccagaatatagcaaatacagaggcgaataccagcagcaaaccactgaactgagaataggacccccgttgaaggaatcagagaaagaactggaagagcttgaaggggctcgagaccccatatgtacaacaatgccaagcaaccatagcttccagggactaagccactacctaaagactatacatggactgaccctggactctgacctcataggtagcaatgaatatcctagtaagagcaccagtggaagcggaacgcctgggtcctgctaagactgaacccccagtgaactagactgttgcggggagggggacaatggggggagggtggggaggggaacaccgataagaaacaggggggggagggggatgtttgcccggaaactgggaaagggaataacactcgaaatcgtatataagaaatactcaagttaataaaaataaaataaaataaaataaaaaaggagcattcaactcataaataatttttgttctgaaaaatatttttaattgttatcagttatgagacagcttttcagaagattgtgtgtgtgtgtgtgtgtgtgtgtgtgtgtgtactacagcatgttttatatttagttatcaatccttgaagaatgatttagttttaaattaaatttaaatataatactagactctgttagatacgaaaggtaaatttctattttggttccctttactcccatgtctagtgtttctagatggaaaatattgtgatcctgctgtcttatagatttaacttaagaatgtttacattttattttcaactagattggcaattcaaagcctggtcttagaagttattttaaagtatgttcttagtgtaagtcaatttttaagctagttgtagttcatttaatttcctcacaagagttatttttgtgtgtggtatatttctcttttgttaggtgatttttgctgttatacttaccttgaattc

SEQ ID NO: 2988 - DNA, 809 bp, Rattus norvegicus
  Genbank Accession No. M13234
ggctgatacactacaacatcatgctacaaagccagtaaaatgggtctactcttccccttttctacgcagagaaagtccaaaaggagattgatcaggtgattggctctcacaggccaccatcccttgatgatcgtaccaaaatgccatacactgatgcagtcatccacgagattcagagatttgcagatcttgccccaattggtttaccacacagagtcaccaaagacaccatgttccgagggtacctgctccccaaggtgaggccacctgtgattcctcattgttactccattcatgagcatcctccactctcctaatcaccaacctcatcctgtctgtggttttccaggactgtgtttcttagggactgactgtttatcatatgggagtcagggtatgttaacatctttatcttataacttctcccagaacactgaggtgtatcccatcctgagttcagctctccatgacccacagtactttgaccatccagacaccttcaatcctgagcacttcctggatgccgatgggacactgaaaaagagtgaagcttttatgcccttctccacaggtgaggcagaattgtgattcctttcccagacactagagggcaggtcctccctctggacaccaacaccaataggtccctgttagtatactgagtctatctcagttaaacaatcccattaaatctggctacagctcatgaggggagtcttaactaactggagcatcctggtcaggacttttgggaattgtttaaggcaatgctaagaaatttaacacagcagccggtgggggtaagatcg

SEQ ID NO: 2989 - DNA, 1961 bp, Rattus norvegicus
  Genbank Accession No. M13506
aaaaaaagcattccatttctgcaagatgtctatgaaacagacttcagtgtttctgttgatacagctcatatgctactttagacctggagcctgtggaaaagtgctagtgtggcccacagaatacagccactggattaatataaagataattctgaatgaacttgcccagagaggtcatgaagtcacggttcttgtatcttcggcttccattctcattgagcctaccaaggaatcttctattaattttgagatttactctgtacctttgagtaaaagtgatcttgaatatagttttgcaaaatggatagatgaatggacacgtgattttgaaacactctcgatttggacatattattcaaaaatgcaaaaagtcttcaatgaatattctgatgtcgttgaaaatttatgcaaagcactcatttggaacaagagtcttatgaaaaaactccaaggatctcaatttgatgtcattctcgcagatgctgtgggtccctgtggtgagctgctagcagaactgcttaagacacctttagtgtacagtctccgcttctgtcctggatacagatgtgaaaagttcagtgggggacttccactgcctccttcctatgtgcctgttgttctttcagaattaagtgaccgcatgacatttgtggaaagagtgaagaatatgttgcagatgctgtattttgacttttggtttcaaccatttaaagagaagtcctggagtcagttttacagtgatgttctaggtagacccacaacattaactgagatgatggggaaggcagatatatggctcattcgaaccttctgggacttggaatttccacacccattcttacctaattttgactttgttggaggactacattgcaaaccagccaaaccactgcctagggaaatggaagaatttgttcagagctctggagaacatggtgtagtggtgttttctctgggatcaatggttaaaaacctgactgaagaaaaagccaatgtagttgcttctgctcttgcccaaattccacagaaggttgtatggagatttgatggtaagaaaccagataccttaggatctaacactcggctgtacaagtggatcccccagaatgaccttcttggtcatccaaaaaccaaagcttttgtagctcatggtggaacaaatggcatctatgaggcaatctaccatggcattcctattgttggtattcccttgtttgcagatcaaccggataacattaatcacatggtagccaaaggagctgctgttagagttgacttcagcatactgtcaactacaggccttctcactgccttgaagattgtcatgaatgacccttcctataaggagaatgccatgagattatccagaatccaccatgatcagccagtgaagcccctggaccgagccgtcttctggatcgagtatgtcatgcgtcacaaaggagccaagcacctccgctcaactctgcatgaccttagctggttccagtaccactctctggatgtcattgggttcctattgctctgtgtggtaggtgtggtattcatcatcacaaaattctgcctcttttgttgccgtaagactgctaacatgggaaagaagaagaaagagtagcatcataaaggctgaagcagagccctgagagatgagcctctgccagctgcttccagaggaacctgttgtcatgccagtgccttccctctaaaagaagacagcgttgggacctcattgaacatggctccaatgaattcactatgttctgaagacatgcaagatttcatgccaaatatatattcagtgctaaaaaaacaaaatcctgtgttcagtttagaatgttttgatgtagctgagaagctttgcccaacaacaataactgaagctactgtagttcataaagttcacatggctttatagcctttgcaaaacatatctataaatcaattagtttttgaaaataccc

SEQ ID NO: 2990 - DNA, 2383 bp, Rattus norvegicus
  Genbank Accession No. M14050
ctctgtgagacacctgaccgaccgctgagcgactgactggtccacagcgccggcaagatgaagttcactgtggtggcggcggcgctgctgctgctgtgtgcggtgcgggcggaggaggaggacaagaaggaggatgtaggcacggtggttggcatcgacttggggaccacctattcctgcgtcggtgtattcaagaacggccgcgtggagatcatagccaacgatcagggcaaccgcatcacaccgtcgtatgtggccttcactcctgaaggggagcgtctgattggcgatgcggccaagaaccaactcacgtccaacccggagaacaccgtcttcgacgccaagcgcctcatcggacgcacttggaatgacccttccgtgcagcaggacatcaagttcttgccattcaaggtggttgaaaagaaaactaaaccatatattcaagttgatatcggaggtgggcaaaccaagacatttgccccagaagaaatttctgctatggttctcactaaaatgaaggaaactgccgaggcgtatttgggaaagaaggtcacccatgcagttgtgactgtaccagcttacttcaatgatgcacagcggcaagcaaccaaggatgctggcactattgctggactgaatgtcatgaggatcatcaatgagccaacagcagctgctattgcatatggcctggataagagagagggagagaagaacatcctcgtgtttgacctgggtggtggaaccttcgatgtgtctcttctcaccattgacaatggtgtctttgaagtggtggccactaatggagacactcatctgggtggggaagactttgatcagcgggtcatggagcacttcatcaagctgtacaaaaagaagactgggaaagatgtcagaaaggacaacagagctgtgcagaaactccggcgtgaggtagaaaaggccaagagagccctgtcttctcagcatcaagcgaggattgaaattgagtccttcttcgaaggagaagacttctcagagacccttactcgggccaaatttgaagagctgaacatggacctgttccgctctaccatgaaacctgtccagaaagtgttggaagactctgatctgaagaaatctgatattgatgagattgttctggttggcggatctactcgaattccaaagattcagcagttggtgaaagagttcttcaatggcaaggagccgtcccgtggcatcaacccagatgaggctgtagcatatggtgccgctgtccaggctggtgtcctctctggtgatcaagatacaggtgacctggttctgcttgatgtgtgtcctcttacacttggtattgaaactgtgggaggtgtcatgacaaaactgattccgaggaacactgtggtgcccaccaagaagtctcagatcttctccacagcttctgataatcagcccaccgtaacaatcaaggtctacgaaggtgaacgacccctgacaaaagacaatcaccttctgggtacatttgatctgactggaatccctcctgctccccgtggggtaccccagattgaagtcacctttgagatagatgtgaatggtattcttcgagtgacagctgaagacaaagggacaggaaacaaaaacaaaatcaccatcaccaatgaccaaaaccgcctgacccctgaagaaattgaaaggatggtcaatgacgccgagaagtttgctgaggaagacaaaaagctcaaagagcgcattgacacgaggaatgaattggaaagctatgcttactctcttaagaaccagatcggagataaagagaagctgggaggtaagctgtctcctgaagataaagagaccatggagaaagctgtagaggaaaagatcgaatggctggaaagccaccaggatgcagacattgaagactttaaagctaaaaagaaggaactagaagaaattgttcagccaattatcagcaaactctatggaagtggaggccctcccccaactggtgaagaggatacatcagaaaaagatgagttgtaggtgcactgatctgctagagctgtaatattgtaaatactggactcaggaactttcgttgggagaaaattgagagaacttaagtctcgaatgtaattggaatcttcacctcagagtggagttgaaaatgctatagcccaagtggctgtttactgcttttcattagcagttgctcacgtgtcttggggtcagggagaggaggaattggctattttaaaattggggaaaagctgggtcagggtgtgtgttcaccttggatatgttctatttaacggttgggtcatgcacatctggtgtaggaacttttttctaccataagtgacaccaataaatgtttgttatttacactggtctagtttttgtg

SEQ ID NO: 2991 - DNA, 410 bp, Rattus norvegicus
  Genbank Accession No. M14776
cggatttgggcatggggaaaaggaacattgaggatcgtgttcaagaggaagcacggtgccttgtggaggaactgaggaaaaccaatggctcaccctgtgaccccacgtttatcctgggctgtgctccttgcaatgtcatctgctccattattttccagaatcgttttgattataaagatcaggattttcttaacttgatggaaaaactcaatgagaacatgaaaattttgagcagtccctccacacagttttgcagttttttccctgttttaattgattattgtccgggaagtcatacgacattagctaaaaatgtgtatcatattagaaactaccttctgaagaaaataaaagagcatcaagaatcactggatgttacaaatccccggaactttattgattattaccta

SEQ ID NO: 2992 - DNA, 2462 bp, Rattus norvegicus
  Genbank Accession No. M14972
gatggctgcaccatgagcgtctctgcactgagctccacccgcttcacgggcagcatctctggcttcctccaagtggcctccgtgcttggtctgcttctgctgctggtcaaagcagtccagttctacctgcaaaggcaatggctactcaaggctttccagcagttcccatcacctcccttccactggttctttgggcacaagcagtttcaaggtgacaaagaactacagcaaattatgacatgtgtggagaatttcccaagtgcctttcctcgatggttctggggaagcaaagcctacttaattgtctatgaccctgactacatgaaggtgattctcgggcgatcagatccaaaggccaatggcgtctacagattgctagctccttggatcggatatggtttgctcttgctgaatggacaaccgtggttccagcaccggcgaatgctaaccccagccttccactatgacattctgaaaccctatgtaaaaaacatggctgactccattcgactgatgctagacaaatgggaacagctggcaggtcaagactcctctatagaaatctttcaacatatctccttaatgaccctagacactgtcatgaagtgtgccttcagccacaatggcagtgttcaggtggatggaaattacaagagctatatccaggccattgggaacttgaatgacctctttcactcccgtgtgaggaacatctttcatcagaatgataccatctataatttttcttccaatggccacttgttcaaccgtgcttgtcaacttgcccatgatcacacagatggtgtgatcaagctaaggaaggatcagctgcagaatgcgggagagctggaaaaggtcaagaagaaaagacgtttggattttctggacatcctcttacttgccagaatggagaatggggacagcttgtctgacaaggacctacgtgctgaggtggacacatttatgttcgagggtcatgacaccacagccagtggagtctcctggatcttctatgctctggccacacaccctaagcaccaacaaagatgcagagaggaagttcagagtgtcctgggggatgggtcctccattacctgggatcacctggaccagattccctacaccaccatgtgtatcaaggaggccctgaggctttacccacctgttccaggcattgtcagagaactcagcacatctgtcaccttccctgatgggcgctctttacccaagggtatccaagtcacactctccatttatggtctccaccacaacccgaaggtgtggccaaacccagaggtgtttgacccttccaggtttgcaccagactctccccgacacagccactcattcctgcccttctcaggaggagcgaggaactgcattgggaaacaatttgctatgagtgagatgaaggtgattgtggccctgaccctgctccgctttgagctactgccagatcccaccaaggtccccatccccttaccacgacttgtgctgaagtccaaaaatgggatctacctgtatctcaagaagctccactaattccgttgtggagctccgaaatctgaaatgagtttcactggcagaaagctgagttggtggtgtgactagccttcttcagaagagtgcttcagagagtcctctcctcctctcttcagtacagatcacccttctcagcactggaatattcctctgctttaaagccagcacccttcccataccccctcttctaaaagccttcccttttacaaatgttcttatgacatcatcaagaccactgaaaaactccaagataatttcccatctcaatattccttactccatctaacctactaagtcccttttgaattatgaggaataattcaatttgttccatgggctccaaaactcaaggcctgagcattattgtgaaacctttattcagcctaatatcatcttcacaagactgttacctggtacgttcatctaaatctcccctgcatagtctctctacctgactattcctcacacaagtttctttaccttccctcctttctccaataaagtgtccagtgtcctgcacaaaaagctcaaggagaactgattatcaccttctgattcgttcattgatgcattcaaattaaacctccacatagtagagactttttcaactattataaaaaccatcctgagccagacctgcagtcaacagcaagagcaggaagcgcataggaactacacctgcaaccaagctggcacaaagaccaagaattctgaagcagcccaaactcaagatgacatatttttacaagttagagaaaaatcaagatctgagttatcttgacaaactcgggatggaaagtaggagggaggggaaagcaaataaatacttccttattgtgtagcataaaaaaaccgaattcgtaggagggaggggaaagcaaataaatacttccttattgtgtagcataaaaaaaccgaat

SEQ ID NO: 2993 - DNA, 1346 bp, Rattus norvegicus
  Genbank Accession No. M15481
gaattccgggagacaaccttgtcaagcacctaattgtgccatccgtgcgatgccagccagctccatccaccttacaggagtgaagtcagcgttcatatacgctgtgtggtctggcagctgagatagtgtttcccaaagggactgtggaatgttacctcagcaggcattcatttcgcgtttggaaaatcgtctccaaatgaactttctttccgtgctgggtctgcagaacatttcagaagcggagctagcaatctgcttcaactttttttcccccggtgcttgcagcaggagatgcctgaagggagctgctgcgtggtggtctgaaacatagttcaaggaatagaggtcaactgcctagagcggtgcaggcagggcacaggctggctttgtactctgagtctcaaggtatttcccagtgcctgagccagggggaaggtggggggaggaagggaaggagctgccacttggatcgctattctgggtagccaagacagatagccatacaatggaaattagtggcttcaacttgggggaaaggatggactctaacttcgagctgtgcagttcgcccattgtttgaatggacaaaaggcagtttacccaggctcctagcatacctgcctgggtgtccaaatgtaactagatgctttcacaaaccccacccacaaaacaacacatgttcttaagtcctgggctttgttttcacttcggcctcataatacccactctgacctgctgtgtaaacgacccgggacgtaccaaaatgagcgcacctccaataaagatacacatcatgtcgtcttcacatctcttctacctggcactctgcttgctcacctttaccagctcggccacagccggaccagagaccctttgcggggctgagctggtggacgctcttcagttcgtgtgtggaccaaggggcttttacttcaacaagcccacaggctatggctccagcattcggagggcaccacagacgggcattgtggatgagtgttgcttccggagctgtgatctgaggaggctggagatgtactgtgtccgctgcaagcctacaaagtcagctcgttccatccgggcccagcgccacactgacatgcccaagactcagaaggaagtacacttgaagaacacaagtagaggaagtgcaggaaacaagacctacagaatgtaggaggagcctcccgaggaacagaaaatgccacgtcaccgcaagatcctttgctgcttgagcaacctgcaaaacatcggaacacctgccaaatatcaataatgagttcaataccatttcagagatgggcatttccctcaatgaaatacacaagtaaacattcccggaattc

SEQ ID NO: 2994 - DNA, 805 bp, Rattus norvegicus
  Genbank Accession No. M15562
gtgattccagaggtgactgtactccccaaaagcccggtgaacctgggagagcccaacatcctcatctgtttcattgacaagttctcccctccagcggtcaatgtcacctggcttcggaacggacagcctgtcaccaaaggcgtgtcagagacagtgtttctcccaagggaggaccacctcttccgcaaattccactatctcaccttcctgccctccgtggaagattactatgactgtgaggtggatcactggggtctggaggagcctctgcggaagcactgggagtttgaagagaaaaccctcctcccagaaactaaagagaatgtcctgtgtgttctcgggttgtttgtgggtctggtaggcatcgtcgtcgggattgtgctcatcatcaagggccttcggaaacgcaacgcagtggaacgccaaggagccctgtgagataccgggaggtgatggcttccgtgagagctcatagaagaaatgtgctgtgacagcatctgaggctaccccttctctcagctcttcacctcagcagagacatcttctgcagtttccaacctcaagcctcgcgccagattctctggtctaatgtctggctggggttctccgtctgcttcctgtatctatattctattttccatcatttatagtaattcctctgtggcacatatcacagagctcttcctccgctgcggaactttctaagaatggaggcatcttctgttcacttacggcttgacatttctccaaactgtgttttctctttctctttttcaataaataataaacaccttgggtcctgaat

SEQ ID NO: 2995 - DNA, 1639 bp, Rattus norvegicus
  Genbank Accession No. M16235
ggtaagacgagagacatgggaaatcacctccaaatctccgtttccctggtgctgtgcatctttatccagtcaagtgcctgtggacaaggcgtgggaacagagccctttgggagaaaccttggagctactgaagaaaggaaaccgttacagaagccagagatcagattcctgctcttcaaagatgaaagtgaccgcctgggttgtcagctcagacctcagcacccggaaacactgcaggagtgtggcttcaacagctcccatccacttgtcatgatcatccacgggtggtcggtggatggcttgctagaaacctggatctggaagatagtgggtgccctgaagtcccgacagtcccaacccgtgaacgtgggattagtggactggatctccctggcataccagcactatgctattgccgtgcgcaacacccgtgttgtgggccaggaggtggctgctcttctcctatggctggaggaatctatgaagttttctcggagcaaagttcacttaattgggtacagcctgggagcacacgtttcaggattcgcaggcagctccatgggtgggaagcgcaagatcggaagaatcacagggctggaccctgcaggacctatgtttgagggaacttcccccaatgagcgcctttctccagatgatgccaattttgtggatgctattcatacctttaccagggagcacatgggtctgagtgtgggcatcaaacagcccattgcccactatgacttctaccccaacgggggctccttccagcctggctgccacttcctggagctctacaaacacattgcagagcatggcttaaatgccataacccagaccatcaaatgtgcccatgagcgttctgtgcacctcttcattgactccttgcaacacagcaacctgcagaacacaggcttccattgcagcaacatggacaccttcagtcagggtctatgtctgaactgcaagaagggccgttgcaacagtctgggctatgacatccgcaggatcggccacgcaaagagcaagacactcttcctcatcacccgagcccagtccccctttaaagtttatcattaccagttcaagatccagttcatcaatcaaatggagaagccaatagagcctacttttaccatgacactgctggggacaaaagaagaaataaagaaaatccccatcaccctgggcgaaggaattaccagcaataaaacctattccttacttatcacactggacaaagacatcggcgagttgatcatgctcaagttcaagtgggaaaacagcgcagtgtgggccaatgtctggaacacagtgcagaccataatgctatgggacacagagcctcactacgcgggcctcattctgaagaccatctgggtcaaagctggagagacgcagcaaagaatgacattttgccctgataatgtggatgatctccagcttcaccccacccaggagaaagtcttcgtgaaatgtgacctgaagtcaaaagactgaagaagcaaaagagcagatgagtcaagagacccaagcacaaaataaatagactattctttatctgtaatggttgccttattcggaagccaaattacacaaaggatcatgcataaacttaaataaagctgatatgtaaagg

SEQ ID NO: 2996 - DNA, 1161 bp, Rattus norvegicus
  Genbank Accession No. M18530
ggccacaccaaaggaagccatagagagactgatatcagagtattcttggaagaggcaggagaaaatgaaagccaatctctgctcctaccttacatgtttgtgttaggggtgtcagataaactggtctggtatctctgtctgatgcatggaactattgtagctgaagaagaacatagtttcagggaagaaaggcaatagaaggaaggctctgaatagcttcaaagggtcagacccaatttactttctaaagtagctagggactagggaataactcaaaacccacaagactgtatacatgtgtcctggcttcattgttcctaatctgtagggataagtgtgcttttctgtgtgtctgtctataacatgcataatgcactgaaagggagattttccttgttacttcataccatctctgtgcttccttcctcaggggctgatgctgcaccaactgtatccatcttcccaccatcctcggagcagttagcagctggaggtgcctcagtcgtgtgcttcgtaaacaacttctatcccaaagacatcagtgtcaagtggaagattgatggcagtgaacgacaaaatgatgtcctgaacagtgttactgatcaggacagcaaagacagcacgtacagcatgagcagcaccctcacgttgaccaaggctgactatgaaagtcataacctctttgtctgtgaggttgttcataagacatcagcctcccccgtcgtcaagagcttcaacaggaatgagtgttagacccaaaggtcctgaggtgccacctgctccccagatccttccaatcttccctcctaaggtcttggagacttccccacaagcgacctaccactgttgcggtgctccaaacctcctccccacctcatcctccttcctttccttggctttgatcatgctaatatttggggaatattaaataaagtgaatctttgcacttgagatctttgtctttcttactaaatagtggttaacagttatttatcctgttacctggtttctcttctaaagaagttaaatgtttagttgccctgaaatccaccacacttaaacaacaaataaaactctcccccttgccctacttggttgtccactacattgcagtcctctctaaggttcacaagtactattcatggcttatttctctgggcc

SEQ ID NO: 2997 - DNA, 1161 bp, Rattus norvegicus
  Genbank Accession No. M18531
ggccacaccaaaggaagccatagagaggctgatatcagagtattcttggaagaagcaggagaaaatgaaagccaatctctgctcctaccttacatgtttgtgttaggggtgtcagataaactggtctggtatctctgtctgatgcatggaactattgtagctgaagaagaacatagtttcagggaagaaaggcaatagaaggaaggctctgaatagcttcaaagggtcagacccaatttactttctaaagtagctagggactagggaataactcaaaacccacaagactgtatacatgtgtcctggcttcattgttcctaatctgtagggataagtgtgcttttctgtgtgtctgtctataacatgcataatgcactgaaagggaggttttccttgttacttcataccatctctgtgcttccttcctcaggggctgatgctgcaccaactgtatccatcttcccaccatcctcggagcagttagcaactggaagtgcctcagtcgtgtgcttcgtaaacaacttctatcccaaagacatcagtctcaagtggaagattgatggcagtgaacgacaaaatgatgtcctgaacagtgttactgatcaggacagcaaagacagcacgtacagcatgagcagcaccctcacgttgaccaaggctgactatgaaagtcataacctctttgtctgtgaggttgttcataagacatcagcctcccccgtcgtcaagagcttcaacaagaatgagtgttagacccaaaggtcctgaggtgccacctgctccccagatccttccaatcttccctcctaaggtcttggagacttccccacaagcgacctaccactgttgcggtgctccaaacctcctccccacctcatcctccttcctttccttggctttgatcatgctaatatttggggaatattaaataaagtgaatctttgcacttgagatctttgtctttcttactaaatagtggttaacagttatttatcctgttacctggtttctcttctaaagaagttaaatgtttagttgccctgaaatccaccacacttaaacaacaaataaaactctcccccttgccctacttggttgtccactacattgcagtcctctctaaggttcacaagtactattcatggcttatttctctgggcc

SEQ ID NO: 2998 - DNA, 668 bp, Rattus norvegicus
  Genbank Accession No. M18854
aggatctgaaaacggtgactccacccaaggtctccttgtttgagccatcagaagcagagattgcagacaaacaaaaggctaccctcgtgtgcttggccaggggcaacaaccctgaccatgtggagctgagctggtgggtgaatggaggagatccgcatggggtcagcacagaccctcaggcctacaaggaaagcaacaatatcacctactgcctgagcagccgcctgagggtttctgctaccttctggcacaatcctcgcaaccacttccgctgccaagtgcagttctatgggcttacagaggaagacaactggtcagaggactcacccaaacctgtcacacagaacatcagtgcggaggcctggggccgagcagattgtgggattacctcagcatcctatcaacaaggggtcctgtctgccaccatcctctatgagatcctactggggaaggccaccctgtatgctgtgctagtcagtgccctggtgctgatggccatggtcaagaaaaaaaattcctgagacaaactttatgcatcctgagctgttctttaccctggccatggattttcccgcaccttctccaatccctgttcctaaggacttgtctcctctccctccatggaaatctaccattcctcattaaccccttgactatgaaacagactg

SEQ ID NO: 2999 - DNA, 1758 bp, Rattus norvegicus
  Genbank Accession No. M20406
agaccttatacatagtctgattagaccaggatcatggatactagtgtccttctcctccttgctgtcctcctcagcttcttgctattcctggtcagaggccatgcaaaagttcatggtcatcttccaccaggaccccgtcccttacccctcttgggaaacctcttgcagatggacagaggaggctttcgtaagtctttcattcagcttcaagaaaaacacggagatgtgttcacagtatactttggacctaggcctgtggtcatgctgtgtgggacacagaccataagggaggctctggtggaccatgctgaggctttctctggccggggaataattgctgtgcttcagccaattatgcaggaatacggtgtgtcctttgttaatgaagaaaggtggaagatccttcggcgattatttgtagccaccatgagagactttgggataggaaagcagagtgtggaggatcagataaaggaggaggccaaatgtttagtggaggaactgaagaatcatcagggagtctccctggacccaacgttcctcttccagtgcgtcacaggcaacataatctgctccattgtctttggagagcgctttgactacagagaccgccagttcctgcgcttgctcgacctgttgtataggaccttttccctcataagctcattctccagccagatgtttgaggtctactctgacttcctgaagtactttcctggtgtccacagagaaatctacaaaaacctgaaggaagtcctcgactacattgatcatagtgtggagaaccacagggccactttggaccccaatgctccccgagactttatcgatactttccttctgcacatggagaaggagaagttgaaccactacacggagttccatcattggaacctaatgatatctgtgctctttcttttccttgctggcactgagtctacaagcaacactctctgctatggattcctgctcatgctcaagtaccctcatgttgcagagaaagtccaaaaggagattgatcaggtgatcggctcacagcgggtcccaacccttgatgaccgctccaaaatgccatacactgaggcagtcatccatgagattcagagattttctgatgtttctccaatgggtttgccatgcagaatcaccaaagacacattgttccgagggtacctgctccccaagaacactgaggtgtacttcatcctgagttcagctctccatgacccacagtactttgaacaaccagacaccttcaatcctgagcacttcctggatgccaatggggcactgaagaaatgtgaagctttcatgcccttctccataggaaagcgtatgtgtcttggagaaggcattgcccgaagtgaattgttccttttcttcactaccatcctccagaactactcagtgtccagccctgtggatcctaacaccattgatatgactcccaaggagagtggattagccaaagtagccccagtgtacaagatttgctttgtagcccgctgattgtgctgaggcagtcagccgactcacttctgttcaaaatggccccatttttctgattctgggagacctgctggagaccaggcccaaggttgctgagtcattcctcacttcttcccaacagcctcagtccccatttatcaggtctccatgctctgtgatctatgctattggactatgtataaggtctgaattctatgtctacaggtttgcctagtatgtatggttcatgtaaacaggatcatatagtgc

SEQ ID NO: 3000 - DNA, 1780 bp, Rattus norvegicus
  Genbank Accession No. M20629
tctcttgctgtttgcccaatttggggacacccatcctcaccaccagtggtggacaccacaaaaggcaaagtcctggggaagtatgtcagcttagaaggatttacacagcctgtggccgtcttcctgggagtcccttttgccaagcctcctcttggatctctgaggtttgctccaccagagcctgcagagccctggagcttcgtgaagaacaccaccacctacccgcctatgtgctcccaagatggagttgtgggaaagttactcgcagatatgttgagcaccggaaaagagagtatacctctcgagttttccgaagactgtctctacctgaatatttacagtcctgctgacttgacaaaaaacagccgattgcccgtgatggtgtggatccatggaggtggactaataataggcggagcatcaccctatagtggactagctctctctgcccacgaaaacgtggtggtggtaaccattcaataccgcctgggatttgggggattgtttagcaccggtgatgaacacagccgggggaactgggctcacttggaccagctggctgcactacgctgggtccaggataacattgcaaactttggagggaacccggattcagtgaccatctttggagagtcagcaggaggtgtcagtgtctctgctcttgtcttatctcctctggccaagaacctcttccacagagccatttctgagagtggtgtggtcctcactacaaacctggacaagaagaatactcaggctgtggctcaaatgattgctactctttctgggtgtaataacacctcatcagccgccatggttcagtgcttgcgccagaagacagaggctgagctcttggagcttacagtgaaactggacaatacctccatgtccactgtgattgatggagtggtactgccaaagacaccggaagagatcctgactgagaagagtttcaacacggtcccctacatagtgggcttcaacaagcaagagtttggctggatcattccaacgatgatgggaaatctactctctgaaggcagaatgaatgagaaaatggccagttctttcttgaagaggttcagccctaaccttaacatctctgagagtgtgattccagcaatcattgagaagtacttaagaggaacagatgaccctgccaaaaagaaggaacttctcctggacatgttttcagatgtctttttcggtatcccagctgtactcatgtcccgtagcctcagagatgccggagcgcccacctacatgtatgagtttcagtatcgcccaagcttcgtgtctgaccagagaccccagacagttcagggagaccatggtgatgaaatcttctctgtatttgggactccatttttaaaagagggcgcctcagaagaggagaccaatcttagcaagttggtgatgaagttctgggccaactttgctcgaaatgggaacccaaatggagaggggctgcctcactggccaaaatatgatcagaaggaagggtatttgcagattggtgccaccacccagcaagcccagaaactgaaaggagaagaagtggctttctggactgagctcttggctaagaatccacctcagacagaacacactgaacacacataaatgggtctctgccagcctcagtaccagaggagcaaagatggggctattccacaaaggatggctatttgccaaagatgaatcttacagaggaaactgcacaattgtacagttggggtatttgtatctcaactttgaaataaatttccttttagaaagc

SEQ ID NO: 3001 - DNA, 525 bp, Rattus norvegicus
  Genbank Accession No. M21354
gcaggtcccagaggcccagttggtccacatggacctcctggaaaagatggatcaagtggacatccaggtcccattggaccaccagggcctcgaggtaacagaggtgaaagaggatctgagggctcgcccggtcaccctggacagccaggaccccctggaccccctggtgcccctggtccctgctgtggtggcggtgctgccattgctggagttggaggtgaaaagtctggcggcttttcaccatattacggggatgatccaatggatttcaagatcaacactgaggagatcatgtcttcactcaagtctgttaacggacaaatagagagtcttatcagccctgatggttctagaaaaaaccctgctcgcaattgcagagacctgaaattctgccaccctgaactcaagagcggagaatactgggttgatcctaaccaaggctgcaagatggatgctataaaagtgttctgtaatatggaaaccggagaaacatgcataaatgccagtcccatgactgtcccgcgg

SEQ ID NO: 3002 - DNA, 3327 bp, Rattus norvegicus
  Genbank Accession No. M22631
aacggcgggatataacatgagctgtcttcggtatcgtcgtatcccactaccgagatatccgcaccaacgcgcagcccggactcggtaatggcgcattggccccagcgccatctgatcgttggcaaccagcatcgcagtgggaacgatgccctcattcagcaatttgcatggtttgttgaaaaccggacatggcactccagtcgccttcccgttccgctatcggctgaatttgattgcgagtgagatatttatgccagccagccagacgcagacgcgccgagacagaacttaatgggcccgctaacagcgcgatttgctggtgacccaatgcgaccagatgctccacgccccgtcgcgtaccgtcttcatgggagaaaataatactgttgatgggtgtctggtcagagacatcaagaaataacgccggaacattagtgcaggcagcttccacagcaatggcatcctggtcatccagcggatagttaatgatcagcccactgacgcgttgcgcgagaagattgtgcaccgccgctttacaggcttcgacgccgcttcgttctaccatcgacaccaccacgctggcacccagttgatcggcgcgagatttaatcgccgcgacaatttgcgacggcgcagtgcagggccagactggaggtggcaacgccaatcagcaacgactgtttgcccgccagttgttgtgccacgcggttgggaatgtaattcagctccgccatcgccgcttccactttttcccgcgttttcgcagaaacgtggctggcctggttcaccacgcgggaaacggtctgataagagacaccggcatactctgcgacatcgtataacgttactggtttcacattcaccaccctgaattgactctcttccgggcgctatcatgccataccgcgaaaggttttgcgccattcgatggtgtcggaattccgggcggtcctcccagcaactgctgtggacgctgaagcgtgctccagtctattcacagcaatgcctagtggtgtcccgaagtctcagttctgtggaatatgagcctaaagaaaaaacttttgataaaattcttattgctaacagaggagaaattgcttgtagggtcattaagacttgcaggaagatgggcatcaggacagttgccatccacagtgatgttgatgccagctcggttcatgtgaaaatggcggatgaggctgtctgtgttggcccagctcccaccagtaaaagctacctcaacatggatgccatcatggaggccattaagaaaaccggggcccaagctgtacacccaggttatggattcctgtcagaaaacaaagagtttgcaaagtgtttggcagcagaagatgtcactttcattggacctgatactcatgctattcaagccatgggtgacaagatagaaagcaaactgttagccaagagagcaaaggtcaacacaatccctggttttgatggggtactaaaggatgcagatgaagccgtcagaattgcaagggaaattggctaccctgtgatgatcaaggcctcagcaggcggtggtgggaaaggcatgcgcatcccgtgggatgacgaagagaccagggatggctttagattttcatcccaggaagctgcttctagttttggtgatgatagactactaatagaaaaatttatcgataaccctcgtcatatagaaatccaggttttaggggataaacatggcaatgctctgtggctcaatgagagggagtgctcgatccagagaagaaaccagaaggtggtagaggaggcgccgagcatttttctggatcctgagacgcgccgagccatgggagagcaggccgtggcttggccaaaagcggtgaagtattcttctgctggaactgtggaatttcttgtggactcccagaagaatttttacttcttggagatgaatacaagactccaggttgaacatcctgtcacagagtgcattactggcctggacttagtccaagaaatgatcctggttgctaagggttacccactcaggcacaagcaagaggatattcccatcagtggctgggcagttgaatgtcgggtttatgctgaggacccctacaagtctttcggtttaccgtctattgggagactgtctcagtaccaagagcctatacatctacctggtgtccgagttgacagtggcatccaaccaggaagtgacatcagcatctatcatgaccctatgatttcaaaactagtcacatatggatctgacagagcagaagccctgaagaggatggaagatgcattggacagttatgttatccggggtgttacacacaacatcccactgcttcgggaggtgataatcaacacgcgttttgtgaaaggggacatcagcactaagtttctctctgatgtgtatcctgatggcttcaaagggcacatgttaacacccagtgagagagaccagttattggctattgcatcatccttgtttgtggcatcccagctacgagcacagcgctttcaagaacattcaagagttccagttataaggccagatgtggctaagtgggagctctcagtaaaattacatgatgaagaccatactgttgtggcatccaacaacgggccaacatttaacgtggaagttgatggctcgaaactaaatgtgaccagtacgtggaacctggcctcacccttattgtctgtcaacgttgatggcactcagaggactgtgcagtgtctttctccggacgcaggtggaaacatgagcatccagtttcttggcacagtgtacaaagtgcacattttaaccaaacttgctgcagaactgaacaaattcatgcttgaaaaagtacccaaggacactagcagcgttctgcgttccccgaagcctggagtggtggtggccgtttccgtcaagcctggagacatggtagcagaaggtcaggaaatctgtgtgattgaagctatgaaaatgcagaacagtatgacagctggtaaaatgggcaaggtgaaactggtgcactgcaaagctggagacacagttggtgaaggagacctgctcgtggagctggaataagtacttgtagcccttcagtcaccactgctcactgctttaattagcatttccattattctctaaccctcaatttgctcaggcgtttacaggagcactctgcagcaggttctacagcatcgtatttattccttagaagagggcaaaaccgacactctgccaaaaaaatcaccaatgggaatttttattgatataaatacttgtacatatgatttgtacttctgctgagatttcccagtgtcaaaattaaatcaataaaaccaacggaa

SEQ ID NO: 3003 - DNA, 771 bp, Rattus norvegicus
  Genbank Accession No. M22756
gccagggcgtccggcctcaccgctcagtggggaagacatgcaaggaatttgcataagacagcagtgcaaaatggtgctggaggagccttatttgtgcatagagatactcctgagaataacccagatactccatttgatttcacaccagaaaactacgagaggatagaggcaatagtcagaaactacccggaagggcacagagcagcagctgtgcttccagtgctggacctggcccaaaggcagaatgggtggctgcctatctctgccatgaacaaggtggcagaagttttacaagtgcctccaatgagagtctatgaagtggcgactttttacacaatgtacaatcgaaagccagttgggaagtaccacattcaggtctgcactactacaccttgcatgcttcgagactctgacagcatcctggagacccttcagagaaagctgggaataaaagttggagagactacgcctgacaagcttttcactcttatagaagtagaatgtttaggggcctgtgtaaacgcaccgatggttcaaataaacgacgactactacgaggatctgacacccaaggatattgaagagattattgatgaactcagagctgggaaagttccaaaaccagggccaaggagtggccgcttctgttgtgagccagccggaggccttacttctttgactgaaccacccaaaggacctggctttggtgtgccagcaggcctttaacttacattcaactgtaaaaatgtcactggagaaataaaatatgaa

SEQ ID NO: 3004 - DNA, 635 bp, Rattus norvegicus
  Genbank Accession No. M24026
aatgtcatttatgttgtccttggagccatctctgctgtggccatcattggagctgtgatcattggaggtgtgttggctgttgtgaggaagagaaacacaggtgggaaaggagactacacccctgctccagatagggacagctgccagagctctaatgtgtctctcccagattgtaaagcatgaagacagctgcctggagtggactgagtgacagacgatgtgttcaggtctctcctgtgacatccagagccctcagttctctttagacaccagtgtctgaagttccctgtgattctatggcttcagtgtgaaggactgtggagcccagcctgccctgcacacctggaccctgtccctgaactgcctgtcttcccttccacagccaaccttgctggtccagcctggggttgggggctggggacagctgcatcctgttactctgtgctgccctgagctgcagctcctcacttctacactgagaataagaatctgagtgtgaaattgactgttcacatccttgacacagtgttgattgctttttaaattactagattgagaatacttagaggttgttttttgtttttatttttgttttgttttgttttaaataaatggcaggcggagaaccttccaga

SEQ ID NO: 3005 - DNA, 3320 bp, Rattus norvegicus
  Genbank Accession No. M25073
ctccctgcccaccagcatcatggccaagggtttctacatttccaagaccctgggcatcttgggcatcctgttaggtgtggcagccgtatgcaccatcatagctctgtcggtggtctacgctcaggagaagaacaggaatgcggagaactctgccatagcccccacgctcccaggcagcacctcagccaccacctcaactaccaaccctgctatagatgaaagcaaaccttggaaccagtatcgcttgcctaagactcttatacccgactcctaccaggtgaccttgaggccttacctcacccccaacgagcagggcctgtacatcttcaaaggttccagtactgtccgctttacctgcaacgagaccacaaatgtcatcattatccacagcaagaagctcaactacaccaacaaagggaaccacagggtggcgttgcgagccctgggtgacactccggcacctaacatcgacacaacggaactggtagagcgcacggagtacctggtggtgcacctgcagggctccctggtaaagggccatcagtacgagatggacagtgagttccagggggagctggctgatgatctggctggcttctaccgcagcgagtacatggaaggtggcaacaagaaagtggtggccaccacacagatgcaggctgccgatgctcgaaaatcctttccttgcttcgatgagccagccatgaaggcctcattcaacatcacgctcatccaccccaacaacctcaccgctctgtctaacatgcttcccaaagattccaggacccttcaggaagatccttcctggaacgtcactgagttccaccctaccccgaagatgtccacatacctgctggcctatatcgtgagcgagttcaaatatgtagaagccgtctcacccaatagagtccagattcgaatctgggctcggcccagtgccattgatgagggccatggtgattacgctctgcaagtcacaggccctatcctaaacttctttgcccaacattataatacagcctaccctctagaaaaatctgaccagattgccctgcctgacttcaacgctggagccatggagaactgggggctcgtgacctaccgagagagtgccctggtctttgaccctcagtcctcctccattagcaacaaggagcgggtggtcactgtgattgcccatgagctggcccatcagtggtttggcaacctggtgaccgtggattggtggaatgacctgtggctgaacgagggctttgcctcctatgtggaatttctgggtgctgactatgcagagcccacctggaatctgaaagacctcatagtactgaatgatgtgtaccgtgtgatggccgtggacgcgctcgcttcctcccacccgttgtccagccctgccaacgaggtcaacacgccagcccagatcagtgagctgtttgacagcatcacctacagcaagggagcctcagtccttaggatgttgtccagcttcctgacagaggacctgttcaagaagggcctttcgtcttacctccacaccttccaatactcgaacaccatttatctggacctgtgggaacaccttcagcaggcagtggacagtcagacagctatcaaactcccagcctcagtgagcaccatcatggaccgatggattctacagatgggttttcctgttatcactgtgaacaccagtacgggagaaatctaccaggaacacttcctcctggaccccacttccaaacctacccgcccctcagattttaattacctctggattgtgcccattccgtatctcaaaaatggaaaggaggatcactactggctggagaccgagaaaaaccagagtgcagaattccaaacatcctccaatgaatggctcttactgaacattaatgtaaccggctactaccaggttaactatgatgaaaacaactggaggaagattcagaatcagctgcaaacagacctttctgttatccctgtcatcaaccgtgcgcagattatccacgactccttcaacctagccagtgctggaaagctatccatcactctgccgctgagcaacaccctcttcctggccagtgaaacagaatacatgccctgggaggctgccctgagcagcctgaactacttcaagctcatgtttgaccgctcggaggtctacggccccatgaagcgctatctgaagaagcaagtcacacccctcttcgcctacttcaaaatcaaaaccaacaactggctcgaccgtcctccaacactgatggagcagtacaacgaaattaatgccatcagcaccgcctgttctagtggtctcgaagagtgtagggatctcgttgttgggctttatagtcagtggatgaacaactctgataataacccgatccaccccaaccttcggtctactgtctactgcaatgccattgctttcggtggtgaggaagagtggaactttgcttgggaacagttccggaaagcaactctggtgaacgaggcagataaactccgctcagccttggcctgtagcaacgaggtgtggattttgaacaggtacctgagttacactctgaaccccgactacatccggaagcaggatgctacctccaccatcgtcagcatcgccaacaacgtggttggacaaactctagtttgggactttgtccgaagcaactggaagaaactgtttgaagattacggcggaggatctttctcctttgccaatctcatccagggagtgacccggcgcttctcctctgagttcgagctgcagcagctggagcagtttaaagaggacaactcggccacaggctttggctccggcactcgggctctggagcaagccctggagaagactaaagccaacatcaagtgggtgaaggagaacaaagacgtggtactcaagtggttcacagaaaacagctagttagtcccgggccgagaaccatctgtcccggcgtgacgcctatgactatctcagcagcctgtgcagggtctctgtcttcagagcgccagacaccggcatctgaccctcaaggtcaaagtctccagcctatggagctagcctagctcctaattgtcagactgccagacacctcccggtccttgcccctcgtgccaactctgccccaggcccaggcctctggggctgatctcagggaagcccagctctgagtctagatttactggacaaagggtagcctagaaagagtctccctgaatgccttactactttccccccacaagacccagaaccaaagaatcaacagggcacaaagatctatatatatttttaagagaaaatgtaaataaagaatttctaaaatgag

SEQ ID NO: 3006 - DNA, 846 bp, Rattus norvegicus
  Genbank Accession No. M26247
agagtttctgttgcctacaattctaaaaagatcacccgtgctgagactgttttttctaataccgactatggaaattccactgaattaatcctggatgacatcaccaacagcaccattcttgataacctcactgaaaatagtgaaccaattaatgacttcactcgagttgttggtggagaaaatgcgaaaccaggtcaaatcccttggcaggtcattctaaatggtgaaattgaggcattctgtggaggcgccatcattaatgaaaaatggattgtaactgctgcccactgtcttaaacctggtgataaaattgaggttgttgctggtgaacataatattgatgagaaggaagacacagaacaaaggagaaatgtgattcgaactatccctcatcaccagtacaatgcaactattaataagtatagtcatgacattgccttgctggaactggataaacctttaatactaaacagctatgtaacacctatctgtgttgccaataaggaatatacaaatatcttcctcaagtttggttctggttatgtgagtggctgggggaaagtcttcaacaaagggagacaggcttccattcttcagtaccttagagttccactggttgaccgagccacatgccttaggtccacaaaattcagcatctataacaacatgttctgtgcaggttaccgtgaaggaggcaaagattcatgtgaaggagatagtgggggaccccatgttactgaagtagaagggacaagtttcttaactggcattattagctggggtgaagaatgtgcaatgaaaggcaaatatggaatatatactaaggtttccaggtatgtcaactgg

SEQ ID NO: 3007 - DNA, 147 bp, Rattus norvegicus
  Genbank Accession No. M27207
tcaatttccccaaaagccaaaaattgggagacaattttacatggactttggaaaacatttttttcctttgcattcatctctcaaacttagtttttatctttgaccaactgaacgtgaccaaaaaccaaaagtgcattcaaccttacc

SEQ ID NO: 3008 - DNA, 334 bp, Rattus norvegicus
  Genbank Accession No. M28255
ggcggggtcctggatatcaccattgggctcacttcctgcttcgtgtgttgtcttctacctgcgggctgggtcctgtcacacctggaaagctacaagaagcgggagtgaagggagcgtcttccctcatcctttgactagaccactcttgccagcccaccttgatcatgtttcctgcattcctggctggcttacccygggatcatgttattcaattccagtcacctcttctgcaatcatgacctctcgatgtctccatggtgacaactgggaccacatatattggttctgcttgatggggtccccctttgtaacaataaagtctatttaaaccttg

SEQ ID NO: 3009 - DNA, 1428 bp, Rattus norvegicus
  Genbank Accession No. M29293
ccgtctgaccgactccttgggtatattagtgcggcatctgcgtgtaacacgttgcctttattatggtggtctgaggttgttgattgtgaaatccaggatgtaggagctatgttgccgcagcctctgggctccgggatccgagagctcttttgtatcggccggtggaatctttggatgttcgagctgtattgccgcgacctgtagattcagggatcgtttacacttgagaagaactactgaacagcacgtgccagagattgaggtccaggtcaaacgtagaaggacagcctcactgagcaaccaagagtgtcacttgtacccacggcgttctcagcaacagcaaattcctgtggtggatttccaggcagaactgagacaggcgttcttagctgagacaccaagaggtggttaaagcagtattggaacttcaaggtggtggaagtcaacaaacacaggacctatccactgattgtgaaactttggtcaagcttacactgtgttaatagcctgcatcaaacctttatttattgcccttctccaagtattaaggatcttgaaattttagtgttgacaactgctattgtggaacagcaatcatgactgtgggtaagagtagcaagatgctccagcatattgactatagaatgagatgtatcctgcaagatggaagaatcttcattggcacctttaaggcttttgacaagcatatgaatttgatcctctgtgattgtgatgagttcaggaagatcaagccaaagaatgcaaaacagccagaacgtgaagaaaaacgggttttgggtctggtcttgctacgtggagagaacttggtttccatgacagtggagggtccacctcctaaagatactggcattgctcgtgtgccacttgctggtgctgcaggtggccctggtgttggaagagcagctggcagaggagtaccagcaggtgtacctattccccaagctcctgctggattagcaggccctgtccgaggagttggaggcccatcccagcaggtcatgaccccacagggaagaggcactgttgcagctgctgctgttgctgctactgctagcattgcaggagccccaacccagtacccgccaggacggggaactccacctccacctgtaggcagagcaaccccacctccaggcattatggctcctccacctggaatgagaccacccatgggcccaccaattggacttccccctgctcgagggacacctataggcatgccccctccaggaatgagaccccctcctccaggaattagaggcccacctcccccaggaatgcgtccaccaagaccctaagatacagttgataaatctcagcccttctctttccctacaatgcttcttgtgaaattgtgtcgcctgcaagcttttgacccctcttactgcattaactatagataatacc

SEQ ID NO: 3010 - DNA, 913 bp, Rattus norvegicus
  Genbank Accession No. M29295
gaatgcagcctgcaaaatggccggatcttcatcgggaccttcaaagcttttgacaagcatatgaacttgatcctctgtgactgtgatgagttcaggaagatcaagccaaagaactccaaacaagcagaaagagaagagaagcgagtccttggtctggtgttgcttcgaggagagaacctggtctccatgacagtagaaggacctcctcccaaagatactggcattgcccgagtgccacttgctggagctgctggggggccaggcatcggcagggctgctggcagaggaatcccggcgggtgtgcccatgccccaggctcctgcagggcttgctggaccagtgcgaggtgttggagggccgtcccagcaggtgatgaccccacaaggaagaggcactgtggcagctgctgcagctgcagccacagccagtattgcaggagccccaactcagtacccacctggtcgtgggggtcctcctccacctatgggccgaggggcacctcctccaggtatgatgggcccacctcctggcatgaggcctcccatgggtcccccaatggggatccctcctggccgaggaactccaatgggcatgccccctcctgggatgcgacctcctcctccaggcatgcgaggtctgctttgatcttcgcacagcattatgtcagtagctccgaagagacatggaccctattccccagggtcaggttaccacagacctgtttgtttgttatgctgtttatggagtcttactggaggtctggtttctttcaggctccctccctggaaatgtgccctccgaggcccctagacctcatcttggtcctcctccgcttcctagcttcttccaacctttgtttcccaaaaaggctgtacatagtccttttttttttctgtggcccatgaagctggtt

SEQ ID NO: 3011 - DNA, 1821 bp, Rattus norvegicus
  Genbank Accession No. M31322
gaattcgttacctcctccatctcagagaaccctgtggatgtccgggtgagctctgaggaaagtgaggagatcccgccgttccaccctttccatcccttcccatccttgtctgagaacgaagacactcagccggagttgtaccacccaatgaaaaaaggatctggaatggcagagcaagatgggggcctgattggtgcagaagaaaaggtgatcaacagtaagaataaaatggatgaaaatatggtcattgacgagactctggatgttaaggaaatgattttcaatgctgagagagttgggggtctggaggaagagccggactctgtggggcctctacgggaggacttcagtttgagcagcagtgcccttattggcttgctggtcatcgcggtggccattgctacagtcatcgtcatcagcctggtgatgctgaggaagaggcaatacggcaccatcagccatggcattgtggaggttcatccaatgctcaccccagaagagcgtcacttgaacaagatgcagaaccacggctatgaaaacccaacctacaaatacctggagcagatgcagatttaaggacagcagcgtgtgcgacaccctggctgaggctgctgcaggtgggctggaagagcctcagcgtttgtgcttgactgctgaccaccagcggtgccagaggcctcatcctacatcctgctctcctggattgttaagactataaagtactactgtaggattgcaatttccattcttttaaatgggtttaaaagatgttaatataacaatatatgatatataaaccttaagtgaaaaaaagatctattgcagatatctgatggatgtagttttctttttttaaattagaaatgccacttctattgtattgtctcacacatgctctatataaatggaaaatgttgatttttcaatgatagactatatacacaggctgttcccgttatgtaagtctgttctttaggctcgtttgctgggctggttttgtcgtcatttgttttaatgtataaaggcagtattccccttttcaggttgctgagaaatgtaagtggaactgaagtacattgtatgcagttactgactgttttaggcatagtctccttggaagcctagagcttccagtgccgggtgtccagtgcctgtcaccaaagcaagggctaagtcaccttgagctagctggatgcaaactagatccactgtgctttccttcaaatccagttcttccacagcaaccagcccatagttgttctgtgttcttccacagctgtttacggtagcctcctagccactctcctcagcaagtgcatccaagagtgcaccacccccttctttggacgtctccgtcccatgcactgaccctctgcttgccttcgtacctcacttcctccaccgctcttcagcccctttgatgtcccctcagagaataccgatatacacatggctaaggacccaggagacttcacgggaggcctcattaggtgaaaggacgatgttctgggctgtacatgaaattggatctgtagacactgtgtttccttcactgacttgtaatgtcacgcagctggagttgatgccacaacccttagtgctttgttgctgttttgtttttcagggttctggtaacctgctactgtttttgttttggttttggtttggttttttttgtatttttctgtgatttccctccccttcccccccatgcctcttcccactatgcacagatggaaactttacctacaaactccttcgtatgatctgtggagaatgtacagaacttattacatcaataaaacactttaacttcccccg

SEQ ID NO: 3012 - DNA, 1675 bp, Rattus norvegicus
  Genbank Accession No. M31788
ggcctctctccgggcctctcgacctcacggtgttgccaaaatgtcgctttctaacaagctgactttggacaagctggacgtgaaggggaagcgggtcgtgatgagggtggacttcaatgttcctatgaagaacaaccagataacgaataaccaaaggatcaaggctgctgtcccaagcatcaaattctgcttggacaatggagccaactcggttgtgcttatgagccacctgggccgtcctgatggtgtgcccatgcccgacaagtactccttagagccagttgctgcagaactcaaatctctgctgggcaaggatgttctgttcttgaaggattgtgtgggctcagaagtagagaatgcctgtgccaacccagcggctgggactgtcatcctcctggagaacctccgctttcatgtagaggaagaagggaagggaaaagatgcttctgggaacaaggttaaagctgagccagctaaaattgatgctttccgagcctccctgtccaaacttggagatgtctatgtcaatgatgcttttgggactgcacacagagcccacagttccatggtgggtgtgaatctgccacagaaggctggtggatttttgatgaagaaggagctgaactactttgccaaggctttggagagtccagagcgacccttcctggctatcttgggaggagctaaagttgcagacaagatccagctgatcaataatatgctagacaaagtcaatgagatgatcatcggtgggggaatggcttttaccttccttaaggtgctcaacaacatggagattggcacatctctgtatgatgaagagggagccaagattgtcaaagatctcatgaccaaagctgagaaaaatggtgtgaagattaccttgcctgttgactttgtcactgctgacaaatttgatgagaatgcaaagactggccaagctactgtggcctctggtatacctgctggctggatgggcttggactgtggtactgagagcagtaagaaatatgctgaggctgtggctcgagctaagcagattgtttggaacggccctgttggggtatttgaatgggaagcatttgccaggggaaccaagtccctcatggatgaggtggtgaaagccacgtctaggggctgcatcactatcataggtggtggagacaccgccacttgctgtgccaaatggaacacagaggataaagtcagccatgtgagcactgggggcggcgccagtttggagctcctggaaggtaaagtccttcctggggtggatgctctcagcaatgtttagtattttcctgccttttggttcctgtgcacagcccctaagtcgacttagtgttttccgcatctccatttggtgttagtgcagctagtggccaagacgagcaccaggaacctaagcagcagctgcacagcatctcagctcgtctttactgcatgggattcattatagttaagtccatttaatttcttagtgactaaaccttgcattaaggcatatatttatactctgcctgtgaaaggaagtgagctgtaaaagcttagctctcttcgctgtatgtagcctctggttagcctgtcactgttcatgacagcatggaaataacgatgaggattccagctgtaggtttgggaggttgatgatattgaaccaataaaagatcccact

SEQ ID NO: 3013 - DNA, 18820 bp, Rattus norvegicus
  Genbank Accession No. M33312
gaattctagtacggtagccctggctttcatcaactagttagtgccaaatatttgagaaaagttacaggttcaagctaataaaagttgcagagagtataaaagaatgcagattagacaagaaaaaattaattagagcccttctagccaacaaagcctcagatccaggagaaaagactaccatagaaatggccaaaggcttatttatcaaagaaactgggctcagtggcagcaggatgaccaccttgcctgtgtttattgttgccacagcactgttggataaagatgcaaataaattaactttgggacagaagttgatcatgactgctcctccccctgcccccgcaattctgattgaggctcagtaatgcctacatgcttcattatcacactttactaatcagccctggctgagatattttccagccacctgtttccctgaaccctgcgactcttccacccaaccctgacttgggctgtccacttcatcaattcgatgaggttcaggcccagatacacaataccagaccttacttgaggaactctcatccatcagaaacagagcatacctggttcacggacagaagtagcttcatccataagggtcagaggagaacaggggcagcaataacaacagaaggaaaggtaatctggactcagtctcttccttccaggcacttcaactcaaaagaacaaactaagaacattaacacaagtcctcatcatgggaaaaggactggctgttagcatctgcagggacagccagatatgcatttacaactactcatgtgcacggagccatttacaaggaacaacagctcctaacagcagaaggaaaaactgtcagaaataaagataaaactctacaggacatcaaaaagaaaccaatggctagagataacagtctgactgataaggcttctaagaaggtagccttaaaggaaacagccaacactagattggccattgtcctacctgaaccacctagagtaactgataaatgcagaaaaagaaattaaatgggctggtgatggtcaactgaaggtaagcgaatattgcccacttctcagaaagatccacagtcactcacttgggagtaaaatgaatgacaaactttaaagtttgccagctgaccaacactcacaggaagcccaaacatccaaattcctgactgcgagttaagagacttggagcctactgggaaaattgatttttttcagaaatcaagcaagaaagatatggctcaaaatatctgctgatatttgtagacattttttttcgagatagatggatagatgtactaggagagatctttccgatgtttggagcacctaaggtaacaggatcagacaatgggcctgtcttcatatctcaggtaagtcagggacttgctaagatcttggggactaattggaaactccattgttcatatcatccccagagttcagggcaggtagaaaggatgaatagaactctaaaagagaccttaacagaattagccttggagactggtggggactgggtgaggctctttccctttgccctatattaggtgtacatggcattctagctcccattgtatctagcctacagttggtagctattacagaactgaaaaatgataatttaagatttaaggtcagagctaccaaataggctcatgaatttgtttgggcctaaattatgtaccttctgtgaagcaggcctggttccagaaccacacaagtcaaaagagactgggtctctatgaagagatttcaccaaggtgcgactaaacccatgtgaaaatggcaattcatcatcctgttgatcatgatcaccacctgggtgtacaacaaccacaccagaccagttcctccaatgaagaactctgcctggctccagctgtaccaaaatagagggttcaaaaggacaccaagcccttcaagttaaagttgactcagtctcagtcctgagtctcttgcccctgctaactctatgtctatatatactgtatgtcttagatccccccctgttaggaaggtaccctagctggatccttgataattttacttttatttctgacttttggcccctgtattttaagttgcttagtagtttataagagaattcagtcaagttaattatcttaaggcaacactatctacagctggaagcagggaagcaagcatatgagttagaagactataagcttcaagatcaaagctatgctaaaagaaaaggggggaatgaaaagccagagttggggtcaatctgaggccaatgagaaaaacccaccattaacatccaagcacagaacgacccttctcttccagaaagagtaaagctagtttagttcctggaacagctacaagccaaactgttgaacaaagccacatgtaactccccatccaacctccagaaagtcccagaatggcacactgaccacaagtcattttggaggttacttcaccccactaatagtagtactcttcctagttactgttgtgcaaattctgccccaattgtttgtaaggtatatacagacccagttagagtctgctcagggtcttctctttctgaaagggagtcaaccccgacgcattaaaataaagctagtcttggttttgcattgattagcacctccttgagtctcactcaaggggtcccggaaagggtcagattagacctcatatacctctgagcacagcttgtatggtgactaagatacaggatacccacaggctgggattagagagtttaaaccaaagatctttcatccatgtgctccatgcctgccctgtgcccagggggaaacatggattctaattacagaagcctccctaaggatcttaatgggaaccaagtaggagacttttccagttagaagccttctgacaactggggtttccccatattggtagtttaggttgttatttcacaaaactacaattccttcaccaactggagttctgagttattctcctctagtctggaaaatgatctgctaaaatatagctgtggttttctacccttttcaaagccatacatagacagggaaggttgcccatccttccctgaagttgaagatccttttagaagtcaatgcacccatcagtggtgataaatgcctttaatcccagtatgcagcaaactctgtgagtttgacgccaaattggtctacagagtgtgttctagaacagtcagagctaaagagagaaacactctgtggaaaagaaagaaagaaaaaagaaaggaaggaaagaaggaaggaaggaaggaaggaaggaaggaaggaaggaaggaaggaaaaagaaaggaaggaaggaaaaaggtacagagagagggaaagagggagggagaaaaataacatatatgaagacacagtacaggaccaatctgggctcaggtgcccactttagtctcctactggaattttcatccacttgtaccagaaactcagcacccacagatccttcttgccatgtgaccttccagtccatagtttggaatctttcctgttttccttactaatatttttctcctaataaaaagactaaaccatctagactctaggactccagagatgactctgtgggtaagagcacttgttgctcttgtagaagacccaggttttattcctagaacccacatggtggcttacaaccatgtgtgaccccatttccaaaggattcctctaaatcttttggcatctttggacagtgtgcccaattgttacccagacttaaatggaagagaaaccttcatattacataaaaaattaacacaataagatccataaagaaatatataaaagaagataatcttttttaaaaaggatacattggatacattgccaggcctggagagatggctcagtggttaagagcactgacagctcttccagaggtcctgagttcaaattcccagcaaccacatggtgactcacaattatctgtaatgggattcaatgcccactactggtgtgtctgaagacagtgacagtgtactcatatacatgaaagaaataaatgaatcttgagaacaacatttaatgcctgaagccatgtttcctgtattgttccagtcaaatctaagaatgtgaattctatcacagaccacaacatttacatctatgagggctttcttcatgagctcaaccatacaaatatagatttttagttctagatttgatctggtggacccagaaatggacagcctcctgataatagccacagtccccaatacagcaccaatctcatcatagcatttgaagagtgtattatatgttggcctgttcaccttgtccactaaaaccctcagcttggtccaccaaagcctctttgactgcattgtatcaacacaccaaagcacaccgaggctttaagaattttgaagtaagcctgccacccagaggtcttcctatttgcccatgttgtgggtgttgcaacaaagacagggtcagtgttaggagataggattggagggtaaaagactcaactagacaaacaggagcaaaggccatcctgtgtccctgggagtataaaggtactatctcagccttggctatcagcctgtcaatcctcactggccactatgctggacacaggactgcttctggtggtcatattggcctccctgagcgtcatgctcttggtgtccctctggcagcagaaaatcagggggagattgcctccaggacccactcctttgcctttcattggaaattatctgcagctgaatacaaaagacgtatacagttccatcacacaggtatcactggatgaggggatggatgggacatgggagcacaagaggctgtgatgttttgcatgttttgtggcagaagattcatagaggaatccaaagtcttgtattagtggagtttagaaagataaggagctatttcaagtctttggtttgttgtttgttgtttgttttgtttgttgtttgtttctttgtttctttgttttttcaatcatttatttgtagagtaacacataatctgacctctgtgtactggtccagttcagtgaataagtcatctaacagcccccatctaccccacatcagctcagtgagcgctatggtcctgtgttcaccatccaccttgggcctcgccgggttgtggtgctttatggatacgatgcagtcaaagaggctttggtggaccaagctgaggagttcagtggacgaggcgaacaggctacctacaatacactcttcaaaggctatggtgaggaggataccacattggggaacatgcccaaggacatttgttggcgtcatttaagtagccttcatactaactcatctctccctcaaggctgtacagagttctctgaatttctctccatatccatgttgaatgttggctctcattgtgaccctccctagcatttctgagattgaaaacagacttttgcaaattctgtgggttctttcttccatccttctctaccgttttcttccgccctttctaccacctatcactagataggaaagaaaaggagatagaggtgaaaggggacattactgttagattatttcctgctgattaggagtgacgagctccttagggaaagttttatcttctctgtcaggatatctaatttcttcttgttgttatttctttacataagactacttaacaaatcacaagcaacagcaactaaccaatagccaaaaccaatttctcagggtccttgcatttacacaaccttgaggagtcccagtatcctgagtgtcacacactctcagaaactatctgcagctggcaaaatcataacctcctgctttggacaacctgaaccagccccatatgccatacctgggagtaaacagaaacatatttctataatagttctgtatttttcaaagaaatcaaatttcttactacatctggccattgctgctcttctctctctctctctctctctctctctctctctctctctcacacacacacacacacacacacacacaaacacacacacacaaacacacacacacaaacacacacacacaaacacacacacacacaaacacacacacacaaacacacacacacgcacgcacacacacacaacctctcggcattctcctagatggatgactcctttttaatttagctgatatttttatccttcttaaacatttatccacacacagagcatcagttgcaggtctcaggcattcactcctgatgcctctggattggttttttagattctttgttcttacttttccatctatgggtgctgggctctcaagcacatctctgcacagtgtgtgtgcctggtgcccatggaagcaaaaagatggagtcagatctcctgaactccaggggttccctgagttccagggttatgagctgccaggtgagtgctggggtacaagcacaggtcctctgcaaggtcagccagtgctcttgagtgcagagccagctttgctgccccccactgcctatatttttaaatgctgttttacatactccatgtgttgtccctaagatgtgtataatgcttatagaacgtcacagtctggtaagtgctggccaaagctacagaagtataaaatggccttgaacagcaaaacactggttataagcaagaaaggtcaaaataaagagaaaatccacaaagagccaaatatctttataacattaattctgtagttaaaatttaacacagagagtgtatctcgttccttgaagaactgaaggacacacaaatgactacttctacctagggtcaaaatatagcggtgactacagctcaagacacacaaaaccagagtcaagaatcagggagtggtaataaaataataaaaaatcctggctcagggtttcttcccacctttccctgatgaaaggcacacacagcctttatattttagtctgccttatgcagcacaatagctgggcagctgcctaccctccatgctgttagaatccattttcctattgaaagccccaagttaatactttacaagtttctttataccatatttgctattcttgacccaactgaggagcccttttggccacactgtcttggcccatagcacatggtgtctctccttctaccttctgctctttcttcttccatggcttccacagaggctcctcaatcccattctccttcctcatgctctctagccccagaaaactaagcaccacaagtctcttctcccagctattagctgctgacatctttatttaccaatcagaatgaactgcgggcaggatcactcagacaaactacagactccaaatcttagaggccaacacttactgttataggaaacaataaaagacaaaaacctcaacaccagggtatgtttctgggtaggctgtccttgctttaatggggatttgctgttttcagaaaatgctcaatattgattgattttgccatttccaggaccctttgctgcattctgtctgtaagtctctttttatttgcctggctgacttgtttcaactttctttctctgactgtgtctgatgcacagtctgtgtttgtgtcttttgtgtccttgccatttctatccaactttgtctcttttctttcccccttagaacccctttccagggtgggcctcatccatcctcagcctcagtctacttctcctgaccccttatatttatatctctacaggcgtggcattcagcagtggggagcgggcaaaacaactcaggcgcctctctatagccacattgagagattttggtgtgggcaagcgtggtgtagaggagcgtatcctggaggaggcaggctatttgatcaagatgttgcagggcacttgtggtaagcaagagaccattaagtgtttgggcaagagaaagaacatccctgacacctagaccctatgggttgtggataagaagggcggggaagaccgcctaccaaaccatccccagaatctggtgctgagagattggtgcctcactccaattcccacaccatctgctaactcttctccctcataatgccaatgtcttccaaacaatgtcacccctctcaggagcccccattgaccccaccatctacctgagcaaaacagtctccaatgttattagctccattgtcttcggggaacgcttcgactatgaggacacggagttcctgtcactgctgcagatgatgggtcaaatgaacagatttgcagcttcacccacagggcaggtaacagatccagctctgccaattgtccttatagtgtcccacattgaccataccaacaaagggcaaggaccaccctgactctcatggctacaaacaaaagctcccctcaaaaacagaagctcccctcaaaaccagcctttacttcagaaaactgaacctttacatcagagcccacagaagctatccagtgctcacaatctaatgtcctctggatatctcagtagcctgagaacacagccctctgcttgactctcttccctgggcaggtttctccagcttaacctctaataaatcctctatgtggtcctcctgaaaatttagacaactgcccaagggatacaagtgaccacctctggccccctcctccaatcctgaacacctacctagttctgcaaaactgtggtcagtaaagctattcagtccatacacccagttctccccaaagatcccactgacacaatggcacaaaagtcacctgttgtctcaggtaaattcaggaatgagtagacaggcacctcaaccaaggcaaccaagcacagacctctggatggactgtttccccaaacacccatatgtctcccagctacacacaacccacatcaagacaatatctgacaggtgtgtctcacaccttataacctgaaccaccccaccatgaagacctgactatgtgaaaaaccgattctaatctcaaacaaatatcaagacatctaatcttagccctctcaaatgcccaaacatatagatacttgattcactgcgacactcatgtcctgaatactagaaacctggagtaatggtctgatccaaaaatcagttaaataactgaatgtctactaatgttcccttttgatccagttcattgggattgtaagacaatgaccttcattctttaaatcacctagaaaactgtggtctctggggcctctgacagttcagtggtttaagagcatgcactgctcatcctgaggaccgagttcagttcccactacctatgctgaacatttcaaaactctatgggagtacacctgcaccgtgcacataattaaaagtaaaatattcaaacgaatataaagagttctttcaagagtggaggtgctgtttgttgcaattcatcctaacataaatacatgaacacctggatggatcccttgagactcgacccactcccacgggtgttgccactgacaagccttttcttttctcctcccaccccccagctctatgacatgttccattcagtgatgaagtacctgcctggaccacagcaacagatcatcaaggttactcagaaactggaagacttcatgatagagaaagtgaggcagaaccatagtaccctggaccccaattccccaaggaacttcattgactcctttctcatccgcatgcaagaggtgatcccaatcatggtggatggaatgtctaaaacagggcagctctaaatcatcctagaaaaggaggaggaatataggcccattaagtgcccatgattctcctcacagtcccggttatagttaaacctcactctttcacctgttgagccttatccaagccagggtatgggttagcaaattaccatgacaaccgatattccagtgttcccctatgagacactgttttcagtgttcaactacttagcatgcactgaagctactgtcgaagaccctgtggagcctaaacttcgcaaagagggaaagtgtgcccagacttgcatgctgactttatggagacagaaaactatacagccttgcctctatggctctcaggcttttactattagccacatggtctctagcatttcatatctctgttaggaaatacacatcagtacacatcagtggcctaagacctgggtttttttttcttttgtctgttctagtaatttttttattgtttttcatttttgtgtttttttcttttattggattttttatttctatttcagatattatcccctttcttggtttcccttccagaaacctgctatctcctcatgcttctatgaggattctctcccacccacacaacactccctgccacctccctgtgctgacattcccctacactggggcatcgagcccagacaggaccaagggtctctcctcccattgatacccaacaaggccatcctctgttatacatatggctgaagcaataggtacatccctgtgtactcttgggatggtttagtcactgggagctctggtgggtctggttggttaatattgttgttcttcttatagggtggcaaaccccttcagctccttcagtcctttctctaactcctccatatgggaccattttctcagttcaatggttgactgcaagcatctgcctctgtaattgtcacgctctgcagagcctctcaggagacagctatatgaggatcctgtcaacatatatttcttggcatccacaatattgtgtgagtttagaggatgtcaatgggatgaatccacctgtagggcagtctctgaatggcctttccttcagactctgctccaaactttgtctttgtatttccttctttgagtatttttgttccccctttcaagaaggactgaagcatactcacttgagtctttcttcttcttgagtttcatgtggtctctgaattctatcttgggtattccaagtttttggactaatatttacttctcagtgagtgcataccatgtgttgggttacctcacttaggatgatattttttagttccatccatttgcctaagaatttcatgaagtcattatttttaatagcagtgtagtactccattgtgtaaatttactatattttttgtatatatttctctgttgaagaacatctagtttctttccagcttctggctattataaataaggctgttatgaacatagtggagagtgtgtctttgttatatgttggagcatcttttgagtatatgcccaggaatggtatagctgagtcctcacataatactatgtccaattttctgaggaacctccaggatgatatccagagtggttgtatcaaattacaatccaccaacaatggaggagtgttactctttctccacatccttaccagcatctgttgtcaccttcgtttttgacctttgccattctaactggtgtgaggtggaatctcagagttgttttgatttgcatttccctgatgactaaggaggttgaacatttctttaggtacttctcaaccatattcctaagctgagaattctttgcttagctctttactccatttttaatggggttatttgattctctggagtctaacttcttgagttctttgtatatatttaacattagccctctatcggatgtgggattggtaaagatcttttcccaatctgttggttgtcgatttgtcctaatgacagtgtcctttgccttacagaagctttgcaactttatgaagtagtatttgtcaattcttgatcttagagcataagccattggtgttttgtttaggaaactctccctggtgcccatgtgttcaagaccctttcccactttctgttctattagttccagtgtatctggttttattttagtttaattttatttttcttggataattatgtattacacatcaaatgttattccctttgtcccctctctcatatccccttcccctccctctgcctctatggggatgctaccacccccatccacccactcccacctcaaccccctagcattcccttacattgagaaaaagagccttcactagaccaagggcttttcctcctattgatgctggacaatgccatcctttgctacatatgcagctgaagccacgggtccttccatgggtacgctttggttggtggtttaggccctgggagctctcgtggagtctggttggttagttgatattattcttccatccctaaaatgaatgacagtcacctagacagagaaatgagcaaagcttctcatgcaaacccaagactgctaacacagcctggagatctttttccaacgattggtctggaccctatgagaactagatccaaaggaaattgcagaagtgctgcctattgcatccctctcctccatgaggaacttaatccacagttgacggctgtttagagacgatgaaataatattcctttgcagtgtggctactagtaaattgacctttctcaagtaaagaacccctcgcccatatgcatgcagccacacctaattataagcagttacccacaacacccccaacaaacaggaaaataggaaggagacttattaggaataagaaatggttcaaaaaaatggaaagtagaaaataatagaggggaatacgtttaaagtgcatttcatgtatacgtctgaaaaataaggactcaaggttcagtgggtatggaaggggattcatctgggagggtttggaggaggggtatgaatatattcacaatacaataaatgaaattctcaaagaattaataaaattatttataaaagaattactagaaatgtttcagaaaattaaaacccttaatgttccccaaggatgacaaaatgatagatttatgccctctctctctctctctctctctctctctctctctctctctctctctctctctctgcaggagaaaaatggcaattcagagttccacatgaagaacctagtgatgacaacactaagcctcttctttgctgggtctgagacagtcagctccacactacgctacggcttccttctactcatgaagcatccagatgtggagggtgaggctggctatgtggcagggaagttgggaaccgcagactctccaactgcttacaacctaacaatgaccctcacttctcccaggttcctggatgctcagtcatgctcagctatgcagagacaggggcatattaaatgcataaacacagttctcacaaacttaaaatattagacattcccaaattgatttcactctgacttccagatctctgctctctgttctcttccctgactcctgcttcttctccccaccatgattctgtcacgaaaaggataaaatgaccctgtccagcatttaggtatggatatatgtttaaatggtttaaatgcatgttatttacagagacatgtaatacatgcagtggtacacatgtgaactattccacctgctttgaggcctctggatttttaaaaataccccatctccgcttgtctttcagccaaggtccatgaggaaattgagcaggtgatcggcaggaaccgacagcctcagtatgaggaccacatgaagatgccctacacccaggctgtgatcaatgagatccaaagattttctaacttggctcccttgggcattcctcgaaggattatcaagaacacaaccttccgtggcttcttcctccccaaggtagcagccatgcccatccaggaggggcctccagcccacttactgatgcttcagggcttctttccatctgtagctatctaactccactctaattcctccaaccaaagaattcatccacatgtccccaaattcttgtccagctgctttgaactccattttctatctactcttctgccttgctaccttccaatctctcaactcctgggctagaggcaaaggcctgctgtcacactaacaccctatcttagcacatgatcccctggagctcaaatctccaattgctgatggcacatatcgtagcccctcaaatctcctattccctaatgccttttcctgaggagacctccaactctgtgccttgcagttgtctatatttggacatcctttctccatcaacccatcttctaaaatctcctttcttccctcttccagggcaccgatgtgttccctatattaggttctctgatgacagacccaaagttcttccctagccccaaagacttcgacccccagaacttcctggatgacaagggacagttgaagaaaaatgctgctttcctccctttctccactggtaaggagacagtgggttattgaactactgttcacaccaacatgggtagcacatgccagcttccctgtctgtgatgctgcctagaatcaggctaaccaggtatagcccctgcacctcccaagcaccagacatgctggatgcaggtgagaggatccctgggaccagtgatctgtgtcagagaccggggaggggttgggaataccaactttcctaggtgatgctcatgcaagcaatttcttcacactctttctaatgcagcttttaaataattgtttgtttttctttattttttaagtaatttatttaatgtgcaatggtgtgaggttgtcagatgccttggaactgaacttatagatgattatgagctgccatgtggctgctgagaattgaaccttggatcttcagaagaacagacagtgctcttaaccaatgagccatctcccagccccatcttcagactcttaaaagtgggataacaaccaggtggtataggtgcatgcctttaaccacagtactggtggatatctgagttcaacaccagcctgggactatagagtgagttacaggacaacccaggctacatggaggaaaccatgacttcaaaaactaaaaataaataaataataggtaggtagatagatagatagatagatacatacatacatagatacatagatacatagatacatagatacatagatacatagatacatagatacatagatacatagatacatagatagatgcatagatagatacatagatagatagagacatagatagatgcatagatagatacatagatagatagatgcatagatagatagatacatagatagaaagatgcatgtatacatacatgcatgcatacatagataaatagatgactcataaaaaattaaaagaataaaaaaataaacaaggccacagcagagcatctacatttgagaggataattaataattgatagaggaagcatctgtactccatattgctccagcctaaaatgagttgtcccacgttgtgtgtagggacaccagggttttaagagggttaggagcctttcctaatgatccctcatgctccagtatagcagccccttctccttttttttttctttttttctttattaacttgagtatttcttattaacatttcgagtgttattccctttcccggtttccaggccaacatccccctaatccctccccctccccttctttatgggtgttcccctccccaccctccccccattgccgcgctccccccaacaatcacattcacagggggttcagtcttagcaggaccaaggacttccccttccattggtgctcttactaggctattcattgctacctatgaggttggagtccagggtcagtccatgtatagtctttaggtagtggcttagtccctggaagctctggttggttggcattgttgttcatatggggtttcgagtcccttcaagctcttccagttctttctctgattccttcaacgggggtcctattctcccacccttcccccactgccgccctccccccaacaatcacgttcactggggctgaaccccatttttaatagggttatttgtctccctgcggtctaacttcttgagttctttgtatattttggatataagccctctatctgttgtaggattggtaaagatcttttcccaatctgttggttgccgttttgtcctaaccacagtgtctttgccttacagaagctttgcagttttatgagatcccatttgtcgattcttgatcttagagcataagccattggtgttttgttcaggaaattttctccagtgcccatgtgttcaagatgcttccccactttttttcctattagtttgagtgtatctggtttgatgtggaggtccttgatccacttggacttaagctttgtacagcgtgataagcatggatcaatctgcattcttctacatgttgacctccagttgaaccagcaccatttgctgaaaatgctatcttttttccattgaatggttttggcccctttgtcaaaaatcaagtgaccataggtaggtgggttcatttctgagtcttcaattctattccattgatctatctgtctgtctctgtaccaataccatgcagtttttatcactattgctctgtaatactgcttgagttcagggatagtgattccccctgaagtccttttattgttgaggatagttttagctatcctgggttttttgttattctagatgaatttgcaaattgttctgtctaactctttgaagaattggattggtattttgatggggattgcattgaatctgtagatcgcttttggtaaaatggtcatttttactagattaatcctgccaatccatgaacatgggagatctttccatcttctgaggtcttcttcaatttctttcttcagcgtcttgaagttcttattgtacagatcttttacttgcctggttaaagtcacaccaaggtattttatattatttgggactattatgaagggtatcgtttccctaatttctttctcggcttgtttctcttttgtgtagaggaaggcaactgatttatttgagttaattttatacccagccactttgctgaagttgtttatcagctttagtagttctctggtggaacttttgggatcacttaaatacactatcatgtcatctgcaaatagtgatattttgacttcttcttttccaatctttatccccttgatctccttttgttgtctgattgctctggcttgaacttcaagaactatattgaataagtagggagagagtgcagccccttctctttaagagaacacagctttgcacttggcactgaggcaaggcagcggtgagagcttccttcccaactgtgctccttccctctctcctcttcagggaagcgattctgcttgggagatggcctggctaagatggagctcttcctgctgctcaccactattttacagaacttccgtttcaagttcccaatgaaactagaagacatcaacgagtcccccaaacccttggggtttaccaggatcataccaaagtacaccatgagcttcatgcccatctgattctgagttgaatcaaggtggggcaagagggagagagagcctgaagtggggccagggtgcaggtggagagaacaggggaggtgaagatgagggttaagaagggaccacacccatggaagaaacacaaaagacttctcactttggtaaaattgtaacagtcctaataaaaagaaagaaatactcagtgggcagcagtaacaacaactgagactcatggggcaaaggtggctcacctctgcagaagctgtcctgtccttctctcagtcctctacacaagagcagcatgtccccaagtccaacgtacaggttgcaaagatggaacttacaaatttgaacctaaactgaggtggaaaaaactcaagttagctaggattgatgttttggactctatcaccagcattcaggagggagggaacatggctctctaccatgtctgccaggactacacagtgagagcttatctcaaaagaaaaaagaaaaaaagaaaaaaatttatatatatatatatatatatgtatatatatgtatatatatatatggagagagagagagagagagagagagagagagagagagagagagagagagagagtttgcattgtacatgatcagggaaataataaaaactagtttgacagtcacataccagtgggttctaatttatcaaactccacccccacccccactgccactgctgccctatgaaggaactgaacagaagcttaactttccttgggccatttcgacagctgttgtgtcatcaaggcttctgttttcctatggagacactacacatgggacagagaggataacagggagctcatgactgagagaccttcaggccaaagcacttgaacctttgtttatcctgtttattctgaattttctgcttctgggctctcatttccccaccattaaaatgagaatatcaatatttacagctgcactgcatctctttttggagtgattcctggtaactaagaaataagtagaaaatggaaggatgaaatccaccaggaggtttgagtaaattccactgtgggaaacacaggggactgtgggatggcaaggatgagagctggaaagaatgcaaggccacactatgtctcatgcatattttatatcttttttatattctttatatctttgtagtgtttttattagcctacaaagaaatacatttctcactggcaacttcttacatatatatcactacctatgttctcattcactttccttcgctggtcttggcctcttcgcaaaattattcaccggtaatttattcacactttctaatttttgagcatggtgcattccagtaagatttaatctctgtggccatggtgtttcacagctctgtaacactgaagcacattcatcatcaactgcactgaagtcatcaacttaagaagcaaaggaggattcttctggtctccatctgcgcccagagctaagtctgccccacaaccctccagattcaaaacctccccagacagagctagtcctccaggagtgctctcactactaaggccacaagtgagaccccatttcccttcaataccgatccaaagaggagcccaccagataccaggtaccaaagttaaatgaggatccgttgacctgcaggtc

SEQ ID NO: 3014 - DNA, 1994 bp, Rattus norvegicus
  Genbank Accession No. M33648
atctctcccaggggctgtggactgctggctttctgttgataccttagagatgcagcggcttttggctccagcaaggcgggtcctgcaagtgaagagagtcatgcaggaatcttcgctctcacccgctcacctgctccccgcagcccagcagaggttttctacaatccctcctgctcccctggccaaaactgatacatggccaaaagatgtgggcatccttgccctggaggtctactttccagcccaatatgtggaccaaactgacctggagaagttcaacaatgtggaagcagggaagtacacagtgggcttgggccagacccgtatgggcttctgttcggtccaggaggacatcaactccttgtgcctcacagtggtgcagaggctgatggaacgcacaaagctgccatgggatgccgtaggccgcctggaagtgggcacggaaaccatcattgacaagtccaaggctgtcaagacagtgctcatggagctcttccaggattcaggcaacactgacatcgagggcatagataccaccaacgcctgctatggtggcactgcctccctcttcaacgctgccaactggatggagtccagctactgggatggtcgctatgccctggtggtctgtggtgatatcgcagtctacccaagtggtaacccccgccccacaggtggtgccggggctgtggcaatgctgattgggcccaaggccccgctagtcctggaacaagggctgaggggaacccacatggagaacgcctatgacttctacaaaccaaacttggcctcagagtatccactggtggatgggaagctgtctatccagtgctacctgcgggccttggaccgatgctatgcagcttaccgcaggaaaatccagaatcagtggaagcaagctggaaacaaccagcctttcaccctcgatgacgtgcaatatatgatcttccacacacccttttgcaagatggtccagaaatccctagctcggctgatgttcaatgacttcctgtcatctagcagtgacaagcagaacaacttatacaagggtctagaggccttcaagggtctaaagctggaagaaacctacaccaacaaggatgttgacaaggctctgctgaaggcctccctggacatgttcaacaagaaaaccaaggcctccctttacctctccacaaacaatgggaacatgtacacctcgtccctctacgggtgcctggcctcacttctctcccaccactctgcccaagaattggccggctccaggattggagccttctcctacggctcaggcttagcagcaagtttcttctcatttcgagtgtccaaggacgcttccccaggttcccctctggagaagctggtgtctagtgtgtcagatctgcccaaacgtctagactcccggagacgcatgtcccctgaggaattcacagaaataatgaatcagagagagcaattttaccacaaggtgaacttctctccccctggtgacacaagcaacctcttcccaggcacttggtaccttgaacgagtggatgagatgcaccgcagaaaatatgcccggcgtcccgtctaaggagaccaatccatacaaccattccccggggaaagaatgtgagcagagccgttacccaaacggcttccacttaaaattccacccacagcagtgaacggtgaatagacacagcgaccccataggatctgctccgcggtgaagggcctccctctgtggatcctgggtgaccctccctgaagcagtgagcaccacaggttctgctgtggaccagagcccccctgtggagagggagaaagaaaggggagccgctgacctgcagggatacagaccttccccacagcctggcagccgcccgtttgttgcagcttattatcagactgtgggctatcatagttcatgctcgtttcttaaagtttcccgagaatttctaaaattttgtatctaaacttttaatatggcgattaaaaggagagaagga

SEQ ID NO: 3015 - DNA, 2140 bp, Rattus norvegicus
  Genbank Accession No. M33936
aaaccattaaccatgggtttctctgtatttacccctacaagatccctggatggtgtctctgggttcttccaaggggccttcctgctcagtctatttctggtgctgttcaaggcagtccaattctacttacgaaggcaatggctgctcaaggccctcgagaagttcccatccacgccttcccactggctttggggccacgacctgaaggacagagaattccagcaggttcttacgtgggtagagaaattcccaggtgcctgcttacagtggctctcagggagcaaaacacgagtcctgctctatgaccctgactatgtgaaggtggttctgggaagatcagatccaaaggcttctggaatttatcaattccttgctccctggattggttatggtttgctcctgttgaatgggaagaaatggttccagcatcggcggatgttgactccagccttccactatggcatcctcaaaccctatgtcaaaatcatggcggactctgtcaatataatgctagacaaatgggagaagcttgatgaccaggatcaccctctagagatcttccactatgtctccttgatgacactggacactgttatgaagtgtgctttcagccatcagggcagtgttcagttggatgtaaattccaggtcctacaccaaggctgtcgaggatctaaacaacctgactttctttcgtgtgaggagtgccttttatgggaacagcatcatctacaatatgtcctctgatggccgtttgtcccgccgggcctgccagattgctcatgagcacacagatggagtgatcaaaatgaggaaggctcagctgcagaatgaggaagagcttcagaaggccaggaagaagaggcacttggatttcctggacatcctgttgtttgccaaaatggaggatgggaagagcttgtctgatgaggacctgcgtgcagaggtggacacattcatgtttgagggtcatgacaccacagccagtggaatctcctgggttttctatgctctggccacccaccctgagcaccaagagagatgcagagaggaggtgcagagcattctgggtgatggaacctctgtcacatgggaccacctggaccagataccttacaccaccatgtgcatcaaggaggccctgaggctctacccaccagtaccttctgtgagtcgagagctcagctcccctgtcaccttcccagatggacgttccatacccaaaggtatcacaaccacaattttaatttatggccttcatcataacccaagttactggccaaacccaaaggtgtttgacccctctagattctcaccagattctcctcgccatagccatgcttatctgccattctcaggaggagcaaggaactgcattgggaaacagtttgccatgaatgagctgaaggtggctgtggccctgaccctgcttcgctttgagttgctgccagatcccaccaggatcccggtccctatggcaagacttgtgttgaagtccaagaatgggatccacctgcgtctcaagaagctaagataaatctggtggagataggacagctccagaggtctgctgcctgcaatacctgcatttgttactggctaatttatactcattttgctttctctttgattcccatcctctgctgagtgtcccgtcatctcatttttttgccctcatttctgtagcttttcctccagactccatcccagtttgtgcgtggacccatttcccatctgttttcacctctgaccagccactgaacttgccgccagcagcctgtcctccagcctgcttacccctcattatcattggactaacagagaaagatgtattttagagggaaactcttgcactttatctctcttcagttctcagagtcttgggacaatggacatcatgaattaaaatgttcttaaaaatcacatgctgggagaaaattaatcctaaaaattctggcaccagccagaggaaggatgttggctgaaaagaaaagatttctagatatttatgtttgtctcatggtgaaattaatgtatgcctcatcttttctatgaaataataattctgatacagaacagtagagagaaatgaatagtttttgctactttgggccaaactgtaaataaatccatttcacttc

SEQ ID NO: 3016 - DNA, 4127 bp, Rattus norvegicus
  Genbank Accession No. M33962
agccgctgctggggaggttggggctgaggtggtggcgggcgacgggcctcgagacgcggagcgacgcggcctagcgcggcggacggccgagggaactcgggcagtcgtcccgtcccgccatggaaatggagaaggaattcgagcagatcgataaggctgggaactgggcggctatttaccaggatattcgacatgaagccagtgacttcccatgcagaatagcgaaacttcctaagaacaaaaaccggaacaggtaccgagatgtcagcccttttgaccacagtcggattaaattgcatcaggaagataatgactatatcaatgccagcttgataaaaatggaggaagcccagaggagctatatcctcacccagggccctttaccaaacacgtgcgggcacttctgggagatggtgtgggagcagaagagcaggggcgtggtcatgctcaaccgcatcatggagaaaggctcgttaaaatgtgcccagtattggccacagaaagaagaaaaagagatggtcttcgatgacaccaatttgaagctgacactgatctctgaagatgtcaagtcatattacacagtacggcagttggagttggagaacctggctacccaggaggctcgagagatcctgcatttccactacaccacctggcctgactttggagtccctgagtcacctgcctctttcctcaatttcctattcaaagtccgagagtcaggctcactcagcccagagcacggccccattgtggtccactgcagtgctggcattggcaggtcagggaccttctgcctggctgacacctgcctcttactgatggacaagaggaaagacccgtcctctgtggacatcaagaaagtgctgttggagatgcgcaggttccgcatggggctcatccagacggccgaccaactgcgcttctcctacctggctgtgatcgagggtgcaaagttcatcatgggcgactcgtcagtgcaggatcagtggaaggagctttcccatgaagacctggagcctccccctgagcacgtgcccccacctccccggccacccaaacgcacattggagcctcacaatggcaagtgcaaggagctcttctccaaccaccagtgggtgagcgaggagagctgtgaggatgaggacatcctggccagagaggaaagcagagccccctcaattgctgtgcacagcatgagcagtatgagtcaagacactgaagttaggaaacggatggtgggtggaggtcttcaaagtgctcaggcatctgtccccactgaggaagagctgtccccaaccgaggaggaacaaaaggcacacaggccagttcactggaagcccttcctggtcaacgtgtgcatggccacggccctggcgactggcgcgtacctctgttaccgggtatgttttcactgacagactgctgtgaggcatgagcgtggtgggcgctgccactgcccaggttaggatttggtctgcggcgtctaacctggtgtagaagaaacaacagcttacaagcctgtggtggaactggaagggccagccccaggaggggcatctgtgcactgggctttgaaggagcccctggtcccaagaacagagtctaatctcagggccttaacctgttcaggagaagtagaggaaatgccaaatactcttcttgctctcacctcactcctcccctttctctggttcgtttgtttttggaaaaaaaaaaaaaagaattacaacacattgttgtttttaacatttataaaggcaggtttttgttatttttagagaaaacaaaagatgctaggcactggtgagattctcttgtgccctttggcatgtgatcagattcacgatttacgtttatttccgggggagggtcccacctgtcaggactgtaaagttcctgctggcttggtcagcccccccacccccccaccccgagcttgcaggtgccctgctgtgaggagagcagcagcagaggctgcccctggacagaagcccagctctgcttccctcaggtgtccctgcgtttccatcctccttctttgtgaccgccatcttgcagatgacccagtcctcagcaccccacccctgcagatgggtttctccgagggcctgcctcagggtcatcagaggttggctgccagcttagagctggggcttccatttgattggaaagtcattactattctatgtagaagccactccactgaggtgtaaagcaagactcataaaggaggagccttggtgtcatggaagtcactccgcgcgcaggacctgtaacaacctctgaaacactcagtcctgctgcagtgacgtccttgaaggcatcagacagatgatttgcagactgccaagacttgtcctgagccgtgatttttagagtctggactcatgaaacaccgccgagcgcttactgtgcagcctctgatgctggttggctgaggctgcggggaggtggacactgtgggtgcatccagtgcagttgcttttgtgcagttgggtccagcagcacagcccgcactccagcctcagctgcaggccacagtggccatggaggccgccagagcgagctggggtggatgcttgttcacttggagcagccttcccaggacgtgcagctcccttcctgctttgtccttctgcttccttccctggagtagcaagcccacgagcaatcgtgaggggtgtgagggagctgcagaggcatcagagtggcctgcagcggcgtgaggccccttcccctccgacacccccctccagaggagccgctccactgttatttattcactttgcccacagacacccctgagtgagcacaccctgaaactgaccgtgtaaggtgtcagcctgcacccaggaccgtcaggtgcagcaccgggtcagtcctagggttgaggtaggactgacacagccactgtgtggctggtgctggggcaggggcaggagctgagggtcttagaagcaatcttcaggaacagacaacagtggtgacatgtaaagtccctgtggctactgatgacatgtgtaggatgaaggctggcctttctcccatgactttctagatcccgttccccgtctgctttccctgtgagttagaaaacacacaggctcctgtcctggtggtgccgtgtgcttgacatgggaaacttagatgcctgctcactggcgggcacctcggcatcgccaccactcagagtgagagcagtgctgtccagtgccgaggccgcctgactcccggcaggactcttcaggctctggcctgccccagcacaccccgctggatctcagacattccacacccacacctcattccctggacacttgggcaagcaggcccgcccttccacctctggggtcagcccctccattccgagttcacactgctctggagcaggccaggaccggaagcaaggcagctggtgaggagcaccctcctgggaacagtgtaggtgacagtcctgagagtcagcttgctagcgctgctggcaccagtcaccttgctcagaagtgtgtggctcttgaggctgaagagactgatgatggtgctcatgactcttctgtgaggggaacttgaccttcacattgggtggctttttttaaaataagcgaaggcagctggaactccagtctgcctcttgccagcacttcacattttgcctttcacccagagaagccagcacagagccactggggaaggcgatggccttgcctgcacaggctgaggagatggctcagccggcgtccaggctgtgtctggagcagggggtgcacagcagcctcacaggtgggggcctcagagcaggcgctgccctgtcccctgccccgctggaggcagcaaagctgctgcatgccttaagtcaatacttactcagcagggcgctctcgttctctctctctctctctctctctctctctctctctctctctctctctctaaatggccatagaataaaccattttacaaaaataaaagccaacaacaaagtgctctggaatagcacctttgcaggagcggggggtgtctcagggtcttctgtgacctcaccgaactgtccgactgcaccgtttccaacttgtgtctcactaatgggtctgcattagttgcaacaataaatgtttttaaagaac

SEQ ID NO: 3017 - DNA, 451 bp, Rattus norvegicus
  Genbank Accession No. M34331
tcctctttctctcgaaccgggcggcctcatccgcgaacagcgcagcaatggccaagattaaggctcgggacctgcgcggcaagaagaaggaggagctgttgaaacaactggatgatctgaaggtggaactgtcccagcttcgcgtggccaaagtgacaggcggcgccgcgtccaagctctccaagatacgagtcgtacgcaaatccatcgcccgtgtcctcactgtcattaatcagactcaaaaggaaaacctcaggaaattctacaagggaaagaagtacaagcccctggacctgcgacccaagaagacaagagccatgcgccgccggctcaccaagcatgaagagaagctgaagaccaagaagcagcagcggaaggagcggctgtacccactgcgcaagtacgcagtcaaggcctgagacgacgacaataacaataaagtccaaaactg

SEQ ID NO: 3018 - DNA, 1799 bp, Rattus norvegicus
  Genbank Accession No. M35162
gaattccctggggctagccggacctgtcccgcgcacagcccgcaaggccatggacgttctgggctggctgctgctgccgctccttctgctgtgcacgcagccgcaccatggcgccagagcaatgaatgacattggggactacgtgggctccaacctggagatatcctggctccccaacctggatggactaatggagggctacgcccgaaacttccgaccaggcattggaggtcctccagtgaatgtggcgcttgccctagaggtggccagcattgaccacatctcagaagcaaatatggaatacaccatgacagtgttcctgcaccagagctggcgagacagcaggctgtcctacaaccataccaacgagaccctgggcctggatagccgcttcgtggacaagctgtggctccctgacaccttcattgtgaatgccaagtctgcctggttccatgatgtgaccgtggaaaacaagcttatccgcctacagcccgacggtgtgattttatacagcatccgcatcacctccacagtggcctgtgacatggaccttgccaagtaccccatggacgagcaggagtgcatgctggacctggagagctatggctactcttctgaggacattgtctattattggtcagaaaaccaggagcagatccacgggctggacaggctgcaactggcccagttcactatcaccagttaccgcttcaccacggagctgatgaacttcaaatcagctggccagttccctcgactcagcttacacttccagcttcggaggaaccggggtgtctacatcatccagtcttacatgccctctgtcctcctggttgccatgtcctgggtctccttctggattagccaagcagcagtgcctgccagagtatctctaggcatcaccactgtgctgacaatgaccacactcatggttagtgcccgctcctccctcccgcgggcttctgctatcaaggctctggatgtgtatttctggatctgctatgtcttcgtgtttgctgccctggtggagtatgcatttgcccacttcaatgctgactacaggaagaaacggaaagccaaggtcaaggtcacgaagccaagggcagagatggacgtgaggaacgccattgtcctcttctccctctctgctgctggggtcagccaggagttggctatctcccgccgtcaaggccgggtccctgggaacctcatgggttcctataggtctgtagaagtggaggcaaagaaggagggggggtcccgcccaggaggcccaggaggcatccgttccagactcaaacccatcgatgcagacaccatcgacatctatgcccgcgctgtgttcccggcagcctttgcagcagtcaacatcatctactgggcggcgtataccatgtgacggcagtgcgtacaccacatgacggctttacatgtaccacgtgcggtggttgccacaaactcctggaggaacagccctctccgtggatcccaaagtgggacagagaggagcgtccgctccctgggctttacctcaattttgctctaccagcctgcacttcctgtagatggagcaggatgggctttgcacagagggccattagttggcctgtccctgaagctgagcctgcactaaggtgcccttgggagctgtgaagttttagactcaggatgggcctgatttctgggcctttgctctgtgggatcaggatcagagagaaagagagtaggggtggatgaccactctcatggtgaactggaggagaagggcattatgaggcctctttggtcccagggaattc

SEQ ID NO: 3019 - DNA, 511 bp, Rattus norvegicus
  Genbank Accession No. M35601
  misc_feature (1)..(511): n = a or c or g or t
cctgaacttggttccttttatgacagccgctttggttcactcacaaagaacttcaaagaatttggcagtaagacctctgattctgacatcttcacagacatcgagaaccctagctcccatgtacctgagttttcttncagtagtaaaacctcaactgtcaggaaacaagtaaccaagagctataaaatggcagatgaggcagcaagtgaagctcaccaagaaggagacactcgaaccaccaagaggggccgagctcgcacaatgagaggtatccacgcttaactctgggaagttgccctgaccccctagactaagttaaccatttctgcaaagtgcttaccaggcgcgctctttcttaacctcttctagtgctttggtggaatctcattttttttcatgctagactgtacgttccttgggggcagggactttgccatgtgtctatttctctaattccccaatgcataacagtgcagtcatttctcaataaatatattttaaataaatgaac

SEQ ID NO: 3020 - DNA, 946 bp, Rattus norvegicus
  Genbank Accession No. M35826
attaatatcctaacactcctaatcccaatcttaattgccataggccttctcaccctagtagaacggaaaatcctaggctacatacaattacgcaaaggccccaacaacgaaggcccatatggtaaactacaaccatttgcagatgccataaaactattcataaaagaacccatacgccctctaaccacctcaatatcactatttattatcgccccaaccctctcccttacactagctctaagcctatgaattcccttaccaataccccacccccttatcaacctcaacctaggcataccatttattctagccacatccagcctttcggtctactccattctatgatcgggatgagcctcaaattcaaaatactccctattcggagccctacgagccgttgcccaaaccatctcttacgaagtcacaatagccttatacctcttatccgtcctcctaataagcggctccttctccctacaaatacttatcactacacaagaacatatctgactattaatccccgcctgaccaatagccataatatgatacatttcaaccctcgcagaaacaaatcgagctcccttcgacttaacagaaggagaatcagaattagtctcaggctttaacgtcgaatacgccgcaggaccattcgccctattcttcatagccgagtacaccaacattattctaataaacgccctaacatcaattgtattcctaggccccttatatcatatcaattaccctgaattatactcaaccagcttcataacagaaacactacttctatccacaactttcctatgaattcgagcatcctacccccgttttcgatatgaccaactaatgcacctcctatgaaaaaatttcctcccactaacactagcattctgcatatgatacatttccctgccaattttcctagcaggaattccaccctacacat

SEQ ID NO: 3021 - DNA, 562 bp, Rattus norvegicus
  Genbank Accession No. M36151
agagactccccaagggatttcgtgtaccagttcgagggccagtgctactacaccaccgggacgcagcgcatgcggctcgtgaccagacacatctacaaccgggaggagtacgtgcgcttcgacagcgacctgggcgagtaccgcgcgctgaccgagctggggcggccctcagccgagtactggaataagcagtacctcgagcagacgcgggccgagctggacagggtctgcagatacaactacgaggggccgggggctctcacctccctgagacggcttgagcagcccaatgtggccatctccctgtccaggacagaggcccttaaccaccacaacctgctggtctgctcagtgacagatttctacccagcccagatcaaagtgcgctggttccggaatggccaggaggagacgacgggggtcgtgtccacacagcttattaggaatggggactggaccttccagatcctggtcatgctggagatcacgcctcagcggggagatgtgtacacctgccatgttgaccaccccagccttcagagccctgtcacagtggagtggc

SEQ ID NO: 3022 - DNA, 4194 bp, Rattus norvegicus
  Genbank Accession No. M37394
ggaccgccaccaagacaggcgacgggtcacctggacgcgagtctgagtccgggtcccgtcgtcgttgccgacgcagtcaccgggcacgaccgtgggactcagtctgactcggattaatcccggagagccagagccaacgactgccgagccgggatgcgaccctcagggactgcgagaaccaagctactgctgctgctggctgcgctctgcgccgcaggtggggcgctggaggaaaagaaagtttgccaaggcacaagtaacaggctcacccaactaggcacctttgaagaccactttctgagcctccagaggatgttcaacaactgtgaagtggtccttggaaacttggaaatcacctatgtgcaaaggaattatgacctttccttcttaaagaccatccaggaggtggctggctatgttctcattgccctgaacaccgtggagagaatccctttggagaacctgcagatcatcaggggaaatgctctctacgaaaacacctacgccttagccgtcctgtccaactatggaaccaacaaaactgggcttagggaactgcccatgcggaacttacaggaaattctgatcggtgctgtgcgatttagcaacaaccccatcctctgcaatatggagaccatccagtggagggacatcgtccaagatgtctttctgagcaacatgtcaatggacgtacagcgccacctgacgggctgcccgaaatgtgatccgagctgtcccaatggaagctgctggggaagaggagaggagaactgccagaaattgaccaaaatcatctgcgcccagcaatgttcccggcgttgtcgtggcaggtcccctagcgactgctgccacaaccagtgtgccgcagggtgtacagggcccagagagagtgactgtctggtctgccacaggttccgagatgaagccacgtgcaaagacacctgcccaccactcatgctgtacaaccccaccacgtaccagatggatgtcaaccctgaggggaagtacagctttggtgccacctgtgtgaagaaatgccccagaaactacgtggtgacagatcacggctcgtgtgtccgggcctgtgggccagactactatgaagtagaagaagatggagtcagcaagtgtaaaaaatgtgacgggccctgccgcaaagtttgcaatggcataggcattggtgaatttaaagacacactctccataaatgctacaaacatcaaacacttcaagtactgcactgccatcagtggggacctccacatcctgccagtggcctttaagggggattctttcacccgcactcctcctctagacccacgggaactagaaattctcaaaactgtgaaggaaataacagggtttttgctgattcaggcttggcctgaaaactggactgacctccatgcttttgagaacctagaaataattcgtggcagaacaaagcaacatggtcagttttctctggcggttgtcggcctgaacataacatcgctggggttgcgttccctcaaggagatcagtgatggggatgtgattatttctgggaaccgaaatttgtgctacgcaaacactataaactggaaaaaactcttcgggacgcccaatcaaaagaccaaaatcatgaacaacagagctgaaaaggactgcaaggccacgaaccacgtctgtaatcctttatgctcctcggaaggctgctggggccctgagcccacggactgtgtctcctgccagaatgtgagcagaggcagggagtgcgtggacaagtgcaacatcctggagggggaaccgagggagtttgtggaaaattctgaatgcatccagtgccatccagaatgtctgccccagaccatgaacatcacctgtacaggccgggggccagacaactgcatcaagtgtgcccactatgttgatggtccccactgtgtcaagacctgcccttcgggcatcatgggggagaacaacaccctggtctggaagtttgcagatgccaataacgtctgccacctctgccatgcaaactgtacctatggatgtgctgggccaggccttaaaggatgtcaacaaccagaagggccaaagatcccatccatcgccactgggattgtgggtggcctcctcttcatagtagtggtggcccttgggatcggcctcttcatgcgtcgacgtcagcttgtccgaaaacgtacactacgccgcctgcttcaagagagagagctcgtggaacctctcacacccagcggagaagctccgaaccaagcccacttgaggatattaaaggaaacagaattcaaaaagatcaaagttctgggttcaggagcatttggcacagtgtataagggtctctggatcccagaaggcgagaaagtgaaaatccctgtggccatcaaggagttaagagaagccacatctcccaaagccaacaaggaaatccttgatgaagcctacgtgatggccagtgtggacaaccctcatgtatgccgcctcctgggcatctgtctgacctccactgtccagctcattacacaactcatgccctatggttgcctcctggactatgtccgagaacataaggacaacattggctcccagtacctactcaactggtgtgtgcagattgcaaagggcatgaactacctggaagaccggcgtttggtacaccgtgacttggcagccaggaatgtactggtaaagacaccacagcatgtcaagatcacagattttggactggccaaactgcttggtgctgaggagaaagaataccatgcagaggggggcaaagtgcctatcaagtggatggctttggaatcaattttacaccgaatttatacacaccaaagcgacgtctggagctatggagtcaccgtgtgggaactgatgacctttgggtccaagccttatgatgggatccctgcaagtgagatctcatccatcctagagaaaggagagcgccttccacagccacctatctgcaccatcgacgtctacatgatcatggtcaagtgctggatgatagatgctgatagccgcccaaagttccgagagttgattctcgaattctccaaaatggccagagacccacagcgctaccttgttatccagggggatgaaaggatgcatttgccgagccctacagactccaacttttaccgagccctgatggaggaggaggacatggaagacgtagttgatgctgatgaatacctcatcccacagcaaggcttcttcaacagcccatccacgtcacggactccactcttgagctctctgagtgcaaatagcaacagttccactgtggcttgcattaatagaaatgggagctgccgtgtcaaagaagacgccttcttgcaacggtatagctccgatcccaccagcgtcctgacagaggacaacatagatgacacattccttcccgtgcctgaatatataaaccaatctgttcccaagaggccggctggctctgtgcagaacccagtctatcacaatcagcccctgcatccagctcctggaagagacctgcattatcaaaatccccatagcaatgcggtgagcaaccctgagtatctcaacactgcccagccgacctgcctcagtagtgggtttgacagctctgccctctggatccagaaaggcagccaccaaatgagcctggacaaccctgactaccagcaggacttctttcccaaagaagccaagccgaatggcatctttaagggccccacagctgaaaatgcagagtacctgcgggtggcaccgccaagcagtgagtttagtggagcatgacattgaagaggcattgtaccagttacaaaccggactttccagaggcccaggaccaagccatggcagcacctctgctcctgacagccatgtccacattgtgtcaaatgtcaaaccctcagactggctttaaagcataactctgacgggctttgtcactgagccaagaagtgggcccctcccctgatgctctttgggaagttgaaggtatatctattggtcttcgaactgtgaagattccactgaaaggtatccatcgagaacattgtccttttggaacagaaggttgcctcatggtgaggtacatagggggaaaaaaaacagacctatggcgcttgctgacatagggaactctgggattcttgtctttattgatttgctggaattcgatatcaagcttatcgataccgtcga

SEQ ID NO: 3023 - DNA, 1877 bp, Rattus norvegicus
  Genbank Accession No. M38566
ggtctctggctctaaactcttggcttctcagacacgatctatggctgtgttgagccgcatgagactgagatgggcgcttctggacactcgtgtgatgggccatggcctctgcccacaaggggccagagccaaggccgcgatccctgcagccctccgggatcacgagagcacggagggtccaggaacaggtcaagaccgaccgcgcctgcggagtctggcggagcttccgggacccggaacgctacgctttttattccagctatttctacgaggctatgtgctgcacttgcacgagctccaggcgctgaacaaggccaagtacggcccaatgtggacaaccacctttgggactcgcaccaatgtgaatctggctagcgccccgctcttggagcaagtgatgagacaggagggcaagtaccccataagagacagcatggagcagtggaaggagcaccgagaccacaaaggcctctcctatgggatcttcatcacacaaggacagcagtggtaccatctgcgtcatagtttgaatcagcggatgctgaagcctgctgaggcagccctctacacagatgccttaaacgaggtcatcagtgactttattgcccggctggaccaggtgcggacagagagtgcatcaggggatcaggtgccagatgtggcacatcttctctaccaccttgccttggaagccatctgctatatcctgtttgagaaaagggttggctgcctggagccctccatccctgaggacaccgccaccttcatcagatctgttggactcatgttcaagaactcagtctatgtcactttccttcccaagtggtctcggcctctgctgcccttttggaagcgatacatgaataactgggataacattttctccttcggggagaagatgattcatcaaaaagtccaggagatagaagcccagctacaggcggctgggccagatggggtccaggtatctggctacctgcacttcctgctgactaaggaattgctcagtcctcaagagactgtcggcacctttcctgagctgatcttggctggggtagacacgacatccaatacactgacctgggccctgtatcacctttcaaagaacccagagatccaggaagccttgcacaaggaagtgactggtgtggtacccttcgggaaggtgccccagaacaaggactttgcccacatgcccctgctaaaagctgtgattaaggagaccctgcgcctctaccctgtggttcccacaaactcccggatcatcacagaaaaggaaactgaaattaatggcttcctcttccctaagaatacacagtttgtgttatgcacctacgtggtgtcccgagatcccagtgtctttcctgagcccgagagcttccagcctcaccgatggctgaggaagagagaggacgataactccgggatccaacacccatttggctctgtgccctttggctatggggttcggtcctgcctgggtcgcaggattgcagaactggagatgcaactcctgctgtcaaggctgatacaaaagtatgaggtggtcctgtctcccgggatgggagaagtgaagtctgtgtcccgcatcgtcctggttcccagcaagaaggtgagcctacgctttctgcagagacagtagtaccaagctgggctcctgtctccatgggacttgtccagaagccctggcacagaagttcttggccagtctcacgtcacatgtcacgatgccagattcaacaggggacctctctgccctttccatagacaccagacgtctggcacaatctctactgagcagcacccatttaagacattagagcacctcatatcacaggacggtgcttgggtacaatttaaaataaaatttaaaattc

SEQ ID NO: 3024 - DNA, 2335 bp, Rattus norvegicus
  Genbank Accession No. M57507
ctccagtggctgagtgatcaactatactcgatgtatcttccagggcttctgcagaagtgcaagatgtcttcatgacctacaccgtgtatgatgacatcatcaccattaagctcatccaagaagcctgcaaggttctggatgtgtccatggaagccattctgaagctctttggcgaatacttctttaagttctgtaagatgtctggctatgacaggatgctgcggacacttggaggaaatctcaccgagtttattgaaaacctagatgcactccacagttacctggcactgtcctatcaggaaatgaacgcaccatcctttcgagtggaggaaggagctgacggggcgatgcttctccactactactcagacagacatggtctgtgtcacattgtaccaggtatcattgaagctgtggccaaggacttctttgacactgatgtggccatgagtatcctggatatgaacgaagaggtggaaaggacagggaagaaagaacatgttgtgtttctggtcgtgcagaaggctcacagacagataagaggagcaaaggcaagccggccacaaggcagtgaggacagccaggcagaccaggaggctctccagggaacactccttcggatgaaggagagatatttaaacatccctgtttgccctggggagaaatctcactcaactgctgtgagggcatcggtcctttttggaaaagggcccctcagggacaccttccagcccgtctatcctgagagactatgggtcgaagaggaggtgttctgtgatgcttttcctttccacattgtctttgatgaagcactaagggtcaagcaagctggagtgaatattcagaagtatgtccctggaatcttaacccagaagtttgcactagatgagtatttttccatcatccaccctcaagttactttcaacatctccagcatctgcaagttcattaacagtcagtttgtcttgaagacaagaaaagaaatgatgcccaaagcaaggaagagccagccgatgctcaaactccggggtcagatgatctggatggagtctctgaggtgcatgatcttcatgtgttccccaaacgtccgcagcctgcaagagctggaagagagcaagatgcatctttctgatatcgctccgcacgacacgaccagggatctcatcctcctcaaccagcagaggctggcagagatggagctgtcctgccaactggaaaagaagaaggaggagttgcgtgtcctttccaatcacctggccatcgagaagaagaagacagagaccttgctgtatgccatgctgcctgaacatgtggccaaccaactcaaggagggcagaaaggtggctgcaggagaatttgaaacatgtacaatccttttcagcgatgttgtgacatttaccaacatctgtgcagcctgtgaacctatccaaatcgtgaacatgctgaattcaatgtactccaagtttgacaggttaaccagtgtccatgatgtctacaaagtagaaacaataggggatgcttacatggtggtgggtggagtaccagtacccgttgaaagccatgctcaaagagtcgccaattttgctctggggatgagaatttctgcaaaagaagtgatgaatcctgtcactggggaacctatccagatcagagtgggaatccacactggaccagtcttagcaggtgttgtgggagacaagatgcctcggtactgcttgtttggtgacactgtaaacacagcctctaggatggaaagtcacgggcttcccagcaaagtgcatctgagccccacagcccacagagccctgaaaaacaaagggtttgaaattgtcaggagaggcgagatcgaagtgaaggggaaaggaaagatgaccacatactttctgatccagaacctgaatgccaccgaggatgagataatggggcgaccttcagcccccgctgatgggaaggaagtatgtactcccggaaaccaagtcaggaagtcccctgctgtcccgaggaacacagaccatcagcaacaagtctacaaaggagacccagcagacgcttctaatgaagtcacacttgctgggagcccagtggcagggcgaaactccacagatgcagtcaataaccagccatcaccagatgagaccaagacaagtgtcgttgctagtggccctgtgctgtctgctttctgtgttgtgctgtgatcacgagaaaaagtgatcctatgggatccatttcctgtattccatggcagcaaagggaattaatttataaaaatgcttaagttcaaaatgtttttgtttccatatctcccttggggcccctttgagaataaaaaaattag

SEQ ID NO: 3025 - DNA, 16299 bp, Rattus norvegicus
  Genbank Accession No. M57718
  misc_feature (1)..(16299): n = a or c or g or t
attcaattgatatagtcccgttgaagacacactttattcaacctctcaaaagtccaagacaataaagtctcaaaccaaaagaaatatgccaagtctcatataagcatgggcttggtagaatattattagagtctacagcagaaacttttcataaatggactaaactttccaagcgttaggttgactgaatggatttttttaatgaaattcaactgtatgctatctacaaaaaaaatctcacaagaaggtgctaagggatggaaagaaacccactgattccaggaaagcaaaacaagcaccagagagagcccttggcatcccaaggcatggactgcccgtgagactggcctacctagaaggagaagagcagcagtgcctagatgctttctagtctgaattagcaaccagccaccatccatttggcatggacaattcagaagaaactatgtaggtgctgggtctgctgtggaaactcaaggacctcacaagagcaacaaataaagccacagacataagctatgcagcttgggaaagagccagtgtgtgaggacccccatatcacacaagactttaacaagagatatttatttttatatgacaaccttgtttgatttttaataattaaatgtttcaagaaaagataaaaagattaatggatgaatatttaaggaaattatgattattctgcttaacttatatgtgcagtacccaggtgttgaaatatcacactgtatcctataagtgtatacgccaaatacaatgaaaaagggaaataaaagccaaacaagtcaatgttcttgactagcacaaagagaggaaaatgggtgcaggtctggctattagccactgtcggctggaaaaaaaaaaatcatgtctctgattcccaaggtaaatcattcctgccaactgaactttgagatcaagattggtctgcctcacctttctccctcccacaggtaggcgggcaatccttacaggatttaggcaagaggcagaaaggatctgtgagagtgagggcagctactgaggagtggctgcaccatgagcgtctctgcactgagctccacccgcttcacgggcagcatctctggcttcctccaagtggcctccgtgcttggtctgcttctgctgctggtcaaagcagtccagttctacctgcaaaggcaatggctactcaaggctttccagcagttcccatcacctcccttccactggttctttgggcacaaggtatgaaggaaagggaaggatgggtgggaaagcagggaagatgggtgtctcagagactggtnatcgaaatcacaggacaaagcctgatgtataaaaattccaagtacctcatgagatacccagctcaggctgaggcacaccatccaacgatagggttattcaaccagtctggctgttgctcaactctgtactgatagccccacactttgaaagctttagttggtcttacctagtctcctcctcttctggctgagtacctttaatatctctgctgttctcaaacaacttttaagtagttccttacctagtgagttacctaccgctattctctcccaagctcagggcttgccagggaatgnatcagtgagttgaaaatcttgcccctgtgggttcttggtagagcagtagtgcacatcttagaagataccaggcacaggaagggttcacattgctgggatcagtgggtggctgccccagactaggagtattttcaggattggtgaaggtccaaattgaaatcccaaagtcatggcacattaaaggaaaaggctggggagggtcctcagatgacagcactaatgttagaattcccacagggtcatttagctctcccttctccttcccacacaccctgcactgtaagctacttagattgaatttatttccttgtaccacagagttcagctcaagagccaggaacagattataaaattccctagaaagggatagcagcctgtaggctaggaaggctgtaggccactgacccattgcactgtcaccccagggaataatgtacagagccaatgaggctacatagaaaggcgttcaacaaaggattgtgcaatagatgctcttagaaagacctgggtatgcagtgttttgtgtgcagatctgagaatctgaccctgtggctcctctgaggaacacagctccaaccaccaggactctcgaatctccctcaggatcagccctcgtacagcaaagctatgagtaatagcacagataattcatcgaactgcctcaccctcctgacagcttcggaaaaatccaaaactatgttcctgtgtttggtctcctcttgtctccagtccaaaaaataatcaagagtcccactaccttctttttccctcaacagcagtttcaaggtgacaaagaactacagcaaattatgacatgtgtggagaatttcccaagtgcctttcctcgatggttctggggaagcaaagcctacttaattgtctatgaccctgactacatgaaggtgattctcgggcgatcaggtgagcgtgacacgctgttgtgaagacataagcacattcctccttggtacttgccctaggctgtcaaattccagaagagcgtgaccctccacactctaccattcttccagactacaacccagcacagggccaacaatactcagaactgaaaagtcaaatctcttagcctaatgtctttgtctttctttattatttattcaaattaagatggtaagtctagttaattgtttcaggtttgaaatctctaattgttacctgcctgactcatagaataacgaagccaccacaaacacaccaacacacacacacacacacacacacacacacacacacacacacacacacaccacttgttccattctttgactttgatctcatggactgtttctcaccagctcagcatctcagccatggaggagtccagctactagaacacgaatcctaaccttcctaagcctgaatgttaggacagagtttgaagggaatatgagaaattgggcagtgagttcagacagtttgccaacagacagcacttaaaacatcatagaaactcgtgcctttaaccacagttgccttggggctgccttttaatcccttttcttgttaagtcattgtttccctttcagatccaaaggccaatggcgtctacagattgctagctccttggatcggtatgtatgtctaagttgggaatgtggtctacttctaattggattttccgagtgctgtgcctctggttcacagagaataaatgtgacagactgccactatcatggtctacccccaaatctctacttctgacccttcacttctccaaacagtcctatctgaacatcagtgtgatctgcctccttctaactctttccgagttttatctcacagctctcataatcacagcatgtatgccagtgccgctagctgggaaattcacgttctggactgtagcattcttcagaattatctctaacacttcatagttccctgtccccaatttatttagtggtctctctgatttgatcacacatatacacacacctctctcctgcccaggatatggtttgctcttgctgaatggacaaccgtggttccagcaccggcgaatgctaaccccagccttccactatgacattctgaaaccctatgtaaaaaacatggctgactccattcgactgatgctagtgagttcatttaactttattctcctctattcccctcagctgtgctgttctttctacatcagctgcagctttggctactactactgccacagataccatagctgctgtggctgcggctgcttcttcttcttcttcttcttcttcttcttcttcttcttcttcttcttcttcttcttcttcttcttcttcttcatcgtcttcatctccttttttcttcttccttctctgcttatagtctcctctctcctcaatctctctcttcacctactcagtgtatgcatcaacaagctttacatatgtattctactttgaatacaggttcttcacatatagttaaaatagaaatattccaggtactaggatatggccatacttgcttattacccaaggcaaagagcatcagagcatcttctccttcttcaaatcttcaactttagagagacttcccaggatgacacttagttggggtttcccttgggtcttagtgcttctgcatggacttgagtcagagagatggactccagatccacattgtcagagccaaaccttccataccaccacctttcaacaggcctctgggttatgactgttttagttcattggagctagcttatagttcagaggttggtccattgccatcatagtggaaattatggtagaacacagacatatatggtgtgctagggaggtagctaagaattctatatcctgatgcaaaggcagcaggaagagagtgagacactagtgtgccttgagcatctgagttctcaaagccctaccccaatgaccacttcctccaacaagactacccctactctaacaaggccacacctcctaatggacctatgagggccgttttcattcaaaccaccaaccacattcctctccctgacccccataagcttgtagccatatcttaatgcagaaatacaatcagttcaacttcaaaagtcctcatagtctaccacagcactgttcaaaagttcaaagttcaaagtctaagagactcatgcaatctcttaactttaatcctctataaaatcaaaataaaaaaaacagattacatactcctgacatgtacgggatataccttacaatcccaaaatggagaaaaggcagcatggtgaagaaatactgaaccaaagcaagactggaaaaacgttggcaaactccaaactctgcatctcaatgtcttatgtcaaagtgctcttctgatttccaactcctttcagctttgttggctggttccactccctgttagcagctttgctcagcaaacaacccacggcatctccaacactgtaggcttccaaggcaattgtggcttcatcttcaagcttcacacagtaacctctttaagcctctatgcaagaacacccatcacacgtgcctggcttcagcagttttccttagacaaggagggcaatcccataatccattccttctttccttgactctaaaccagaaccatgtggccaaagctgccaagttctcatactcattcaattacatcttcaccagctggttttgatggtttcctttactgcctaagcttggctgtcctaaaactcaatctgtgtaacaggccagccttaaactttaagatccacaaacctctgcctcctgagcacttggatcaaaggtgtgcaccaccaggcctggccctgggcttttctttaattccttttcacttttctttaatttcttttccaaaattggaagtttatctgggtgggatcttggtctgaggtcaccgctccctttattccacttagcatcaagcttttctctaatctgtttatctccttcaacacaggccttagctacagtctacttcctggtgcctcctttctcctcaaagtatgcatttttgtattttttctctttctcagtttgctccttttcactgtagatttgcatgagcgaatactaataaccatacaacaaaatccatactaggcaattgtaagatatcctctgccaatgcagctaatccaactcttcaccttagccttaggcaaaccttttgaacaagggcaaaagcagccacattctttgccaaaatatcataagatatctacgccacatactaaaatttttctcctctgtaacctcttgagccaggaccccacaattcaaattaccctcagccccaccgtccttcaactactacagcccattaagccccacttaaatcattcaaatgcttttataatccaaagttccaaagtccacattactccaaacaaagcatggctaggtctatcgcagcaataccccattgctggtaccaacttctgtcttaattagggtctcattgctgtgaagagacactataaccacacaaccaattataaaggacaacatttcatggaagccagcttacagtttaaaggtttagtccattatcatgatgggaagcatggtagcacaaaggcatacatgatgctagagaggtagctgcgagttctacgtcatatccaaaggcagcaggaagagagtgaaacactgggtcaagcttgagcatctgagacctcaaagcctgccccgcagtaacgactttctccaacaaggtcacacctaatccaacaagtccacacctcctaatagtgctgcttcctagaggcctataggggctattttcattcatccacaataatgagtcaattgttctcagcaagcttttgatgaatacactggggacccccattagaaatgccttcgtggctacttgggtgtttttatactctatatgtagaagtcctaccattatctcaggttgagctgagctctccaatcactgatgtatcatctttttaatctcctaaaaacagaattgcttatcaggtaaaacatgttaactaactgcaaacatgtgaaacttgtttcctttcttatgagtttctatatttaattttgaagtaatttacaagaatataggtgtcctttcacaaagatttgttttgcagtctgtaaaacatctgttatcaaaattgagtaacttagaacatagtatcttacaatatagggaaacaattcagtctattgagcacatattttctagggaaattaagtcaatgttcccctcccactacaggacaaatgggaacagctggcaggtcaagactcctctatagaaatctttcaacatatctccttaatgaccctagacactgtcatgaagtgtgccttcagccacaatggcagtgttcaggtggatgggtgagtgacaacccttgatcttcagggcctttgatcttaccaactaatatggatttatctgtgatgcatgtgggacattttggatactcaataaagagtcttatcccagccccaagtcaatccctgacccaattgaatcctatcccaaccacagaccactgatccctagctgaggtggaatcctagacactcatgccaccttctaccaccttctaccttgaaaattacaagggttatgagacagagttatgtgcctcagtgttgtctcttcttatcatatagaaatctccccagagtccgtactatctgtgggttggagagctctacagtctaatctgttctacttcttcttcttcttcttcttcttcttcttcttcttcttcttcttcttcttcttcttcttcttcttcttcttcttcttcttcttcagaaattacaagagctatatccaggccattgggaacttgaatgacctctttcactcccgtgtgaggaacatctttcatcagaatgataccatctataatttttcttccaatggccacttgttcaaccgtgcttgtcaacttgcccatgatcacacaggttctgtttgtgccttctgtctccctcatttcctaagatcagctcaagggggctattgatgacttctgaggcagatccagacccttcagtgcatccccctataggacctgggtcacatccatgctagttacttttacactgacaatgttagcagttggaatgtcagaatgccaggtgttgaatgtatgtcatcatattggtaatgtgtagtgagacctgacccagcaactcaagcagagcttctattgcccatggtgctaagagagttctgacctgtgtcagatcacactggtcctctaaccctacccaatcctatatagcgcacccgcacatagcttcaggcaaggagacacatggagctacatggggttactgtagctctcaggtctttggaataattgatgttctggaatagatggtgtgatcaagctaaggaaggatcagctgcagaatgcgggagagctggaaaaggtcaagaagaaaagacgtttggattttctggacatcctcttacttgccagagtgagtatgtgcagcagaggcctgagagtctgcctgggaacacacaaggaacaagtatagttctgatgatgcctgttgtttccctcagatggagaatggggacagcttgtctgacaaggacctacgtgctgaggtggacacatttatgttcgagggtcatgacaccacagccagtggagtctcctggatcttctatgctctggccacacaccctgagcaccaacaaagatgcagagaggaagttcagagtgtcctgggggatgggtcctccattacctggtaagagttcaagtagaagtgcccttattctttgggtctccagtctacctgacctccacattggactttatttcagggatcacctggaccagattccctacaccaccatgtgtatcaaggaggccctgaggctttacccacctgttccaggcattgtcagagaactcagcacatctgtcaccttccctgatgggcgctctttacccaagggtatgaatttcccaggcctttcatcctagagagaatggatgctcagtagtctgtgtccttcaacagttctgaatccctctgagtgccgtttccttttcagtaaataaatgcttcttactcataaagtacagtaataagcttaaatgacctcctataaagttaaatgctactttgcatgaatgacattgaaagcattcttcatcagctaacattccttcttcttttgaatctatgatctcatcatgaagcatccattctaatttgggaacaatgatgttttccagactcaattccagatgccagcaccatataactcatagccacacttattcttcagatgtcctcactgtcacatatgttttcatgttggggctggaaacacaggcatatgtttgtacatagaagtgggaggcagaggtcagcattagttgtcattccacaggcactgtccaccatgatttttcagttcaggaggtcttgtactggactgtagctcatctcttaggctaggctggccactgagctaggaacctgcctgtccccacctcaccagcagtgggataacaagcatgtgccaccacacacagtcttttttatatggattgaggtctttctctcaatccccaatcttttatcatgttctacatttgatataatgtgtagacatttttataaaaaactactatttatatatagatcagtaaataaaatgtgacctcagattcttgccaaggcaagtaaccggttactctccataacctgatagtcagaccctattgctgaagacacaacttatgtcatcaaacacagagaaaatgatctggtgcccaactagatttagacctaattattaacccaaatagtgaatagggtctctttttcaagcttatttcactaatagttttacattatacatttatacatatatttatattatacaggcacagaacacacacacaagggtggggagagagagagagacagagacagaggcagagacagagagacagtgacaaagacagagagagagagacagagttttcaaaaataaaaagagcaaatcaggcaaatttaaacagaagaggaagagttttttcttgcagagctccttggaatcttcaatgtgtctatctagatgtctgtgaaggaaataaggaacagagtttcctcacgccctgatgattgacatcttgtctctagcgtacattggaagtggagccccacagttcttttctgctgaccttttgctgtggcttggtatttgtttcctgccaaactcatacagctatgtaatacccagagtcacacgttaatggggttgggagggtgaaagctttgtgaatttatgttaatcatggtggtgctctaaattgtactgaaggcctcctgtttgctaagcatgtgctctaggactgagccacttaccatccccaagatgagatggataaacttggcttgactacgtgctttagagcacctgggagtggatagattacattagggttggtctcacattattctatatagtggctttagaaagagaaggagggagactgctaagatatacacctgtcctcaccatgataggatgcaaccaagggagagagctgtttgaactttcagctccaaatctgagctaaataagcttcatatatacatatatatacatacatacatatatacagacatacatacatacatacatacatacatacatacatacatacatacatacatacatacactgggatgtacagggtagatagagaatcagacaggggctagaggaatgtgtttcttttatgagacaaagcaagtaaaaaagagcaatgaattccatgccgtgagtcatatgtggtccagtctctgagaaggcacttgggttagtgacagagatgaactgatcaccaaatacaagacccctgcaatgtcaggaaagcaccctttgtctcacagctcattatggcaaaactctagtattgccacatcctgctttggtgatatgtaacccctctctgaaattttagtaactcacctgaaaaaaaaaacagaataaatcaactcactctggggacttaatatcttaatatcttaacatctttagtggaaatccttcatcaaatttaagttctaactttatttattcccaaaaccggttcatcttttttgcttctctctctctaattccatttttttatacttctcacttgtgcctcaggtttgtttccaactcatgcacatgtgctgaaagtgatggtctatagcaccctaacctcttgtgcaaacgtatcattccctgctgtctcaggaaccaaggagtcacccctgggtgtaacccatcttctctcacatttctatctgccccacaggtatccaagtcacactctccatttatggtctccaccacaacccgaaggtgtggccaaacccagaggtaggaggttcccccaaggagggcagaggagttggtctcaagatcaataccacctattgtccccacctctaggcacattgtccattgtgagttgcaagcaagggtttgacctctatctatcctgactgaagtgctgtctccctgcaggtgtttgacccttccaggtttgcaccagactctccccgacacagccactcattcctgcccttctcaggaggagcgaggtgagatagcctgtgtatgatgattgatatactgtaaagatctttgcagcattccttggttttatctcatgcatatatggcatcttcgggtatatcctgattgggggtgggggggagaagcttcttgaggatgtgtctgtgcaccaaaggagggtggcatttcatgacacactgtgaagacattaacccattggccaaacaaatttctatgcagtgcatgcacttgcttgtgttctgatgtttccctcactttaagggcaggactttacattgatttttttcacatgactttaacttcaggtgtccagcttgtccaatttgggggctcttaaagggcatgtcttttccacacctctatctgacccatcactattcctgcgtagttctctattctagaatcactgtgcaaggaattaatttgcttgcatgtctgccacattcaactgtccagtgaagtattacatcatttgaggcaaggttcacaccagggtatgctaattccacctttgctctctctctcccaacacaattttcaatccgtgttgatgctcacatctctcttgcaattgcccaatggccaaagcttgacagataatgtatattcctcaagtgaggctatgtagtctaacttcagacaaaaggcattaaaaagaaggagagtaatctgctctgaagtaaacctctattttacatataacagcatttttaaggtttctgggagtgaaatagaagacactcttgaaatagctactgaactggacaaagactttcccatggcttctagggaaatccttccacgggacctaactcactgcaaactttaaaaggtggtgcagaagaaggattttctgagcctatttttcatgaattcatgaagtggcaaatcagttttcacagaacaggctagaagtaagttgttcttccagacacaggctatgtccacacacttggcaaacttcaggattgaatgcactcaccgcaaatcatgccactgccactagaagacaggagagtattgtcttaactcagtagtaactcagcttaactcaccgagccatgctgctggtggtgtttgctaagacagagtctcaggcttgtctggagctcatggtccctctacctctgcctcccaagtgttgggattcagacacagtcccccatggcttgctttggtcagaagctttttcatctttattatatttcgttctattttttttcatcccttaaatccacatgaattacattttaagaaccaaggaaaggtaactattttaactgcaaaataaattttaaacaactcctgtgtgtccggtgctatgctataaaaatatagaaataatgatactatcccattcctgcctctaagagttcaaaactgtggcccacaaagacaaatatatctgtgattaaaatatattcttcccccattctttcactcatccactcagcagtttgcagaatgttccatgttcctggcatcatcccacgccctgagggtggcatggccttgaatatggtatagatggtgccttgaggcctagaaggagcagggtcagtcatcgaagaaataagagccaatcactcattgacctgagcttaggggatatgaaggaaggggtggtcctcaaatacctcaacagcttgatcttaagtaggaagtgggatgggcaggaaagaggtgagggcagcagccagtagagggtataactgcagctagacctttgttgttttgttttgtttaattttatatttttatttattcactttacattctacngccttccttccagtcacccctcccacaattctcccccctttcccctcccctcttcccctcctctgagcagatggaggcctccagagtgccgccaccccccacccccccaacccccccaccctgtgtacttcaagtctctatgagactcggcacttcctctcccactgaggccagacaaggcagcccagttagaagaacacatctcacatacagacaacagaaaagctaaacaagaagaaaagcctaagtaaggaagctcaaatctcacttagaagaggaaataaaagtcataagaggcagatggagggagagaactgggaggaagagaaggagaggagggggtgggggtttaggatcaggtatggggaaggacaggagagatggccggatggccatgaaaattaatggaaatctgcaactgatgggggtgggggaagcatctccaggaggagacagagacctgggataagggaggagcccaaaaatcaatgggggtgaccttagctgtgactcactacactggagatatggaacctgaagaggcaactaggcattgaacacagccctacctggtggaggtatagaggatcagtgtggagggagggccagggagaccaaagaagcccaggaaaggaaactgaagaaggaatagtgtacatttctgaagtagagttggaaagctatagaggccgatggattaaggatgtggggtaccctaagtaggaggcagatggggcagacacttgaagatcctcaacacagtcttcctgtaggtcctcttctactgatacccaattccactctgtgaaagctatatgctagatcttcctgaatgaagtaaacgattaacttattaaatgattcacaagtttgacttctagtccttaaaatactgtcctaacagatttcatacgtctaaaacaagaaaaactaggatcaaggtggcattgaaaaatgttgaggctatgtcaaaaagtcaggagagccaagtaggcatgacccgtcatctcagccattaaactgaacctgtgacagtaggccctgagtgttgttctgggatccttcacgggtcagcccttaaaacaggtaagaagctaatgagttttattttccctttctgacccaggaactgcattgggaaacaatttgctatgagtgagatgaaggtgattgtggccctgaccctgctccgctttgagctactgccagatcccaccaaggtccccatccccttaccacgacttgtgctgaagtccaaaaatgggatctacctgtatctcaagaagctccactaattccggtaaggacaaggacagactctatgaacatgtggcctggcaccttgtcccctgtcatcccttcctgtcaccatcttgctttctgtctgttcatcctcacacctatttgctccctggcctcttggtctcctcctctctctctctctctctctctctctctctctctctctctctctctctctctctcctctagattccccatttgttttttggtctcctgctacccacatctgactgtgcacctgatcctgaacatccttcatcctccatccttctctccttgcctcttcacttcttaccatctttttcccctacaggacttcttcattataccaataatcaacggtcacaaccttgatggtcgggaataacaggacgttattatcttacagttgtggagctccgaaatctgaaatgagtttcactggcagaaagctgagttggtggtgtgactagccttcttcagaagagtgcttcagagagtcctctcctcctctcttcagtacagatcacccttctcagcactggaatattcctctgctttaaagccagcacccttcccataccccctcttctaaaagccttcccttttacaaatgttcttatgacatcatcaagaccactgaaaaactccaagataatttcccatctcaatattccttactccatctaacctactaagtcccttttgaattatgaggaataattcaatttgttccatgggctccaaaactcaaggcctgagcattattgtgaaacctttattcagcctaatatcatcttcacaagactgttacctggtacgttcatctaaatctcccctgcatagtctctctacctgactattcctcacacaagtttctttaccttccctcctttctccaataaagtgtccagtgtcctgcacagcatctgtcttctcatgctggctctgaacacaggttcccattctgtttgaaactgctcctggatcaggatccatgatgagttctctgccttccctgagatgccatgctctgctttctcacacacacacatacactcacacatacacacacaacacatacacacacactcacacacacacatacacacacactcacacacactcacacgtacacacacaacacatacacacacactcacacacacacatacacacacacactcacacacactcacacgtacacacacaacacatacacacacaacacatacacacacacacacacacacatgcacacatcagagttcttggatttattcaaatactcatgaagaactggtattaataatggtgtcttgattagaagacaccagagtcaggaagcttcagctcaagttccttctagattagtgttccgccggttccttcctttaatatttaaattcagtcacagcctcctcctatcagagagggggtacctccacccagtctacactacccgagtgccaaggtgctgaagaaacaaatgttacagtttagactcaggcaccacccagtgacgcatgatggttatgactggagaatcagcgcccacgtcataactgttgaaatcttgctacatctgttcagagaacagtttatctgtgtgctagggcaaaagggcaagttagttgcattaaggcttctagctaacaggcacactataatgggaccttaacatcccagcttcgagtgtacagggagggctttacaggagttagcaagtatcttagggcagagcttccaagctgtggacttcttccaagcagaaaagaattggtagtaggaaaggtatatggcacatttcccaagatgccctagagtggtggttctgaaccttcccaacgctttgaccttttaatacagttcctcatgttggggtgactcccccacccccacccccaaccataaaattaactcattactactttataagtgtaacttcgcaaagaacataatataaaatctgtgctttctggttattgttggtggctcctgtgaaagagtcattcaactaccaaaggggtcatgagccacaggtaaagccactgccctagtcccagggctagaattc

SEQ ID NO: 3026 - DNA, 1712 bp, Rattus norvegicus
  Genbank Accession No. M57728
atggcgacggcagtgtgggcggctgcgcggctacttcggggttctgcggcgctgtgcgcgcggcccaagttcggttctcctgcacacagacggttcagcagtggcgccacctaccccaacatccctctctcttctcccttgcccggagtgcccaagcctatttttgctacagttgatggacaggaaaagtttgaaaccaaagtcaccactctggacaatgggcttcgtgtggcatctcaaaataagtttggacagttctgtaccttaggaattcttattaattcaggatcacgatatgaagcgaaatatcttagtggaattgctcattttctggaaaaattggcattttcgtctaccgctcgatttgacagcaaagatgaaattctgcttaccctggaaaaacatggtggtatctgtgactgccagacctcgagagacaccaccatgtatgctgtgtctgctgacagcaaaggcttggacactgtggtgggcctgctggctgatgtggttctgcacccccgcctgacagatgaggaaattgagatgacgaggatggctgttcagtttgaacttgaggacctgaacatgagacctgacccagagccactgctcaccgagatgattcatgaagctgcttttagggagaacacggtgggcctgcaccggttttgtcctgtggagaatatcgggaagattgaccgagaagtgctgcattcctacctgaagaactactacacccccgaccgcatggtgcttgctggagtgggcgtggagcatgagcacctggtcgaatgtgccagaaagtacctcctgggagtgcagcctgcctggggagctccgggagctgtgtggatgttgacagctcagtggcacagtacacgggggggatcatcaaggtggagagagacatgtcaaatgtcagccttgcgcccaccccgattccagagctcacacatatatggtggggctagagagctgctccttctggaggaggatttcatcccctttgctgtgttgaatatgatgatgggaggcgggggctccttctcggccggagggcctggcaaaggcatgttctccaggctctacctcaacgtgctcaatcggcaccactggatgtataatgcaacctcctaccaccacagctatgaagacacaggcctcctgtgcatccatgccagcgcagaccctcgacaggttcgagaaatggtagaaatcatcacaaaggagtttattttgatgggccgaacggtggatttggtggagctggagcgggccaagacacagctgatgtccatgctcatgatgaacttggagtccaggcctgtgatctttgaggatgtggggaggcaggtgttggctacacattcaagaaagctgccccatgagctgtgcacactcattcgcaatgtgaagccggaagatatcaagagggttgcttccaagatgctccgaggcaagcctgctgtggcggctctgggtgatttgactgacctgcccacgtatgaacacatccaggcagcgctgtccagcagagatgggcgcctgcccagaacataccggctgttccggtagagccctccagcggaggctgcagagtgcttctgtgcatgttactgttggtgtggacactgcataagaatagctagctctgtgaacagtgccaacagggaagctctggaaacttgaatgaaagttactgttgccactgc

SEQ ID NO: 3027 - DNA, 2136 bp, Rattus norvegicus
  Genbank Accession No. M58308
ggtgagccatgcctaggtacacggtgcacgtgcgtggggaatggctggcggtaccctgccaggacgggaagctcagtgttggctggctgggccgcgaggctgtgcggcgctacatgaagaacaagccggacaacgggggcttcacctcggtggatgaagtgcgattccttgtgcgccggtgcaagggcctgggcctgttggacaatgaggacctgctggaggtggccctggaggacaatgagttcgtagaagtggtgattgaaggcgatgtaatgtctcctgatttcattccatcacagccagaaggcgttttcctttacagcaaataccgggagcctgaaaagtacattgccttggatggggacagtctgagcacggaggatctggtcaacctaggcaagggacattacaagataaagctcacttcaatagctgagaagaaagtgcagcagtcccgggaagtcattgacagcatcataaaagaaagaacagttgtttacggcatcaccacgggttttggaaaatttgccagaactgtgatccctgccaataagctacaggagcttcaggtcaacttagtccgttcccattcttcaggtgttgggaagccactcagtcctgagaggtgtcggatgctcttggctttgaggatcaatgtcttagccaaaggatacagtgggatttccttggagaccctgaaacaagtgattgaagtatttaatgcctcctgcctgtcctatgttccagagaaagggaccgttggtgccagcggagaccttgccccactctcccatcttgctttggggctcattggagaaggaaagatgtggtccccaaagagtggctgggccgatgccaaatatgtcttagaagcccacggattgaaaccaattgttctgaaaccaaaagaaggcctggcactcatcaacgggacacagatgatcacttccctgggctgtgaagccgtggagcgagccagcgccattgcccggcaagcggatatcgtggctgccttgaccctcgaggtgctgaagggcaccaccaaagccttcgataccgacatccacgccgtccgccctcaccgcgggcaaattgaagttgctttccggttccggtccctcttggactcagatcaccacccgtcagaaattgcagaaagccacaggttctgtgatcgtgttcaggatgcgtacaccttacgctgctgtccacaggtccacggtgtggtgaacgatacaattgcctttgtgaaggacatcatcaccacagaactgaacagtgccacagacaatcctatggtctttgccagtcgaggggagacaatttcgggaggaaacttccacggtgaatacccagccaaagccctggactatttggccattggcgtccatgaacttgcggcaattagtgaaagaagaatcgaaaggctgtgtaatccttccctcagtgagctgcccgccttcctggtggctgaaggaggtctcaattctggattcatgatagcccactgtaccgcagcagccctggtgtctgagagcaaggctctgtgccacccttcatctgtggactcactctctaccagtgctgccacggaggaccacgtctccatgggaggatgggcagccaggaaagctctcagggtcatcgagcacgtggaacaagtgctggccattgagcttctcgcggcctgccagggcatagagtttctgcgccccttgaaaacaaccactccgctggagaaggtgtacgacctggtgcgctccgtagtaaggccctggatcaaagatcgcttcatggccccggacatcgaggcagcacacaggttgcttcttgaccagaaggtttgggaggtggctgccccgtacatcgagaaatacagaatggagcacattccggaatccagaccgctttctccaacagcgttttcactagaatctctgaggaagaattcagccacaatcccagagtctgacgatctttaacgggcttcctcgagaacaggcacatgtgtcggatctgggcacatcactggtgtggtgacggagagtctcaggaaccgcccatgatgtgtagaactcatctcttttcaaacaaactctggttaaatcatggcagcaatacagtcattgaacccag

SEQ ID NO: 3028 - DNA, 8275 bp, Rattus norvegicus
  Genbank Accession No. M59786
cgcagaattctaaatctgagagcaaaagctcaaattcactgccaagcgataaggccgtatgagatttttatggccttcaaacgtggccacagacattgtttctgagtttttaaaaagtacaaggaaaaatacaagtgggatagctgttcagttgtgacatcagctgttggtccccaactggagtcacaatgattcgggccttcgctcagccatccacacccccataccagccgctctccagttgcctgtctgaggacacagagaggaagttcaagggcaaggtggtacacgaagctcaactcaactgtttctacatttctcctggaggttccaactatgggagcccacgcccagctcatgccaacatgaatgccaatgcagctgcaggacttgcccccgagcacatccctactccaggggcagcactgtcctggctggcagccatcgatgccgcccggcaggccaagttaatgggcagtgctggcaatgcgaccatctctaccgtcagttccacacagcggaagcggcagcagtatgggaaacccaagaagcaggggggcacaactgccacacggccgccccgggctctgctctgcctgactctgaagaaccccatcaggagggcatgcatcagcattgttgaatggaaaccatttgaaataattattttattgacgatttttgccaattgtgtggccttagcaatctatattccctttccggaagatgactccaacgccaccaactccaacctggaacgggtggagtatctcttcctcatcatttttaccgtggaagcatttttaaaagtgattgcctacggactactcttccaccccaacgcttacctccgcaacggttggaatttactagattttataatcgtggttgtagggctttttagtgcaattttagaacaagcaaccaaagctgacggggccaacgctctgggagggaaaggagcgggattcgatgtgaaggcactgagagctttccgtgtgcttcgtcccctgcggctggtgtctggagtcccaagtctccaggtggtcctgaactccatcatcaaggccatggtgcccctgctgcacattgccctcctcgtgctcttcgtcatcatcatctatgccattatcggcctggagctcttcatggggaagatgcacaagacctgctacaaccaggagggcataatagatgttccagcggaagaggatccctccccttgtgctttggagacaggccatgggcgacagtgtcagaacgggaccgtgtgcaagcccgggtgggatgggcccaagcacggcatcaccaacttcgacaacttcgccttcgccatgctgacggtgttccagtgtatcaccatggagggctggacagacgtgctgtactggatgcaagacgctatgggctatgagttgccctgggtgtattttgtcagtctggtcatctttggatcctttttcgttctaaatctggttctcggtgttttgagcggagagttttccaaagagagggagaaagccaaagctcgaggagacttccagaagcttcgtgagaagcagcagctagaagaagatctcaaaggctacctggactggatcacccaggcggaagacatagaccctgagaatgaggacgagggcatggatgaagacaaaccccgaaacatgagcatgcccacaagtgagactgagtctgtcaacaccgaaaacgtggctggaggtgacatcgagggtgaaaactgtggagcccggcttgcccaccggatctccaaatccaagttcagccgctactggcgccggtggaatagattctgcagaagaaagtgccgtgccgcagttaagtccaacgtcttctactggctggtgatcttcctggtgttcctcaacaccctcaccattgcctccgaacactacaaccagcctcattggctcacagaagtgcaagacacggccaacaaggccctcctggcccttttcacggcagaaatgctcctgaagatgtacagcctgggtctgcaggcctactttgtatccctcttcaaccgctttgactgtttcattgtgtgcgggggcatcctggagaccatcctggtggagacgaagatcatgtcgcccctgggcatctcctgctggagatgtgtgcggctgctcaggattttcaagatcaccaggtactggaactccctgagcaacctcgtggcgtccttgctgaactcactgcgctccatcgcctccctgctgctactcctcttcctcttcatcatcatcttctccctcctggggatgcagctgtttggtggaaagttcaactttgatgagatgcagacccgtaggagcacgtttgataacttcccgcagtctctcctcactgtgtttcagatcctgaccggggaggactggaattcggtgatgtatgatgggatcatggcttatggcggcccctcttttccagggatgttagtctgtatttacttcatcatcctcttcatctctccaaattatatcctactgaatctcttcttggccattgcggtggacaacctggctgatgcggagagcctgacctctgcccaaaaagaggaagaagaagagaaggagagaaagaagctggccaggactgccagcccagaaaagaaacaggaggtgatggagaaaccagcagtagaggagagcaaagaggagaaaattgagctgaagtccattacagcagatggagaatccccgcccactaccaagatcaacatggatgacctccagcccagtgaaaatgaggacaagagtccccactccaacccagacactgcaggtgaagaggatgaggaggagcccgagatgcctgtgggcccacgcccccggcccctgtctgagctgcaccttaaggaaaaggcagtccccatgccggaagccagtgcatttttcatcttcagcccaaacaacaggttccgcctgcagtgccaccgcattgtcaatgacacgatcttcaccaacctcatcctcttcttcattctgctcagtagcatctccctggcggctgaggaccccgtccagcacacctccttcaggaaccacattctgttttattttgacattgtttttaccaccattttcaccattgaaattgctctaaagatgactgcttacggggctttcctgcacaagggctctttctgccgaaattacttcaatatcctggacctgctggtggttagcgtgtccctcatctcctttggcattcagtccagcgcgatcaacgttgtgaagattttaagagtgcttcgtgtcctcaggcccctgaggatcaacagggccaaggggctaaagcacgtcgttcagtgtgtgtttgtggccatccggaccattggaaacattgtaattgtcaccactctgctgcagttcatgttcgcctgcattggggtccagctcttcaagggaaagctctatacctgttcggatagttccaaacagacggaggcagaatcgaagggtaactatataacatacaagaccggagaagttgaccaccccattatccagcctcgaagttgggagaacagcaagttcgactttgacaatgttctggcagccatgatggccctctttaccgtctccaccttcgaggggtggccagagctgctgtaccgctccattgactcccacacagaagacaagggtcccatctacaactatcgtgtggagatctccatcttcttcatcatctacatcatcatcattgccttcttcatgatgaacatcttcgtgggtttcgtcattgtcaccttccaggagcagggggaacaagaatacaagaactgtgagctggacaagaaccagagacaatgtgtggaatatgccctcaaggcccgacccttgccaaggtacatccccaagaaccagcaccagtacaaagtgtggtacgtggtcaactccacctacttcgagtatctgatgttcgtcctcatcctgctcaacaccatctgcctggccatgcagcactacggccagagctgcctcttcaaaatcgccatgaatatactcaacatgcttttcactggcctcttcacggtggagatgatcctgaagctcattgccttcaaacccaagcactatttctgtgatgcatggaatacatttgacgccttgattgttgtgggtagcattgttgatatagcaatcaccgaggtacacccagctgaacatacccaatgctctccctctatgagtgcagaggagaactcccgcatctccatcaccttcttccgcctcttccgggtcatgcgcctggtgaagctgctgagccgaggggaaggcatccggaccctgctgtggaccttcatcaagtccttccaggccctgccctatgtggcccttttgattgtgatgctgttctttatctatgcagtgattgggatgcaggtatttgggaagattgccctgaatgacaccacagagatcaatcggaacaacaacttccagacgttccctcaggctgtgctactgctcttcaggtgcgccactggggaggcctggcaggatatcatgctagcctgtatgccaggcaagaagtgtgctccagagtctgagcccagcaacagcacggaaggggagacaccctgtggcagcagtttcgctgtcttctacttcatcagcttctacatgctctgtgccttcctgatcatcaacctctttgtagctgttatcatggacaactttgactacctgactagggattggtctatccttggtccccatcacctggatgaattcaagagaatctgggccgaatatgaccctgaagccaagggtcggatcaaacacttggatgtggtgaccctcctccgtcgaattcagcccccactgggttttgggaagttgtgtcctcaccgtgtggcctgcaaacgcctggtgtccatgaacatgcctctgaacagtgatgggacggtcatgttcaatgctacactgtttgcccttgtcaggacagccctgaggatcaaaacagaagggaacctagagcaagccaatgaggagctgagagccatcatcaagaaaatctggaagaggaccagcatgaagctgttggaccaggtggtgccccctgcaggtgatgacgaggtcacagtgggcaagttctatgccaccttcctgatccaagagtacttcaggaaattcaagaagcgaaaagagcaggggctggtcggcaagccctcgcagaggaatgcactgtctctgcaggctggcttacgcaccttgcatgacattgggcctgagatccggagagccatctctggggatctgacggctgaggaggagctggacaaggctatgaaggaggcagtgtctgctgcctccgaagacgacatcttcaggagggctggaggcctgtttggcaaccacgtcagctactaccagagtgacagcaggagcaacttccctcagacgtttgccacccaacgcccactgcacatcaacaagacagggaacaaccaagcggacaccgaatcaccgtcccatgagaagctggtggactccactttcacccccagcagctactcatccacgggctccaatgccaacatcaacaatgccaacaacactgccctgggccgcttcccccaccctgctggctactccagcacggtcagcactgtggagggccatgggcctcccttgtcccctgctgtccgggtacaggaggcagcatggaaactcagctctaagaggtgccactcccgagagagccagggggccacggtgagtcaggatatgtttccagatgagacccgcagcagcgtgaggctgagcgaagaagttgagtactgcagtgagcccagcctgctctccacagatatactctcctaccaggacgatgaaaaccgacaactgacctgtctagaggaggacaagagggagatccagccatgtccgaagaggagtttccttcgctctgcctctctaggtcgaagggcctccttccatctggaatgtctaaagcgacaaaaggatcaagggggagacatctctcagaagacagccttgcccttgcatctggttcatcaccaggcattggcagtggcaggcttgagccccctcctgcagagaagccattctccttccacgtttcccaggccacgccccacgccccctgtcactccaggcagccggggcaggcccctacagcccatccctaccctgcggctggagggggcggagtccagtgagaaactcaacagcagcttcccgtccatccactgcagctcctggtcagaggagaccacagcctgtagtgggggcagcagcatggcccggagagcccggcccgtctccctcaccgtgcccagccaggctggagctccaggcagacagttccacggcagtgccagcagcctggtggaagcggtcttgatttcagaaggactgggacagtttgctcaagatcccaagttcatcgaggtcaccacacaggagctggctgacgcctgcgatatgacaatagaggagatggagaacgccgcagacaacatcctcagcgggggcgcccagcagagccccaacggcaccctcttaccttttgtgaactgcagggacccagggcaggacagggctgtggtcccagaggacgagagctgtgtatatgccctggggcgaggccggagcgaggaagcgctcccggacagcaggtcctatgtcagcaacctgtagtccgcaggctggcgagacgcgggtgttttttattcgtttcaatgttcctaatgggttcgtttcagaagtgcctcactgttctcgtgacctggaggtaaccggaacagcgtcttcattcactgctgtcgggataagcctcagagctgggcggtgtaccgaagtcggcttttcagggagaagccaaggccgttggtgcgggggctccagcaccttcccacggcagcaccgcccaaaggaccccaccccccctaagcaaaagggtgttttccccttgcttgtataaacagtcatttgcacatgttctgtctgagcctggccgtctctatggagcagggccccagggatctatggcaggaatgggccagtgtccccagtaggagccggaaggtggctgcaaggttcccagcagtgcagatctggtccctatgtcccttcagggacccttcccctgctggaactgaggagcaggtgcaggagccagtgcagaccacaccacctgccctcagctagccagacctgggggcgcaggctgcttgcctggtgctctgggtttcatagtttgatggttcttgtcagcatgttgcggttttctaggttttgatttctttattactatttgttgtgttttccacggggaggggaggaagaagagcgtttacaactgcgcagcctcacttcaccggttccacatttgcatatttaagttggatttggtttattgtattctttaaatggtgcggtccaacccccaccctcacccctattggagcaagggttcattatcaccaacggggttcattatcaaccaacggggaggttttacctgctctgtgtatgcccaagtaacatgttacaattttccttaagtcaaagcaactttttcccctttcggtttggttgagcatcacgacctgcaggttaacagtcagtttagataaggcggtgtgtgcctgggcgactgagctgggctcctttctgggcatatggattggttcaggagagaagaaatatgggcatctttgcgtcacacgtgtgtccatagtgggtcgtcttgtgtgtctgtgcatccacacggtacgtgagcaccccgccccacccccgctcaaagtctgtagatcccgttcgggtttgacggccggggagttcaaaatctggggcgattcgaaagcaagaacaaaccactgtctctgcttctgcttctgaaacgagaatctggtaactgcattttctgtcccacgagatatgcaaaagcaatgcaataatatccattttaaaatacgattgtgagttgtgtcacagcattaaaattctattttaaaaaaaacatgaaatttaaggggaaaaactccaagaagacattttgactttcgatatattctgtgtaatgttttattgcattgataatgtttctgttgaagaaactgttatacttgaattcaggtcagtttcagtatttttcaaatatttttttaaaactgaattgcaattgtgccttgcaaatataatgacttaagtttgttttaaaattcacttcttgtatattttgctgcatgtaaagtaaatcattttgtatttgg

SEQ ID NO: 3029 - DNA, 4190 bp, Rattus norvegicus
  Genbank Accession No. M60103
ttcaagatcctgtacaatgggcagagcgtggaggtggatgggcactccatgcggaagctgattgcagacctgcaacccaacacggagtactccttcgtcctgatgaaccgcggcagcagcgctgggggcctacagcacctggtgtccatccgcactgccccagacctcctgcctcagaagccactgcctgcctctgcctttatagaggatggccgcttctccctctccatgcctcaagtgcaggacccctcgctagtcaggtggttctacattgtggtggtgcccattgaccgtgtgggcgggaacctgctggcaccaagatggagcacaccagaggagctggagctggacgagcttctggaggccatcgagcagggtgaggagaaacagcggaggcgtcggcgccaagcagagcggctgaagccttacgtggcagctcaagtggacgagctccctgagaccttcaccctgggggacaagaagaactaccgtggcttctacaaccggcccctgtctccggatctgagttaccagtgctttgtgctcgcctccctcaaggaacccatggaccagaagcgctatgcctccagcccctactcggacgagatcgtagtccaggtgacaccagcccagcagcaggaggagcccgagatgctgtgggtgacaggccctgtcctggcagtcattctcatcatactcattgtcatcgctatcctcctattcaagaggaagagaacacattccccatcgtcaaaggatgagcagtcaatcgggctgaaggactccctgttggcccactcttctgaccctgtggaaatgcgaaggcttaactaccagaccccaggtatgcgagaccacccgcccatccccatcactgacctggcagacaatattgaacgtctcaaagccaatgatgggctcaagttctcccaggagtatgagtccattgaccctggacagcagttcacgtgggagaattccaactcagaggtgaacaagcccaagaaccgctatgcaaacgtcattgcctatgaccactctcgagtcctcctcacctccattgatggtgttcctgggagtgactacatcaatgccaactacattgatggctaccgaaagcagaatgcctacatcgccacacagggtccgctgcctgagaccatgggtgatttctggaggatggtgtgggaacagcgtacagccacagtggtcatgatgaccaggctagaggagaaatcccgggtgaagtgtgatcagtattggccagcccgtggcactgagacctatggcctcattcaggtgaccctggtggacactgtggagttggccacgtacaccatgcgcaccttcgcactccataagagcggctccagtgagaagcgtgagctgcgtcagttccagttcatggcctggccagaccatggggttcctgagtaccccactcccatcttggccttcctgagacgggtcaaggcctgtaacccgctagatgcaggacccatggtggtgcattgcagtgctggtgtgggccgcacgggctgcttcattgtcatcgacgcaatgctggagcgtatgaagcacgagaagacagttgacatctatggccacgtgacgtgcatgcgctcgcaaaggaactacatggtgcagacagaggaccagtatgtgttcatccacgaggcactgttagaggctgccatgtgcggacacactgaggtgcttgctcgaaacctctatgcccacatccagaagctaggccaagtgcctcccggggagagtgtcactgccatggagcttgagttcaagttgctggccaactccaaggcccacacgtctcgcttcattagtgccaacctgccctgcaacaagttcaagaaccgcctggtgaacatcatgccctatgagctgactcgagtgtgcctgcaacccatccgtggtgtggagggctctgactacatcaatgccagctttctagatggctacagacagcagaaggcctacatagctacacaggggcctctggccgagagcaccgaggacttctggcgcatgttatgggagcacaattccaccatcatcgtcatgctgacgaagcttcgggagatgggcagggagaaatgtcaccagtactggccagcagagcgctctgctcgctatcaatactttgtcgttgacccgatggctgagtacaacatgccccagtatatcctgcgtgaattcaaagtcacagatgcccgggatgggcagtcaaggacaatccgacagttccagtttacagactggccagagcaaggagtacccaagacgggggaaggcttcatcgacttcatcgggcaggtgcacaagacaaaggagcagtttggacaggatgggcccatcacagtacactgcagtgctggtgtgggccgcacaggggtgtttatcaccctgagcattgtcctggagcgcatgcggtacgagggcgtggttgacatgttccagaccgtgaagaccctccgcacacagcgccctgcaatggtgcagacagaggaccaataccagctgtgctaccgtgcggccctggaatacctcggcagctttgatcactatgcaacgtaactactgctcccctctcctccgccgctcccctgaggggctccggaggggacccagctcctctgagccataccgaccatcgtccagccctcctgcacggatgctgttgccggcagagcacagcccactgggatcacagcatttcgggaacattgccacaccagtcagagagcccagaacacctgggcaagtaggcggactggcagcctggctctgggccctcgtccaccgggcccaagtggagccctgcttcaagctctctgttcagctccgcgattctcatgcttctcatggggtgggaaagggggcagagccccccacgttttatacatttaggcggggtagactgcggggtcctagcctcttcctccgactttccttttgcaggtctttcactacagattgggctgctgtgggagttgggacttacttgttttcctttttgagttcacgttggatccttgtacaacttctgcggaaggacacagtacacgctttccttcctcgagcagagctagggccctacctgagcaagtcggctgtggcccgggaggcagctgagactcctgctgtcctccagcctttcagaggagatcctattccagccaaatgcagggaaacactttattttgttttaggttttgtttttccttgagagcctttttttaggccccacagacagtggtgggcggggaggcgataggaaacacatccccagtgtgcatttaacattcatagcctacaaccacagacgtgtctggggggagcctggcaaggcgttcctcgtcaccatcgtgtttgcaaaggttcaaaaaagcaaaaattaaaaaaaaaaaaacataaaaatatttttttttaaaaaaaagaaataaagattcatcccctggcctctccttctgctccgaagtgggaggcaactcaatgtgcctggggctcgttgtgggcccacagagtcttgctgtcatccccagcggtgcagtgtggcaggtgtttgtaagctgtgggttctggccacctcggtaactgaatggcacaggtgagggcctgtgccacgccccacacacctcagggccaagcgggggcgtggccggcccttcaggtctagccagtgggcctggtagcacatgtctgtcctcagcgggacagatgctttctctcctggtttgcagctgtcttcaaatcccccatgactcgcccttcccactccttcaagtcgccctcacaaaccaatgtggcaagactactggacttgtatccatggtactctactcagtcctcttatctcagcttgctgaggggcagggagagggtctcttcctctgggcagcactatctaggtagtaagtgggggcgggaaagggtgcatagctgttttagccgaaggactcgatgtggacgtcctcagatatagctaggctaagcggagatcgacggtccggggttggtggtgttggatgagacattcatttttaccttgtggacgctagtgctgtagagttcactgttgtacacagtctgttttctatttgttaaggaaaactacagcatcattgcatacttcttgatggtaataaatttgaataatcagatttcttaca

SEQ ID NO: 3030 - DNA, 2108 bp, Rattus norvegicus
  Genbank Accession No. M60655
gggcggactttaaaatgaatcccgatctggacaccggccacaacacatcagcacctgcccactggggagagttgaaagatgacaacttcactggccccaaccagacctcgagcaactccacactgccccagctggacgtcaccagggccatctctgtgggcctggtgctgggcgccttcatcctctttgccatcgtgggcaacatcttggtcatcctgtcggtggcctgcaaccggcacctgcggacgcccaccaactactttatcgtcaacctggccattgctgacctgctgttgagtttcacagtactgcccttctccgctaccctagaagtgcttggctactgggtgctgttgagtttcttctgtgacatctgggcagcggtagatgtcctgtgctgtacggcctccatcctgagcctatgtgccatctccattgaccgctacattggggtgcgatactctctgcagtaccccacgctggtcacccgcaggaaggccatcttggcgctcctcagtgtgtgggtcttgtccacggtcatctccatcgggcctctccttggatggaaagaacctgcgcccaatgatgacaaagaatgtggggtcaccgaagaacccttctacgccctcttttcctccctgggctccttctacatcccgctcgcggtcatcctggtcatgtactgccgggtctacatcgtggccaagaggaccaccaagaatctggaggcgggagtcatgaaggaaatgtccaactccaaggagctgaccctgaggatccactccaagaactttcatgaggacaccctcagcagtaccaaggccaagggccacaaccccaggagttccatagctgtcaaactttttaagttctccagggaaaagaaagcagccaaaaccttgggcattgtagtcggaatgttcatcttatgttggctccccttcttcatcgctctcccgcttggctccctgttctccaccctaaagcccccggacgccgtgttcaaggtggtgttctggctgggctacttcaacagctgcctcaatcccatcatctacccgtgctccagcaaggagttcaagcgcgccttcatgcgtatccttgggtgccagtgccgcggtggccgccgccgccgccgccgtcgccgtctaggcgcgtgcgcttacacctaccggccgtggacccgcggcggctcgctggagagatcacagtcgcggaaggactctctggatgacagcggcagctgcatgagcggcacgcagaggaccctgccctcggcgtcgcccagcccgggctacctgggtcgaggaacgcagccacccgtggagctgtgcgccttccccgagtggaaacccggggcgctgctcagcttgccagagcctcctggccgccgcggccgtctcgactctgggccactcttcaccttcaagctcctgggcgatcctgagagcccgggaaccgaaggcgacaccagcaacgggggctgcgacaccacgaccgacctggccaacgggcagcccggcttcaagagcaacatgcccctggcgcccgggcacttttagggtcccttttcatcctccccctcaacacactcacacatcggggtgggggagaacaccatcgtaggggcgggagggcgcgtggggggagtgtcagccctaggtagacacagggtcgcaaggggacaaggggggaggggggcggggagaggggcagctgcttttctggcaggggcatgggtgccaggtacagcgaagagctgggctgagcatgctgagagcgtggggggcccccctagtggttccgggacttaagtctctctctcttctctctctgtatatacataaaatgagttcctctattcgtatttatctgtgggtacacgtgcgtgtgtctgttcggtgtacgtgtgggctgcatgggtgtgagtgtgaggcctgcccgcacgcgcgtgccggggcagagcgagtgcgccccctggtgacgtccaggtgtgttgtttgtctcttgactttgtacctctcaagcccctccctgttctctagtcaatgctggcactttgataggatcggaaaacaagtcagatattaaagatcatttctcctgtg

SEQ ID NO: 3031 - DNA, 1675 bp, Rattus norvegicus
  Genbank Accession No. M60666
cgcgctcggtctcctctggctcctctgcctaagggcccctcgccaccgccaccatggacgccatcaagaagaagatgcagatgctgaagctcgacaaagagaacgccttggatcgagcagagcaggcggaggctgacaagaaggctgcggaagaccggagcaagcagctggaagatgagctggtgtcactgcaaaagaaactcaagggcactgaagatgaactggacaaatactccgaggctctcaaagatgcccaggagaaactggagctggcggagaaaaaggccacagatgctgaagctgacgtagcatctctgaacagacgcatccagctggttgaggaggagttggatcgcgctcaggagcgtctggccacagctctacagaagctggaggaggctgagaaggctgcagatgagagtgagagaggcatgaaagtcattgaaagccgagcccaaaaagatgaagaaaagatggagattcaggagatccagctgaaagaggccaagcacattgctgaagatgctgaccgaaagtatgaagaggtggcccgtaagctggtcatcatcgagagcgatctggagcgtgcggaggagagggctgagctctcggaaggcaaatgtgccgagcttgaagaagagttgaaaacggtgacgaacaacttgaagtcactggaggctcaggctgagaagtactctcagaaagaagacaagtatgaagaggagatcaaggttctctctgacaagctgaaggaggctgagacccgggctgagtttgcagagagatcagtaaccaaattggagaaaagcattgatgacttagaagagaaagtggcacatgccaaagaagaaaaccttagtatgcaccagatgctggaccagactttactggagctaaacaacatgtgaaaccctccttagctgcggccacattctctcgtttccccctgttgttttattttgtctttaaacacatgcttaccatgaaaccccttcaatgctttttttttttatatatatatatacctttaccactgtcactgcaacatctgcagagagccagctagggcagggggtggggaaagacacacagaaagcaggtgtacttgttatttaaatgtgccatttcccaggttgacattgccacacttcacagagtttaggcatgcagtttgcttagccagtgtaggaagcctcacgaaaacaaaaggattaacagcctaagtgccaatggtggggtcatcaggaagactgatgttggagacaatcaggtgcagattggtgctaatttaaacaaaagaacccctggtgtcttttgttcagtctaatacaatttagacttctgtccaacactaatttatttttgtcttgagtagcactgcgagaggatatgggttccatgtgcccgtgttcctcacagccaagggtttgaaagccacgctggtcttgtaagattcccattccttcccagctgacatgcttgtggtcccttccaactcagtggggagagggctcagtgctgttcgccccccccccccccaattctccatgtcagggtaagagatctaggcactacatatgtaattggtaaagaaaaggcattttctcgagagttataactatgtaaacattgtataatgatatgaaataaaatgcacattgtaggacattttcta

SEQ ID NO: 3032 - DNA, 3912 bp, Rattus norvegicus
  Genbank Accession No. M62992
cacagcttgggccttagagcagcaactagagagtgtgacaactgtgcctgtgatatctacatttgaaagatttgtacaaaaaagattacaaggttcaatgtcagtggctagggagatagcttagtcaataaagtgcttaccacacaagcatggagttcctagcagccacatgaaaaagctgaacatagtagccaacaccataatcttgatgcaggagaggcggaataggtgggttcctggggctttctggtcagccagcctgtccagcctaataggtgagttacaggtcccagtaaatgactccatctcaaaagatgatgtagataataactaaaaaggacacgagggctacctgctcacacacaagggtataaacaatgaggaaactcaccagcattgcttcttcactgtggaataagccttttggcagtgtagcctcccccatcactttgagaggtccaagtagaagtcatactgctctgaagggtacattctgatatattcccattcaacatggaatatgtgtctatggtactatgtgggctatccaactttgcatcttggtctcattgtcccacaccagtgtggggggaattgccctgggaagatgatgcaatgttccctgtcatcatcatcgccatataagctttgtatatggatgtacctggatgactctgcctggagcgggcgtaagtcaaaactttgagagtctagtgcttttgcatgggatggactgtggctgctcttggcttatggagtgcttggtctcttttccccttgtccctcccaaccactactggtttccacctagagaaaaccccaagtaacatctgattagctgacctgggtctccacttatccctaagcactgggctctcatacccacccttgtgtcctggttccaactcactagagtgccttcttgtgaactgcctcagacttccaccttggtagtgggacgtgcgcctgcccaggagcactcaactcccattggtttactggagttggtcatgttagcaaaggaaagagcaggggtgctgccagctctgcatccagcccactaccctccacaccactgagcttgcctgtcccaaactgccatctgaccatgtcacttcctctgctctagacatcttcccaaggttgcagacgctgacggatttgccccagagtcgaagtaactgccacctggaaattccacagccatgagtgggtttaactttggaggcaccggggctcctgctggcggctttacatttgggaccgcaaagactgcgaccaccacacccgccactggcttttccttctctgcttctggcaccggcaccggagggtttaattttgggactccctcccagccagctgcgaccaccccttccaccagcctcttctcacttgccacacagacctcaaccacacagaccccaggattcaactttggaacaacacctgcttctgggggaacaggcttctccctggggatcagcaccccaaagctcagcctaagtagcacagccgccacaccagccacagccaacactggcagctttgggcttggcagcagtactcttaccaatgccatctcaggtgccagcacctccagccaggggacagcccccactggctttgtctttggctcttctaccacctctgctccgtccaccggcaccacgggattctcattcaccagtggcagtgcatcccagcctggagcctccggcttcaacattggctctgtgggtagtttggcccagcccacagcactgtctggctctcccttcactccagccactctggcgacaactacggcaggagcaacacagccagctgctgctacacccactgctgccaccaccagtgcagggtctacactgtttgcttcaatagctgctgctcctgcctcatccagtactacagtgctttccctctcagctccagcgacaactgcagccactcctactgctgggactttgggcttcagcctcaaggcccctggagcagctcctggtgcctccaccaccagcaccaccactactactaccaccaccactactactgcctccacctcctcctccaccacgaccactggctttgccttaagcctgaaacccctggtgccagctggccccagcagcgtggcagctactgctctgcctgcctccagcacagcagttgggactacgacgggtccagcaatgacctacgcgcagctggaaagcctgatcaacaagtggagtctggagctggaggaccaggagcggcacttcctgcagcaggccacgcaggtcaatgcctgggaccgcacactgattgagaatggggagaagatcaccagcctgcaccgagaggtggaaaaggtgaagctggatcagaagcgtctggaccaggagctggactttatcctgtcacagcagaaggagctggaagaccttctgagcccgttagaggagtcagtgaaggagcaaagtggcaccatctaccttcagcatgctgatgaggagcgtgagaagacctacaagctggctgagaacatcgatgctcagctcaagcgcatggcccaggacctcaaggacattattgagcacctgaacatggctggtggccctgcagacaccagtgacccactgcagcagatctgcaagatcctcaatgcacacatggactcccttcagtgggtggaccagagctctgccctgctgcagaggagggtggaggaggccagccgtgtgtgtgagagccggcgcaaggaacaggaacgcagcctgcgcattgcctttgactagccatacatgagttgggggtgggggtacctcttttgttgtagggctgctggctttggggtggttgtattgttgagaaaaatgctctttggtttggttccctgttatcagaagtggtttgcgaaggcatgatgtcatggatgtaataacctgtgtgctctggagacaggtgtgaaggtcactgaactctaggccagcatttaaagaacaagggcaaactcatcctttagccactccaatacaactgtgacagtgggatggcatgctccagagattggaatggagacatggcttctgtgcttccctgcttctctaactcccatctaacccatgtcctccagagcctgtgctgcacaaagcagagtcaccaagggagactgagcttaacaccggtttgcactggctacccctctcacccctctcttgtgagcttctgtggcagggactgactgctgatagttctttgagaacagagtggctgcggatttgcttctgaatgtcccagtgtcaaaccttagattcatagatagtgttgaaggctggcagttatgtctggtctattttatttctccacactctactgtagcctctatggtccctgatcaaaacattgcttttctaaataaagaaaacattgtgaaatcagacttgctgtgaatgtgtgtgtagtgggtccaagatttggcaggacactgctggtgtgatactcttcctgtgccaccaggttggaagcgctggactgagtgagccacagagtctagtctctaccttctatggggtgggcaggctgcaggtacaagaagaaagtcctgtctaccagtgtgcataagtaataagtcatccattaccctaatagatacaggtgtcattgtgatgtcatcagcagtaggaaataggggaacactagaagggatttcactggaccagcagtagagccactaagttattttcttgggtcttgttgggctttgaagcacaagagaaagctgggggtggggtgagggtatagaggtaagtagctcggcgggtaagagcactggttagctgctgctctttcaaggacccaggtttattcacagcacccacgtggtagcttacaaccaccctataaccagtccaggttatctggtgt

SEQ ID NO: 3033 - DNA, 853 bp, Rattus norvegicus
  Genbank Accession No. M63983
ggcacgagggacttacctcactgcttttcctagcggtacgacctcctccgccagcttcctcctcagaccgcttttcccgcgagccgaccggttctgtcatgtcgaccctcagtcccagcgtcgtgattagtgatgatgaaccaggttatgacctagatttattttgcatacctaatcattatgctgaagatttggaaaaggtgtttattcctcatggactgattatggacaggactgaaagacttgctcgagatgtcatgaaggagatgggaggccatcacattgtggccctctgtgtgctgaaggggggctataagttctttgctgacctgctggattacattaaagcgctgaatagaaatagtgataggtccattcctatgactgtagattttatcagactgaagagctactgtaatgaccagtcaacgggggacataaaagttattggtggagatgatctctcaactttaactggaaagaacgtcttgattgttgaagatataattgacactggtaaaacaatgcagactttgctttccttggtcaagcagtacagccccaaaatggttaaggttgcaagcttgctggtgaaaaggacctctcgaagtgttggatacaggccagactttgttggatttgaaattccagacaagtttgttgttggatatgcccttgactataatgagcacttcagggatttgaatcatgtttgtgtcatcagcgaaagtggaaaagccaagtacaaagcctaaaagacagcggcaagttgaatctacaagagtcctgttgatgtggccagtaaagaactagcagacgttctagtcctgtggccatctacttagtaaagctt

SEQ ID NO: 3034 - DNA, 936 bp, Rattus norvegicus
  Genbank Accession No. M64378
atggcttggagtactggccagaacctgtccacaccaggaccattcatcttgctgggcttcccagggccaaggagcatgcgcattgggctcttcctgcttttcctggtcatgtatctgcttacggtagttggaaacctagccatcatctccctggtaggtgcccacagatgcctacagacacccatgtacttcttcctctgcaacctctccttcctggagatctggttcaccacagcctgcgtacccaagaccctggccacatttgcgcctcggggtggagtcatttccttggctggctgtgccacacagatgtactttgtcttttctttgggctgtaccgagtacttcctgctggctgtgatggcttatgaccgctacctggccatctgcctgccactgcgctatggtggcatcatgactcctgggctggcgatgcggttggccctgggatcctggctgtgtgggttttctgcaatcacagttcctgctaccctcattgcccgcctctctttctgtggctcacgtgtcatcaaccacttcttctgtgacatttcgccctggatagtgctttcctgcaccgacacgcaggtggtggaactggtgtcctttggcattgccttctgtgttattctgggctcgtgtggtatcacactagtctcctatgcttacatcatcactaccatcatcaagattccctctgcccggggccggcaccgcgccttctcaacctgctcatcccatctcactgtggtgctgatttggtatggctccaccatcttcttgcatgtgaggacctcggtagagagctccttggacctcaccaaagctatcacagtgctcaacaccattgtcacacctgtgctgaaccctttcatatatactctgaggaacaaggatgtcaaggaagctctgcgcaggacggtgaaggggaagtga

SEQ ID NO: 3035 - DNA, 895 bp, Rattus norvegicus
  Genbank Accession No. M75153
atgggcacccgcgacgacgagtacgactacctctttaaagttgtccttattggagattctggtgttgggaagagtaacctcctgtctcgatttactcggaatgagtttaatctggaaagcaagagtaccattggagtagaatttgcaacaagaagcatccaggttgatgggaaaacaataaaggcacagatatgggacacagcagggcaggagcggtacagggctataacgtctgcatactatcgtggagcagtaggtgccttattggtttatgacattgctaagcatctcacatatgaaaatgtagaacgatggctgaaagaactgagagatcatgctgatagtaacattgttatcatgcttgtgggcaataagagtgatttacgtcatctcagggcagttcctacagatgaagcaagagcatttgcagagaagaatggtttgtcgttcattgagacatctgctctagattctacaaatgttgaagctgcttttcagacaattctaacagagatataccgcattgtttctcagaagcaaatgtcagacagacgtgaaaatgacatgtctccaagcaacaatgtggttcctattcatgtcccacccaccactgagaacaagccaaaggtgcagtgctgtcagaacatctaaggcgcctctctcccctagacggctgtgtatagtccatttcccaggtctgagatttaaatatatttgtaattcttgtggtcactttctgtgttttattacttccttacacttaagaatcttcccatgtcttaagtctttgatttggctttataaaatcctcaactttgtcctgaatgactcgagttctttttcatgctatggcttctctagccttagtttaataaactgaatgtttgaagtcctc

SEQ ID NO: 3036 - DNA, 1643 bp, Rattus norvegicus
  Genbank Accession No. M75168
ccttgctgttctccaacccctctctttccccttgcttcctctcacctgctctgggactcctaactcagagacctcccttctccccccgccggctggattatggcagagaacgatgtggacaatgagctcttggactatgaagacgatgaggtggagacggccgctggggcagatgggaccgaagctcccgccaagaaagacgtcaagggctcctatgtctccatccacagctccggctttcgagatttcctacttaagccagagttgctccgggccattgttgactgtggctttgagcatccatcagaggtccagcatgaatgcatcccccaggccattctggggatggatgtcctgtgccaggccaagtcaggcatgggaaaaacagcagtgtttgtcctggccacactgcagcagctggagccagttactgggcaggtgtcagtgctggtgatgtgtcacaccagggagctggctttccagatcagcaaggaatatgagcgcttctcaaagtacatgccgaatgtcaaggtggcagtgttttttggcggactgtctatcaagaaggatgaagaggtgctgaagaagaactgcccacacattgttgtggggactcctggccgaattctagccctggcccgaaataagagcctgaacctcaaacacattaaacactttatcttggacgaatgtgacaagatgcttgaacagctcgacatgcgtcgggatgtccaggaaatttttcgcatgaccccccatgagaagcaggtcatgatgttcagtgctaccttgagcaaagagatccgcccagtgtgccgcaagttcatgcaagatcctatggagatcttcgtggatgacgagaccaagttgacactgcacgggttgcagcaatactacgtgaaactgaaggacaacgagaagaaccggaagctctttgaccttctcgatgtcctcgagttcaaccaggttgtgatctttgtgaagtccgtgcagcgctgcatcgccttggcccagcttctagtggagcagaacttgccagccattgctatccaccgcgggatgccccaggaggagaggctctctcggtatcagcagttcaaggattttcagcggaggatacttgtggctaccaacctgtttggccgtggcatggacattgtgcgcgtgaacatcgcttttaactatgacatgccagaggactccgacacctacctgcacagggtggccagagcgggccggtttggcaccaagggcttggcatcacatttgtgtcagacgagaacgatgccaagatcctgaatgacgtgcaggaccgtttcgaggtcaacatcagtgagctgcctgatgagatcgacatttcctcctacattgaacagacacggtagaggaatcacccattctggactgtggcagtctgtgtagaagaggacgaaggggtcagggaggaaacactactgccccacccctgacacctcagcccaccctctccatgcctctctctgcgtcaccaccactcctaaacctagtcctgatttatcagagttgtttgtttgtttgtttgtttttgttttttaacaaaactaagaatgaaaaaaaaaaaaaaaaaaaaaaaaaaaagtaccttctgaggcgaaaagaaccag

SEQ ID NO: 3037 - DNA, 5563 bp, Rattus norvegicus
  Genbank Accession No. M75281
cctatctaattcctctcaagttaaataaacaaatgtcaaagggcagatagtttttcctatctttgccctctgtccaaagagtaagccataaagccacctttaagtagcttccttcactgtacgcaatgactggtattaatatttgtggaaaaattcacttccctttggctaagttaaaggttgtttcagaagttttgcttcagaataggacattatgaatgatcccatatctcctgaaatacaacccctcgaattgtttatcttgaccttcgatgatactactctgttaggatgcaaaaacgaaagaatttctggaacaccaagggttcaacttggatgttgaaggaatttgaaggtcagagaaagttggtattttcagttaagcaagaataccaacctatgagagccaacatatgaagactaagacttgtggagaaagttagggtgaagagatcacctggagctgaggaaaaatacgaaataagggagatacagaagatatgggcatttggggaatgtgatgatgtggcccacaaagagacagagaggatgaagatctggcaaccagtttgagaaatgagaagagagcaaatatagagtgcagaaatagaaaaaggaggggaaagggtaaaaaaatatggtactgggaaggagccaatgcaaaccaagagtacaggataaaaggctaactcacttgcaagctgtactcgctgcctaatccaggtttactgcagttcctctccttgtcttggatcctagtccatttctaagaagatcatggcctacctgctccatgctcaactatttctactgactacctttatattagttttgaacatgagactttgtcctgttctaggtcactttctgggtggcatagagaagtctagcatggaggaggaaggagcctcagaagcattgaactatgctgtcaatgagtataatgaaaagaacagtgacttgtacctgagccgtgtggtggaagtgaaggatgtccaaaagcaggtatgtcactatttattgagagaccctgacttatagagggacacctatatctccttagtccatctaacattctctccaacctattgctctctgactctcttttagtctgttttgtaagtagtgattttaggtggacatattggcagtatttgcatgttatttacttcagtatgtcttttccttagatattttctgtcctgtaaaagtgcatgtaggtgagcttacccaaactgcaataacctctgcttcactcctttgaaatgtaagaatatgctttcagtgttggcatgcctgtttcttgataaacttctcagccacaccagaacagaggttctccaacaggtcttctgagaaaatctttttagcatttgccgtcttcagcccagagacattgccaacagattattgtgtgaccaaaaaagtaaattctcaacacaactactatttgttcttgaaatttttagtgtcttttatataattcttattttgttaatggacaaatatcaagagaattcacaactatagcacaagggctctctgtcaatccatcctatgttctttactactatatttgattgtctttgatccaacttccaccattgacccaagaatatgcatctctgggtgagcaatttttaaatgtttggttagcaaactgtgcagtgaatattttccatcaggtaaaatgcaatttttatatattttaaaatatttttacaaataaatcaaacgtttatttatacacagatttctcatatacaggatgactcaatttgcatgaatcccttagtagccactctcagaatggcttcatgtgcctcagaacttccttttgcctgagtttcctttgtttaaatatttgcagaacctttgtgtaaatcacttgaacccatcaatgaggataagcctatatttcccagcgtatgaagggcttggtccctaaagtgatatcactgaagtatgatgtagcctattacaagtattaagaaatgatgatgcctatgtaaaaaacacatttttcgaacaggggttacacctatcatcacctatcatagcaaatatctatatagacaaaatatatttcttttgactctaagctacttcaggttgaatgccaattatgaccttttgtagtagaaatacaaccactctagaggtccttaccttctttttgcatgcttacctttgattgtccaaggaatcaacttgaaaaattgcttctacttccactagatctgatctttggatcatagtctggatgatcctctcaaaacttgtgtagaggaccatggggaactctacttaaacatagcagcatagagagcacctaaaggagaattttgcaaagaaaataaggggccaaaagtccatattattggctgctaaaccagaggatcaacattgaagcaatgagaaatatatactatcagttccttcatcatattaaaacctccaaatataaccatctaaccgagaccatctcacaagcacatggtcagtgttactaatatgaatacaaacacagtaatgtgtcataatgttagaggagaaaactctatccttctaaccctgaatatcaaagatataaagaataactgagttcttcctgtttacaggattttcacatgatcagaagttgtactgtgcattactcaattatggtacaagtgtaaaaggaaaccactgtgtggtcctctagattgccaacataattttaatgagaaacagataagtgattattaaggaaattttccatgctttatgtaataacgttgcagtctgagtggatctgagtctcttgagagtgctctcacataatctatccatgaatctttaaaatgatgtaactaatgagtagtcatgagagttacgtagtggagatacttaaacaaaatgtcactgatatccttttttcacttcatgtgtttgcctgacactttcttctatgtcctgctcttgtttctttgtcaacatgattgtatttcttggctctctagacttatttttgcgtagtgaattatcatctgaaaaataggacccttaaataaaaacatttctagatcaacatcttcattgaagcatattatgagaaaactactagagaatcatagaccattgcacacttaatagtatagatgaacctcatttagttgatatactagaaaatgcatgggattcatttaaggtctcaagggtcttttttttttttctttttttgtcggagctggggaccgaacccagggccttgtcttgctaggcaagagctctaccactgagctaaatccccaaacctcacagggttcttaatacttttttttgctctaacaactttcttctctagagatctatctggatgagtctagtattccctgtagtaaaaatagctaaaaggtattaaaataaaaattaaaaaaacatatctgacaatttcacactcaaaaatattcctcttaatatttgtatttaaagtggagacaatataaaagtgtatttcgtttgtgttgaacctttctttaagttaagcatcccatgtgttcatgtccatgcatggatgagttggaatataaggaaagaacggattttctcctctcacaaggatttagttaaaattaatagtgaattttcacacatcactcaacggaagagaatttcgtcttcatttgtggctagacccaaaagttagtcctgtgctttaggtccagacaacactggccctatgatcagccttgcattgattaatacaaaatctatattgcatacatgccagctgactcctcaaagctatgtacttttccaaagtattggaaccactcttttctctgtgtcctgtctcacttactggaatgtaaaagagctcatgtgaagttcagattaatgttaaaagtgaatcattcatttctccttaggtggtggctggaaccaaatttttctttgatgtgattctaggcaaaacaatatgtttgaagacacagggtgacttgaccaactgtcccttaaatgaagaggctgatcagcaggaggtatggatataacacatgccaaagacattttgttcaagtagagggatgtgcaagcttgtaagtttgtgaaagtatatttgtggtaatattcatacacaattacaatatttacaaacagggaagaaagtgtgtgtgtgtgtgtgtgtgtctgtgtgtgtgtgtgtgtgtttgtgtgtaagtaatttaaagtgtgtttggactattcttgggaagaattggaaatagtatataagtgacactgggagaaatgtgtatgtgtaagtaggttgaacttaattaagaatgcattcattaagaattgacagtatatgtagcagacaaggggaacaatatatctagacataaaaaattagagaactgtgaattctgtactctgagatgactgtagttttgcttggttgaaatggaagaggcaataatagtttgcatttttgagaagagatgtttacacctataagggaagcttttgtccacattacccctaaaggaaacgagtccttcagtgctgctctttacactcaatgctggcttatcccctgatagtggcacactggagatacagtgaatttgtgtaaagtggcaattcctcttcatatcactttccctactatgaagctttcagggatttctgtatcccatgagcctgaaggtcccctgtgtgggagtgagagggtcctatgtacagaatgtatgctatattcttgacttctgagatcctagaatgagtcatagggtattctaaaagggatgttttgacaaaaaggaaaagtctgttgcccttaaaggtagacagatatcatatggtggatggacataattatgttgtagatcatcagacactacgtaagaaggctgagtgttgttatactgggcagagggttgttttacattccccagtcaaattttgtcaaacagctctagcttcaaatttcttcctaaatttttccagcactgaacaaccttgtttgtttacttttctagcatgaattctgctctttcgtggttcatgatatcccatgggagaattatattgtcttgctgagctccagctgtcatagtatatgaattagtgtcaagtgttactgtgtaggatgcagatgtctctggcaatgcctcatcactccagtggatgatctttccttgatggatgcttaccagcatggatattagcaatggaatagactgctgtgcacttagagttagacccaagcacctctccctttattcttcctctacaaatgcccatatttgcttgctcattccttgctcaataaaatgtccaacagctcctttgtgtgactcgaatttcagtctatctaacattgtggtattgaaaacacctaatgagggctcacatccatatgtgtacagcaagcaaaaggccttatgacactgatattctctaaaatgaagagtagataaagaatgtaaagtgaataaaacaaaacaattttttgacacagtgggtcttagcagagagacggtataaaaggggactgtgggaagtcctcatgtagattgcctgtgtgctttggtcc

SEQ ID NO: 3038 - DNA, 1341 bp, Rattus norvegicus
  Genbank Accession No. M76740
ggcaccaccactgttgatttcacgaccactgctgagttcaccaccactcctgatgtcaccaccactcctgatgtgaccaccacccctggtgtcaccaccactgctggtgtcaccaccactcctgatgtcaccaccactgctggtgtcaccaccactcctgacgtcaccaccactgctgatgtcaccaccactcctgatgtgaccaccactgctgatgtcaccaccactgctggtatcaccaccactcctgatgtgaccaccactgctggtgtcaccaccactcctgatgtcaccaccactcctgatgtcaccaccactcctgatgtcaccaccactcctgatgtcaccaccactcctgacgtcaccaccactcctgatacaaccaccactcctgatacaaccaccactcctcaggtcaccaccactgttgatgtcacgaccactgttgatgtcaccaccactgctgaggtcaccaccactactgaggtcaccacctctcctgatgcaaccaccactactgacgtcaccaccactcctgaggcaaccaccactgatggtgtcaccaccactcctgatgtcaccaccacttctgatgtgaccaccactgctgatgtcaccaccactgctagtgtcaccaccactcctgatgtcaccaccactcctgatgtcaccaccactcctgatgtgaccaccactgctggtgtcaccaccactcctgatgccaccaccactcctgatgcaaccaccactcctcaggtcaccaccactgctgatgtcaccaccactgctggtgtcaccaccactgctggtgtcaccaccactccagatgtcaccacgactcctgatgtgaccaccactcctgacgtcaccaccactgctagtgtcaccaccactgctgatgtcaccaccactcctgaagtcaccaccactcctgaggtcaccaccactcctgctgtcaccaccacgcctcgtgtcactaccactcctgctgtcactacgacacgtgtcatcaccaccatgcctgtcatcactactacgcctgtcatgaccaccactccagtgaattgcctgaacggagggtactggtcaggtgcgatgtgcgtctgccccaatggcttctcaggggatcgctgtcagaacagagtccctgtggtcgactgccagaacggaggcacgtgggatgggctcaaatgtcagtgtaccggcctcttctatggcccaaggtgtgaggaagtgatggagagcgtagagataaagccgacggtctctgcatctgtggaagtgagtgtgacagtaaccagtcaagaatatagtaatgagctacaggaccgaaactccaca

SEQ ID NO: 3039 - DNA, 4008 bp, Rattus norvegicus
  Genbank Accession No. M80550
cccgggcagcgcgctctgcggtcgcctaccgcctgccgcccccgcgccgccgcgacgtggcaggaggcgatgcggcggcgccgctacctgcgggaccgcgccgaggcggcggcggcagcggcggcgggaggcggagaggggctgcagcggtcccgggactggctctacgagtcctactactgcatgagccagcagcacccgctcatcgtcttcctgctgctcatcgtcatgggcgcctgcctcgccctgctagccgtcttcttcgcgctcgggctggaggtggaagaccatgtggcatttttaataacggttcccactgccctggccattttctttgccatattcattcttgtctgcatagagtctgtgttcaagaagctactccgtgtgttttcgctggtgatttggatatgtctggttgccatgggatacctgttcatgtgcttcggagggactgtgtctgcctgggaccaggtgtcattcttcctcttcatcatctttgtggtatataccatgcttcccttcaacatgcgagatgccatcattgccagcatcctcacatcttcatctcatacgatagtgctgagcgtctacctgtctgcaacaccaggggccaaggagcacctgttctggcagatactggccaatgtgatcattttcatttgtgggaacttggcgggagcctaccacaagcacctcatggagcttgccttgcagcaaacctatcgggacacgtgtaattgcatcaagtcccggatcaagctggaatttgaaaaacggcagcaggaacggctcctgctctccttgctgccagctcacatcgccatggagatgaaagctgaaatcattcagaggctgcagggccccaaagcaggacagatggaaaacacaaacaacttccacaatctgtatgtcaaacgacacaccaacgtgagcatattatacgctgacattgttggcttcacccgccttgcaagcgattgctcccctggcgaactggtccacatgctgaatgaactctttgggaagtttgatcaaatagcaaaggagaatgaatgcatgagaattaaaattttaggagactgctattactgtgtttccgggctccctatatcactccctaaccatgccaagaactgtgtgaaaatgggattggatatgtgcgaagccataaagaaagtgagggatgctaccggagttgatatcaacatgcgtgtaggagtgcattctgggaacgttctctgtggtgtgattggtctccagaagtggcagtatgatgtgtggtctcatgatgttactctggcaaaccacatggaagctggaggagtccctgggcgtgttcacatttcttcagtcactctggagcacttgaatggggcttataaagtggaggaaggagatggtgagataagagacccatatttaaagcagcacttggtgaaaacctactttgtaatcaatcccaagggagagcgacggagtcctcagcatctcttcagacctcgacacactctggacggagccaagatgagagcatctgtccgcatgacccggtacttggagtcctggggagcagccaagccattcgcacatctgcaccacagagatagcatgaccacagagaatgggaagattagtaccacggatgtgccaatgggtcaacataattttcaaaatcgcaccttaagaactaagtcacagaagaagagatttgaagaagaactgaatgaaaggatgatccaagcaattgatgggatcaatgcacagaagcaatggctcaagtcagaagacattcaaagaatctccctgcttttctataacaagaatatagagaaagaataccgagctactgcactgccagcattcaagtactacgtgacctgtgcctgcctcatctttctctgcatcttcattgtacagatacttgtattgccaaaaacgtccatccttggcttctcctttggagctgcatttctctccctcatcttcatcctctttgtctgcttcgctggacagcttttgcaatgcagcaaaaaggcctccacctctctcatgtggcttttgaaatcatcaggcatcatcgccaaccgcccatggccacggatctccctcacaatcgtcaccacggctatcatactaaccatggctgtgttcaacatgtttttcctgagcaactctgaggagacaacccttcccactgccaatacatcaaatgcaaacgtttctgtcccggataaccaggcgtcgattcttcatgctcgaaacttgtttttcctcccgtacttcatatacagctgcatcctgggcttgatctcctgctccgttttcctgagggtgaactatgagttaaaaatgttaatcatgatggtggcactcgtgggctacaacaccattctactccacacccatgcccatgttctggatgcgtacagccaggtcctgtttcagagaccaggcatttggaaagacctgaagaccatgggctccgtgtcactctccatattcttcatcacgctgctggttctgggcagacagagtgaatattactgtaggttagacttcttgtggaagaacaagttcaaaaaagagcgggaggagatagaaaccatggagaacctaaatcgagtgctgctggagaacgtgcttcctgcacacgtggctgaacacttcctggccaggagcctgaaaaatgaggagctgtaccaccagtcctacgactgtgtctgtgtcatgtttgcctccattccggacttcaaggagttctacacagagtcagatgtgaacaaggaaggcttggaatgcctgcggctcctgaatgagatcattgctgactttgatgatctgctttctaagccaaagttcagtggtgttgaaaagatcaagaccattgggagcacatacatggcagccacgggactgagtgccatacccagccaggagcacgcccaggaacctgagcgtcagtacatgcacataggcaccatggtggagtttgcatatgccctggtgggaaaactggatgccatcaataagcactccttcaacgacttcaaactgcgagtgggtatcaaccatgggcctgtaatagctggcgtcataggggctcaaaagccacagtatgacatctggggcaacactgtcaacgtggccagcagaatggacagcaccggggtcctggacaaaatacaggtgactgaggagacaagcctcatcttgcagacgcttggctacacgtgtacatgtcgaggtatcatcaatgtgaaggggaaaggggacctgaagacatattttgtaaacacagagatgtcaaggtccctttctcagagcaacttggcatcctgagaagctgtctcttcctgacaagaagaatgtacttgcaggaaggtaccacgcactttctgactgcaacccttccccttcgtcctgatgtacgtgctctgccccatcctctggagcccctgcagactagttcctgtgacccagtgacatactgtttggtgtctgcgcgtgcccaggttgtcctgccacttgcactgtgcttgctcctaagcaggaggggaaggaaccatgtcctggaaggagagcattggaagaagtgatgaagaggtgaagtgaacacacattcttaaggcaataaaaccggggggtgtatattatcttctggtgcatgttcttctctggaaaatacggtagctcgtaactgcatccctagtctgatattcaaacacacagtatttgtgaataagctgatcccgtcacccaacatggagtctgtgttcacctacccatgtgtctcattgccagtggtcgtccttgggggctcagctgagactctcagcttctgtcaccttgctgtcctgtcttgtggcagcagcacgttgccatccatcaccagaattagtcctcacagcctaggaccagttttgtaccaaactcatctgatgttttgatgccatttgtcaaaagtaaggttaattcattaaaagttttatgtactttgaaaaaaaa

SEQ ID NO: 3040 - DNA, 912 bp, Rattus norvegicus
  Genbank Accession No. M80601
ccgctcgccttcctgctgcaagtgtacgcaccgcttccgggtcgggacgacgccttccaccgtagcctctttctcttctgctgtcgagagccgctgtgttgcgccggcctgcgagtttttcgtaatcagctaccaaggaaaaatgcattttactcatatgagcccccttctgaaacgggagcttcggatacagaatgtgtgtgcctccaacttaagtctggagctcatctctgcagggtttgtggttgcttggcccctatgacatgctctaggtgcaaacaggcacattactgcagcaaggaacatcagacattagactggcagctcggccacaagcaggcttgtacacagtcagaccatttagaccatatggttccagaccataacttgctgtttccagaatttgaaattgtaacagaaacagaagacgagattgggcctgaggtggtggaaatggaggattactctgaagttataggaagcatggagggagtacctgaggaagaactagattccatggcaaagcatgaatccaaggaagatcacatattccaaaagtttaaatccaaaatagcccttgaaccagagcagattctcaggtatggaagaggtattaaacccatctggatttctggtgaaaatattcctcaagaaaaagatattccagattgctcatgtggtgttaagagaatatttgaattccaggtcatgcctcagctgttgaaccacctaaaggcagacagactgggtacaagtgtggactggggcatcttggctgtcttcacctgtgctgagagctgcagcctgggcatcgggttcacagaagaatttgtgtggaaacaggatgtgacagagacaccatgaaaggtgttaaattcttaaaaataaatgttccttatgcctcactacctc

SEQ ID NO: 3041 - DNA, 485 bp, Rattus norvegicus
  Genbank Accession No. M81183
gaattcatttctctactgaaaccttaaagtagtatttggtcattcattgtatgtgtcttatatacccacccacacacagacacaaaggaaatctatcaaattaatcctgatgtattcgaagtggttattcaattcatttatggcagagcaatatcagtcctaatgactcgtgaaagtgttactaactgaatcattatcttacatttactgtttagtaagcatattttgaaaaatgtatggctagagtgtcataataaaatggtatatctttctttagtaattacattaaaattaatcatgtttgattaactggttcctctgatgtagtgtgtcatttcttaacatatagagaactgtagagcatttttttatttaatggcagtgtttgcaactcacaggcacagaaacactcagactaatcatttatcatagagatatagaacttacaggttaaagtattcacaatgtatgtaagagagttatga

SEQ ID NO: 3042 - DNA, 2153 bp, Rattus norvegicus
  Genbank Accession No. M81687
cgtcccctccgttctgcatccccaaacttcagccgcagctctgtttcaacccatcggctgcttgcttcaaatcagacagcaccgcgacccagacacccgagtccgcggagtgaaagcacaacgccgagtaggaccagaccaggaaaatagactcgtgaagcagcaactctggattgggagggcagaagccaacaagtgagaaggcgcggcgtttccggggcgctgtgcgaaagctagagcaggcgccagagaagacagctcgagctcagaacccgagaccaagcctctctcccggaggcagctcagctcctatcttctctaggcccgctgcagcgtgcgctgggcttcgttttatgcgggtacgagccacgtccccggggaatatgcagcgtgcgtggatcctgctcaccttgggcttgatggcctgtgtgtcggcagagacgagagcagagctgacatctgataaggacatgtaccttgacagcagctccattgaggaagcttcaggattatatcctattgatgatgatgactattcttctgcctctggctcaggagcttatgaagacaaagggagtccagatctgacaacatcccaactgattccaaggatctccctcactagtgctgctcccgaagtggaaaccatgacgttgaagacacaaagcatcacacccactcagaccgagtcacccgaagaaactgacaagaaggagtttgaaatctctgaggcagaagaaaagcaggaccctgctgtaaaaagcacagacgtgtacaccgagaaacattcagacaatctgttcaagcggacggaagttctagcagctgtcattgctggcggtgtgattggctttctctttgccattttcctcatcctgttgttggtgtaccgcatgcggaagaaagacgaaggaagctacgaccttggagaacgcaaaccgtccagcgcagcttaccagaaggcacccactaaggagttttatgcataaaactcccacttagtgtctctatttaagagatcactgaacttttcaaaataaagctttagcatagaataatgaatatctttgttatctgttttgttcattacagagccatgctggccctttaatgatgaagatcccattgtatttaaaatttttcatatatttctttagaatgacttaaaagtaaaaatttaacatctgcagtgttctgtgaatagcagtggcaaaatattttgttacaaaaacccttgacattcatggaattgatttgaacatctatgtgcaaatacaaaatgattgtgtttgtcctctggttcaaagatgactgctgttcccctcatcagcagatctccagttgaccttaccgagttgatctttgttaatttatctcttgttcctcttctctgccctcccttcttgtctcctcccttaaaaacaaaaccttatgccttttgtagctgtcatggtgcaatttgtctttgaatgattacaataatggtaatttagtgtatatgtgatttttttcaattatgtaaactttaacctcctctttatgtaatttttttaaatgtcagactacccattttacacttgctttaatttccattccctgtagcttcaggcagatttgcaaaggcaaattataaaattggattattactacgaaactgttagtcctagttatctaagcagtcttctcttggaggatttgacatcactgacaagcctcagcaaacccaaagatgctaacagtatttgagaagttgctacagactcctttggccactgtacttgctagtttacaatttgaaggtacaaggaagagtttaaaggaaaaaaaagatcagtttttgttcttaaaaatgcatttaagttgtaaacatctttttaagcctttgaagtgcctatgattctatgtaacttgttgcagactggtgttaatgagtatatataacagtttttaaaaagttggtattttataagcacagacaattctaatggtaacttttgtagtcttatgaatagacataaattgtaatttgggaacaagcaaactactgaataaatcacatggcctaatattgaaaatgtcactgttataaatttgtacatttcttatcaaatgtacagcttccctttgctatgactgactgtctgttctcagtg

SEQ ID NO: 3043 - DNA, 1563 bp, Rattus norvegicus
  Genbank Accession No. M81766
gaattccggggggaggctggccgggacgggatgggcgacacggggcgggattcccgaagcccagacagctcctccccaaatcccctttcccaggggatccctccctcttctcctcctggcccacctcacaccccttcagcacctccacctccaatgccacccccgccactgggctcccccttcccagtcatcagttcttccatggggtctcctggtctgccccctccggctcccccaggattctccgggcctgtcagcagccctcagattaactccacagtgtcgctccctgggggtgggtctggcccccctgaagatgtgaagccaccagtcttaggggtccggggcctgcactgtccaccccctccaggtggccctggggctggcaaacgactttgtgcaatctgcggggaccgaagctcaggcaagcactatggggtttacagctgcgagggctgcaagggtttcttcaagcgcaccattcggaaggacctgacctactcatgccgagataacaaagactgcacagtggacaagcgccagcggaatcgctgtcagtactgtcgatatcagaagtgcctggccaccggcatgaaaagggaggcggtacaggaggagcgacaacgggggaaggacaaagacggggatggggatggggctgggggagcccctgaggagatgccggtggacaggatcctggaggcagagcttgctgtggaacagaagagcgaccaaggcgttgagggtcccggggccaccgggggtggtggcagcagcccaaatgacccagtgactaacatctgccaggcagctgacaagcagctgttcacactcgtggagtgggcaaagaggatcccgcacttttcctccctacctctggacgaccaggtcatactgctgcgggcaggctggaatgagctcctcattgcgtccttctcccatcggtccatcgatgtccgagatggcatcctcctggccacgggtcttcatgtgcacagaaactcagcccattctgcaggcgtgggagccatctttgatcgggtgctgacagagctagtgtccaaaatgcgtgacatgaggatggacaagacggagcttggctgcctgcgggcaatcatactgtttaacccagacgccaaggggctctccaaccctggagaggtggagatccttcgggagaaggtgtatgcctcactggagacctactgcaagcagaagtatcctgagcagcagggccggtttgccaagctgctactacgtcttcctgccctccgctccatcggcctcaagtgtctggagcacctgttcttcttcaagctcattggcgacacccccattgacaccttcctcatggagatgcttgaggctccccaccagctagcctgagtccggatgcacacggagggagagtgtcgctgaggaggacttgagccgcgcgggggcgagaaccatggacaggtgcagagcaggaggggacttgcccatcctgccaggggtctggcaacacttaacagggtttgcgtggtccccaagtcagagcagagggaccccagatccctgtga

SEQ ID NO: 3044 - DNA, 3224 bp, Rattus norvegicus
  Genbank Accession No. M83143
ctcaaggggcctctgggttctatttccaaagttctcggtgtgttccgtaatacttacgttacatctctcgggtgtggagctaggaatctccagtaagagagaacatgcgatatttgttgttctggtatggattgcctcactcgtattctcagtgtgtctgtcattggaccccagccagtggcatctttgaaaatgagccattattatctttattgcttctggtcctgggcaagttagtcaccacagaaaagcgcttcctcaaggacagtttgtacaccgaaggaatcctaattgtatgggacccatccgtgtatcatgcagatatcccaaagtggtatcagaaaccagactacaatttcttcgaaacctataagagttaccgaaggctgaaccccagccagccattttatatcctcaagccccagatgccatgggaactgtgggacatcattcaggaaatctctgcagatctgattcagccaaatcccccatcctccggcatgctgggtatcatcatcatgatgacgctgtgtgaccaggtagatatttacgagttcctcccatccaagcgcaagacggacgtgtgctattatcaccaaaagttctttgacagcgcttgcacgatgggtgcctaccacccgctcctcttcgagaagaatatggtgaagcatctcaatgagggaacagatgaagacatttatttgtttgggaaagccaccctttctggcttccggaacattcgttgttgagtacctagccaggcacccttatccttctccatacgtcattttatggctactctcctggttaccgctgcttgaaggagtgtttttattcaacaggcccagcctgcttcctgcgctctagggaattttgttggcaagagttctggggcctccagcctgcctccctggggccaccgaggatgggagtccagattcttgccacactcattcctcctagacagcgtcctcctctccttctgcatgggtagggaaagatccacatttctcaccagggttgcgaaaactagactttgttttctccaactggatgatgtcatcctcgcaaggcagcacgtcctctgtggcttgaactctccctaggtattgatttcacatccgaaagaaattctcccagatcatgatttgtgtttcacagatgcagggtggcgggaggggagaaaaataattggggcaggatggggaagcctactcagttactccagaagggcgtcaaggtgctcccaactcccttgggacatagtcctgttgtcaccctgtctggctaggctgatccttaatgcaaaggaccctgggtgcttatgatttgggtagcccacttccaactccctgtggagatgaaaggtacaaaacctcctgatcacctgaccatctgtctccagcatggacgagagagacacccaacaggcagctaaaatgcaaacattccgtagcctgttgtctgtgtgctcctccctaagacacccaggaggggccagctctactgtgttcttgtagagctgcggcacggaggaagaagggatactggggaagctcttacaccttctgcgtcagaagatctcttttcattttcccctttatgaacactgtatggcctgttacattgatgttatatttggaggcccaaggagtttttgttaggaagtccctaccaccgtcagatgtagacagcaggttaaagtgctgccccacaagactggggttcttattttattttttttaaatgtctacctctcccctactaattgctattgttatcccaaaccttctccagcaggctcccctctcgaattttaatctttttctttaggggcaccccatcaactttccctgaccgtttgacaaatacccgaaaggtctctcagggcatggggagtatgtaataaatgattcttcccttagaatcttaatcattcctgggacttaggggggtgaagtgtgtgatcacagattgccaagcatacccaccctgtttggctctgggcaggaagcactgctcttcctggttccctcacaaggattttctgagatgtggagtggtttacctagcctctgatgaagccacagtgggcttctctaccaggtggcaataacctatggtcaaaactcaaggctggcacaatctgttcgattcaaggctactaagacttaatgctattgaacctgtgttctcacaggcttctgtttactgctgacctagagctcagaaactcagaccccactgtctcagtgtttcaagctgcttgccttattcgggcaatagaaagcccggagtgaaaagccctgggtttccaggttgacctctcacttcctcactgtgccactttgtttctgtatctgtaaaatgggggtgacaatcctacctcacagggctgtgtggggacaacaggaaaacatggctgcgatgtatgagaaccactggaaagcgcgtggctgggctgtgaccacagtgtataggaagtaggtaccctgctgtccttcctgtttccttatgaagaacctaccaggtgatcacacccgtgctgggccttgctacaagggagggcagtggagaggaacaggacattctttctgttgtgagacaactgcatcatttgcaatatgcaggggcctactatcttgttgcctgcaccccaggtctatttgtgctggggttgggggtgcacagagcattgagctgcttggccgctgtgtggaataaatctagagaattcctggctcacttcttctgatctcacacgctcattataaggcattaggactgtggatggagtggccaggaagttgatgttccttctgtcagcaagaggtacattagagatggagactacactgggtagattctagtttttaattcttattaatgtggggggaataaattaataagtataatatgattctgatgtctattagactttctctgtgctctttgtgagtaaggtgggccacggaggtatgagggcatcactgttagtttggtgaggtggttagtgactgatgtacaggaagtgtcttctacgtgggcactgacgtcagtagccatctatgcatcctaaatgcaggatcctcttgattctttctgccaatcaaatatatcgttgctcttggttcaggtttgtgtcagaaactttaaaaacatacctattaattctaaattatccaaagattatgtacaaattttaaaataaatgtctttttcag

SEQ ID NO: 3045 - DNA, 10120 bp, Rattus norvegicus
  Genbank Accession No. M83196
agactcttccctgaagctgccgggctaaggctaaggccagagccaatgcctccatgaggggctccctcccacaccccggggccagaggaccctctgccaccagagtgagatcctcgagaccatcatcctagtcaaccccagtgcagacagtatcagctcagaggttcaccatcttctcagcagcccatcagctcacaaactcctgatcctgagtggacaaactttagaacctgagggagaccttatcctacagagtggtacctactcatatcaaaactttgcccaggtccttcacaaacctgagattgcccagttgcttagcaacagagacccggagatccaggccttcctcactgtttcctgcttaggggagggtgactggagccacctgggactgtccagttcccaagagaccttgcacctccggctaaatcctgagcctgtgctacccaccatggatggtgtggctgagttctccgagtatgtctctgagactgtggatgtgccatccccctttgacctgcttgaaccgcccacctcaggaggcttcctcaagctctctaagccttgctgctacatctttcctggtggccgtggggactctgctctctttgctgtcaatggctttaacatcctggtggatggcggttcggatcgcaagtcctgcttctggaagctggtgcggcacctggaccgcatcgactccgtgctgctcacacacattggggctgacaatctgccgggcatcaacggcctcctgcagcgcaaggtggcagagctagaggaggagcagtcccagggctccagcagctacagcgactgggtgaagaacctcatctcccctgagcttggagttgtgttcttcaacgtgcctgataagctccggctgcccgacgcctcccgcaaggccaagcgcagcattgaagaggcctgtctcactcttcagcacttaaaccgcctaggcatccaagccgagcctctgtatcgtgtagtcagcaacaccatcgagccactgaccctcttccacaaaatgggtgtgggtaggctggacatgtatgtcctcaaccccgtcaaggacagtaaggagatgcagttcctcatgcagaagtgggcaggcaatagtaaagccaagacaggcattgtactggccaatgggaaggaggcagagatctctgtcccctacctgacctccatcactgctctggtggtatggctcccagccaaccctactgagaagattgtgcgtgttcttttcccgggaaatgctccccagaacaagatcttggagggcttggaaaagcttcggcacctggactttctgcgctaccctgtggcaacgcagaaggacctggctgctggggccgtgcccgccaacttgaaacccagcaaaatcaaacatcgggctgacagcaaggagagcctcaaagctgctcccaagacagcagtgagcaagctggccaaacgggaggaagtgttggaagagggggccaaggaggcccgctcagagctggccaaggagttagccaagacagaaaagaaagcaaaagaaccgtctgagaagcccccagaaaaaccctccaagtccgaaagggtgaggggcgagtccagcgaagcgctgaaggccgagaaacggaggctgatcaaggacaaggccggcaagaagcacctgaaggaaaagatttcaaagctagaggagaagaaggacaaggagaaaaaggagatcaagaaggaaaggaaggagctcaagaaggaggaagggagaaaggaagagaaaaaggatgccaaaaaggacgaaaagaggaaagataccaaaccagaggtcaagaaactctccaagccagacctgaagccttttacccctgaggtccgtaagaccctctacaaagccaaggcccctggcagggtcaaggtggacaaaggccgagccgcccgtggagaaaaggagttgtcttctgagccccggacacccccagcccagaagggggctgctccgcctgcagctgtcagtgggcacagagagttggccttgtcctcaccagaggacctcacacaggactttgaggagttgaagcgtgaggagagaggtttgctggctgaacaaagagatacggggctgggtgagaaaccactccctgcagatgccacagagcaggggcacccgagcgcagccatccaggtgactcaaccctctggccctgtgctggagggagaacatgtggaaagggagaaagaggtagtcccagactccccaggggataaagggagcacaaacagaggcccagactctggggctgaggtcgagaaagagaaagaaacctgggaggaaaggaagcagagagaagcagagctgggcccagagaacactgcggccagggaggagagcgaagctgaggtaaaggaggatgtgatcgaaaaggccgagttagaggaaatggaggagactcatccttcagatgaggagggggaagagacaaaggctgagagcttttatcagaaacatacgcaggaagccctaaaggctagcccaaagagcagagaggctcttggcggccgggacctggggttccagggcaaggcacccgagaaggagacagcatcattcctaagcagtttggccacacctgcgggagccactgaacacgtctcttacattcaggatgagacaatccctggctactcagagactgagcagactatttcagatgaggagatccatgatgagccagatgaacgcccagcgccgcccagatttcctacgagtacctatgacctctctgggcctgaaggtcctggcccctttgaagccagccaggctgcagatagtgctgttccagcctcctcgagcaaaacttatggggcacctgagactgaactcacctaccctcccaacatggtcgccgcccctctggctgaagaggaacatgtgtcctcagccacgtcaatcaccgagtgtgacaaactctcttcctttgccacatcggtggctgaggaccaatctgtggcttcactcacagctccccagacggaggagacaggcaagagctccctgttgctcgacactgtcacgagtatcccctcttcccgcactgaagccacccagggcctggactatgtgccgtcagctggtaccatctcccccacctcttccctggaagaagacaagggcttcaagtcaccaccctgtgaggatttctctgtgaccggggagtcggagaagaaaggagagactgtggggagaggcttgagcggggagaaggctgtggggaaggaggaaaaatatgtagtgacgtctgagaaactgtccggtcagtatgctgctgtgtttggtgcccctggacacaccctacccccgggggaaccagccctcggagaagtggaggaacggtgcctcagcccagatgacagcacggtgaagatggcttctcctccaccatctggcccacccagtgctgcccacacgccctttcaccagtctccagtggaagacaagtctgagccgcgagactttcaggaagattcctggggagaaacaaagcattctccaggtgtgagcaaggaagactctgaagagcagacggtgaagccagggcccgaggagggcacttcagaagaggggaagggacctcctaccaggagcccccaagcccaggacatgcctgtgagcattgctgggggtcagactggctgtactatccaactcttaccagaacaagacaaagccatagtgtttgagactggagaggcaggttcgaatctcggagcagggaccctccctggagaagtgaggacatcaactgaagaagccactgaacctcagaaagatgaggtacttcgctttactgatcaaagcctttcccctgaagatgcagagtctctgtctgtcctcagtgtggtctccccagacactaccaaacaagaggccactcccaggtctccctgcagcctgaaagagcagcagccgcacaaagacctttggccaatggtgtctccagaagacacccagtcactttctttctcagaagagagtcctagcaaggagacctctctggatatctcttctaagcagctctctccagaaagccttggcaccctccagtttggagaactgaacctaggaaaggaagaaagggggcctgtgatgaaggcagaagacgactcttgccacctagctcctgtgtctattccagagccacacagggccacagtgtcacctagcacagatgagacccctgctgggactttacctggtggctctttttctcactctgcactgtcagtcgataggaagcactcacctggggagatcacgggccctggtggacactttatgacatctgatagctccctcaccaagagtcccgagtctttgtcaagtcccgccatggaagatctggccgtggagtgggaaggtaaagctccagggaaggagaaagaacctgagctaaagagtgaaacccgacagcaaaagggccagattctgccggagaaggttgctgttgtggagcaggacttgatcatacatcagaaagacggggctctggatgaggagaacaaacctggaaggcagcaggataagactccagaacagaaaggcagagacttggacgaaaaggacacggctgcagagctggacaaaggcccagaacccaaagaaaaagacttagaccgggaggaccagggccagagagcagggcctccagcagagaaggacaaggcctcagaacaaagggacacagacctgcaacagacccaggccacagaaccaagagacagagcacaagagcgcagagattcagaagaaaaggacaagagtttagagctgagagataggactcctgaagagaaagatagaatattagtacaggaagacagggctccagagcacagcatccctgaaccaacacagacagacagagctccagatcgcaaaggcacggatgataaagaacagaaggaggaggcctcagaagagaaagaacaggttttagaacaaaaagactgggccctaggaaaggagggtgagaccttggaccaagaggccagaactgctgaacagaaagatgagaccctaaaagaggacaaaactcagggacagaagagctctttcgtcgaagataaaaccacaacatcaaaagagacggtccttgaccaaaagtctgcagagaaggccgacagtgtggagcagcaggatggagccgccctggagaagaccagagctttggggctggaagagagcccagcagagggaagcaaggctcgagagcaggaaaagaaatactggaaggaacaggatgtggtccagggatggcgagaaacatctccaaccaggggagagccagtgggaggccagaaagagcctgttccagcctgggagggcaagtctcctgagcaagaagtccggtattggagggacagagacataacactacagcaggatgcatactggagggagctaagctgtgacaggaaggtctggttcccccatgagctagatggccaaggagcccgtccacggtactgtgaggaacgtgaaagcacttttcttgatgaggggccagatgaacaagaaataacccccctgcagcacactccccggagtccctggacctcggatttcaaggatttccaggagcccctgccacagaaggggctggaagtagagcgctggcttgctgagtcaccagttggcctgccaccagaggaagaggacaaactgacacgctcgccctttgagatcatctcccctccagcatccccacctgagatgactggacagagggttccttcagctccaggacaagagagccctgtcccagacactgagtccacagcacccatgaggaatgaacctaccaccccttcatggctagctgagatcccaccttgggtacctaaggacaggcctctgcctcctgcacccctctccccagctccagctcccccaacacctgccccagagccacatactcctgtgcccttctcctggggcttagctgaatatgacagtgtggtggctgccgtgcaggagggggcagcggagctggaaggcggcccatactccccactcgggaaggactatcgaaaagctgaaggggaaagggaaggagagggtggggctggagctcctgacagcagctccttcagtccaaaggtcccagaggctggtgagagccttgccaccagggacactgagcagactgagccagagcagagagagcccacaccctatcccgatgagagaagctttcagtatgcagacatctatgaacagatgatgcttactggactgggccctgcttgccccaccagggagcctccactgggggcatccggggactggcccccacacctctcaaccaaggaggaggctgctggctgcaatacttctgcagagaaggagacttcctcccctgcctcgccccaaaacctccaatctgacactccagctttcagctacgcatctctggcaggacccgctgtacctcccaggcaagaaccggatccaggacccaatgtggagcccagcatcacccctcccgcagtgccccctcgcgcccctatctccctgagcaaagacctgagtccccctcttaatggaagcactgtgagctgcagcccggacaggaggaccccatccccaaaggaaacgggccgaggtcactgggatgatggtaccaatgactcagacctggagaagggggcccgggaacagcccgagaaagagactcggtccccaagtccccatcaccccatgcctatgggccactcctcactgtggcctgaaaccgaggcatacagcagcctttcctcagactcacacctaggatctgtccgtccaagtctggacttccctgcttcagcctttggcttctcctccttgcagcctgctccccctcagctgccctctccagctgaaccccgctccgcaccctgtggctcacttgccttctctggggaccgagctctggccttggttccaggaactccaaccagaacccgacatgatgagtacctggaagtgaccaaggcacccagcctggattcctcactgccccaactcccatcacccagctctcctgggggccctcttctctctaacctgcccagacctgcctcgccagccttgtctgaagggtcctcttctgaggctaccacgcctgtgatttcaagtgtggccgaacgcttccctccaggtctcgaggcagctgaacagagtgctgaaggactgggctcaggaaaagagtcggctgcccacagcctctgggacctcactcccctgagcccagctccctcagcttcactggacttggctccagctccagctccagctccagctccagctccaggcctgcctggagacttgggcgatggtaccctgccctgccgccctgagtgcacaggggaactcaccaagaagccaagccccttcctgagcccctctggagatcatgaagccaatggcccaggagaaaccagccttaatcccccagggtttgtcacagccacggcagaaaaagaagaggctgaagcccctcatgcttgggaacgagggtcctggcctgagggagctgagaggagctcccggccggatacacttctctcatctgagcagccactgcgtcctgggaagagctccgggggcccaccctgcagtctttcttctgaagtcgaggctggacctcagggatgtgctacggatccccgcccccactgcggggagctttccccctcattcctgaaccctcctctgcctccatccacagatgacagtgacctttccacggaagaagctcggctggcaggaaaaggagggaggcgacgggtagggaggccaggggccacgggaggtccatgccctatggctgatgagacaccccccacatcagccagcgactcaggctcctcacagtcagattctgatgtcccaccagaaactgaggagtgtccatccatcacagctgaggcagccctcgactcagatgaagatggggacttcttgcctgtggacaaagctgggggagttagcggaactcaccatcccagacctggccatgacccacccccaacccccctaccagacccccgcccatcccctccacgaccggatgtttgcatggctgaccctgaggggctcagctcagagtcggggagggttgagagactacgagaaaagggacgacctggccgtagggcccctggccgggccaagcctgcatctcctgctaggcggttggatattcggggaaaacggtcacctactcctggcaaagggcctgtagatcgaacatctcgtactgtaccccgaccacggagcactccaagccaggtcacctcagcagaagaaaaggatggtcacagtcccatgtccaaaggcttagtcaatggcctcaaggcaggatcaacagccttgggctccaagggtggttccggccctcctgtgtatgtggatcttgcctatatcccaaatcactgcagcggcaagactgcggatcaggacttcttccgccgagtacgtgcgtcctactatgtggtcagtggaaatgaccctgccaatggcgagccaagccgggctgtgctggatgccctgctggaaggcaaggcccagtggggggagaaccttcaggtgactctgattcccactcatgacacggaggtgactcgtgagtggtatcagcagacacatgaacagcagcagcagctgaatgtcctggtcctggcgagcagcagcactgtggtgatgcaggacgagtcctttccagcctgcaagattgagttctgaatgacccatgctcccttccccaaggatccactcctacagttcatttagagaatggctactgctgagtcctctggggttgagggaagtagagctgggcaggggccatgtcatattattaggctaagcggaaggtcctgtccttcccctcctctctccctgggggtttcaaaaccaaaggcaatgagggggcatacaaaatcatgaaaggttatctgatgcccaaaaacccctagagccactccctctcctagcactgccaaatgctggtcttgcacgaggatgggtttcagacagcacactcctccccatggaggaagatttaacaccctctcccccagaacctcattatttatttggcattccagaaaggattgctgataatgtatatgatgcagggaaggccactgttagtaaggtgccagagctgcgcccttttttccatctcccagtccctagccaccagagtctgggttccatcagcgacctggggacatgtggctactatactgtcttattgcttccctcaatatctgaatgtctcaatccaaaacttgaagctctttagaccaagaactagggagaggaaaaaggagctcatctctcagcccctgcttcaaaccacttacagccttgggctgtacccagaccaggctacctgggcagcacaacgggcaaggagagcccccaaccccagtcgctccaagcacccctatcacttagtcttcacctaccccatttcaataagcctcattccttctcatcccctgcttggcttctctgcatgtggtcatctgctatggcctggtgtgtaatgggtttaaaaaaagccactgcctgacatccacatccactttagccatgtgtgactccctcaacattccaatcctctaccatcctgcagctgaaatgggaacactggctgcctctctaaacctaaactcttggatagagtttctgggaggtggaggctggactagagacctggggagggggatgggagggaggaggggagagaagagaagaagctatagtttaactcctccagagtgaagacaggctgagcattctactacaggacagggcctcaccccaagcaagccagtgagcagcccagccagaccctgctggactgagaaacccagctgctgacagaccctgggacttgccttctttgccaagtcaaggggaaaccaaaaggagcttccctcctattcttcctagctcccctccctgccctggctctgctcctccccacacttccctgctacagtcccagttgctgtaacagccacctccactctaacaataaaccaagttcattgcggaaaaaaaaaaaaaaaa

SEQ ID NO: 3046 - DNA, 1314 bp, Rattus norvegicus
  Genbank Accession No. M84648
gaattccactctgcttcctcatgtgtctggattccgtactggagtcactgtgaggttaaaatataaataagggaagcattttctagaataccccaatgcttggagagcttccttttctttctttcctccaaatattcttaaagggatctggattctcctcggtgtcatgcagattctctctcaggtcccagttctgacagtgtaaatctttgggtccaagcccactcccaccgccttccctgtccccactgtggaacacagaccactccataccctagcctgtggcaactacctctgctgacagccattttgtcttcaactgcctagacccagtcctttcccaggttacccatacgcaatctcacactgactctgttcttcgtccccactggtccaaattggcagccttcctccaaagcaagcgcttagtgctctgagggtttttcccttgtgccttctcaatgatacttccttggctctcctttatgctccaatgaaaatgtcagccttggatttcccgaagttaatcaaaatcgcattcactattttgtctccggtatcacaagtgtcaatgggttgggaatgaaggctagcaggtgggctctgcccattgtctggctctagagaccccatgaaatgctggcaatttaaaggctctggacagagggaaggttcttcaataggacagcctttttcttttttttttttttttttttttcttcttttttttttttcggggctggggatcgaacccaggaccttgtgcttcctaggcaagcgctctaccactgagccaaatccccaaccccaggacagcctttttctgatacaggggttggagttatgaatcacttagtggggctaacaacatgaaactgggactatgtgtgaaagcatagatggtagggctatacggtaagaaaaagccgtgatggcttgttgtgaatcagtctcactgggtgagctttcttaagagcccaaagaagggcttcatgccaacccccatgtgtgtgtgccttctctggacttccttgacctttataccatcagaaattaatgtttaaccagaaaacaaggtttaaatgcaaggacagagaaatgcatcagttccaagctgtagtttgcagagctggactgagtggacctgtgaagaatccaaattccaaacaagtaagtagtatgttttgtcagacgataattgctgaaaaggcaccatttctattgtgtctcttgtgccctccatattactgaatgtgtgctgaaaggacgctctcctgagaatggggattattgatgacaaattatttcctctgt

SEQ ID NO: 3047 - DNA, 860 bp, Rattus norvegicus
  Genbank Accession No. M84716
ggctctcagagcggcaccatggcggtcgggaagaacaagcgcctgacgaaaggtggcaagaagggagccaagaagaaagtggttgatccattttctaagaaagactggtatgatgtgaaagctccagcaatgttcaatattaggaacatcgggaaaacactagttacaaggactcaaggaaccaaaattgcatcagatggcctcaagggtcgtgtgttcgaagtgagtcttgcagatctacagaacgatgaagttgcatttagaaagttcaagctaattactgaggatgttcagggcaaaaactgtctgactaacttccatggcatggatcttacccgggacaaaatgtgctccatggtcaaaaagtggcagaccatgattgaagctcatgttgacgtgaagacgaccgacgggtatttgctccgacttttctgtgttggtttcactaagaaacgtaacaaccagattagaaagacatcctatgcgcagcaccagcaggtccgccagatccgcaagaagatgatggagatcatgacccgagaagtgcagacaaatgacttgaaggaagtagttaataaactgattccagacagcattgggaaagacatagagaaggcttgccagtccatctatcctctccatgacgtttttgttaggaaagtcaaaatgctgaagaaacccaagtttgaattgggaaaactcatggagctccatggtgaaggcggtagttctggcaaaacaactggtgatgagacaggtgctaaggttgaacgagctgatggctatgaaccaccagtccaagaatccgtttaaaatccagatttttaatagcgacaaataaaaagtcctatttgtgaaca

SEQ ID NO: 3048 - DNA, 2364 bp, Rattus norvegicus
  Genbank Accession No. M88347
ctaaaccaacaggtttctgcgacctcagcaaatcccagcatgccttcagggacatcccagtgtgaagatggctctgcagggtgcccccaggacttggaggtacagccagaaaaagggcaactggagaagggagcctcaggggacaaggaaagagtctggatctcgcctgataccccaagcagatgtacttggcagctgggcaggcccatggcggattccccacattaccacacagtgccgacaaaatccccgaaaattttgccagatattctgaggaaaattggcaacacccctatggtcagaatcaacaggatctccaagaatgcaggactcaagtgcgagctgttggccaagtgtgagttcttcaacgccggtgggagtgtgaaggaccgcatcagcctccggatgattgaagacgctgagcgagccggaaccttgaagcccggagacacgatcattgagccaacttctggcaacacagggatcgggctggctctggcagctgctgtgaagggctatcgctgcattatcgtgatgcctgagaagatgagtatggagaaggtggatgtgctgcgagctctgggagctgagattgtgaggacgcccaccaacgccagattcgattcccccgagtcccacgtaggagtggcatggcgactgaagaacgaaatccccaattctcacattctggaccagtaccgcaatgccagcaaccccttggcgcactacgatgacaccgcagaggagatcctgcagcagtgcgacgggaaggtggacatgctggtggcttcagcaggcacgggtggcaccatcacgggtatcgcgaggaagctgaaggagaagtgcccaggttgtaaaatcatcggtgtagatcccgaggggtccatcctcgcggagcccgaggagctgaaccagacggagcaaacagcctatgaggtggaagggatcggctacgacttcatccccaccgtcctggacagggcggtggtggataggtggttcaagagcaatgatgacgattccttcgccttcgcccgcatgctcatctcccaggagggactgctgtgcggtgggagttcaggcagcgctatggccgtggctgtgaaggctgcccaggagctaaaggaaggacagcgctgtgtggtcatcctgcccgactctgtgcgcaactacatgtccaagttcttgagtgacaaatggatgctgcagaaaggcttcatgaaggaggagctctccgtgaagagaccctggtggtggcatctgcgtgtccaagagctgagcctatcagcaccgctgaccgtgttgcccactgtcacctgtgagcacaccatcgccatcctccgggagaagggttttgaccaggcacctgtggtcaacgagtctggtctaagacagtccaaagatatttgccatccaacgaagaggcacataatccaagcacatggcctgagaaaagttccagacaccgaagcctgatgaggtttcctagcaacagagccagggccatcctagggatggtgactctcgggaacatgttgtcctccctgcttgctgggaaggtgcggccatcagacgaagtctgcaaagtcctctacaagcagttcaagccgatccacctgaccgacacactgggcatgctctcccacatcctggagatggaccacttcgccctggtggtccatgagcagatccaataccgcaacaatggcgtgtccagcaagcagctgatggtgtttggtgttgttaccgccattgacctgctaaacttcgtggcagcccgtgagcagacccggaaatagagttcagaagtcaggactggcttccatcctccctgctgggacttcttggctttcagagacaccgactggtttccacacccaagtccagcaggtggctgctgaggccagcaccctcccctcctaacgctcagctccctataggaatcctctatgtccgagtagcttacgtgggctttcctctggtgtcccagaaccaaggaatggcagccaggaaagataggcacagactacactcgccacaagactcagggtgcctaggaaagtgtcctctccagagagggctccagcctgagaaagggcaaaccctggactgactgtgctcatcctcagggggcagtgctggccccagcaagggagcatgtgggttttaaatgaaggtgcgttccagtgacctgagacccacagctgtgaagtaaacgtcgtgcctgtacggagtgtcaccacctgggtcatgaccctgcttagcagttcctcctcacatctccctcctttcccgacaagcacctactttctgtctcaactcttcctataaatgaatcacatacctgtggtcatgtctacctaa

SEQ ID NO: 3049 - DNA, 2648 bp, Rattus norvegicus
  Genbank Accession No. M91599
catcaataacgaggaccccaagaccctcagcagctcctcgagtgggcactcctacctgcagcaagcaccttactggacacacccccaacgcatggagaagaaactgcacgcggtacctgccgggaacactgtcaaattccgctgtccagctgcagggaaccccatgcccaccatccactggctcaagaacggacaggccttccacggggagaatcgtatcggaggcattcggctgcgtcaccaacactggagcctcgtgatggagagcgtggtgccctcagaccgtggcacgtacacgtgtcttgtggagaactctctgggtagcattcgctacagctatctgctggatgtgctggagcggtccccgcaccggcccatcctgcaggcgggactcccagccaacaccacggctgtggttggcagcaacgtggagctgctgtgcaaggtgtacagtgacgcccagccgcacatccagtggctgaagcacatcgttatcaacggcagcagtctcggcgctgatggtttcccctacgtacaagtcctgaagacaacagacatcaatagctcagaggtggaggtgctgtatctgaggaacgtgtcggctgaggatgcaggggagtacacctgcctggcgggcaactccatcggcctctcctaccagtcagcgtggctcacagtgctacccgcagaggaagaagacctcgcgtggacaacagcaacatcggaggccagatatacagatattatcctatatgtccatggctcactggctttggttttgctcctgctgctggccggggtgtatcaccgacaagcaatccacggccaccactctcgacagcctgtcactgtacagaagctgtcccggttccctttggcccggcagttctccttggagtcgaggtcctctggcaagtcaagtttgtccctggtgcgaggtgtccggctctcctccagtggcccgcccttgctcacgggccttgtgagtctagacctacctctcgatccactttgggagttcccccgggacaggctggtgctcggaaagcccctgggtgagggctgctttgggcaagtggtttgtgcagaagcccttggcatggattcctcccggccagaccaaaccagcatcgtggctgtgaagatgctgaaagacaatgcctccgacaaggatttggcagacctgatctctgagatggagatgatgaagctaatcggaagacacaagaacatcattaacctgctgggtgtctgcactcaggaagggcccctgtatgtgattgtggaatatgcggccaagggaaaccttcgggaattcctccgtgcccggcgtcccccaggccctgatctcagccctgatgggcctcggagcagcgaaggaccgctctccttcccggccctggtctcctgtgcctaccaggtggcccgaggcatgcagtatctggagtctcggaagtgcatccaccgggacctggctgcccgaaacgtgctggtgaccgaggatgacgtgatgaagatcgctgactttggtctggcccgtggtgtccaccacatcgactactataagaaaaccagcaatggccgcctgccagtcaagtggatggctcctgaggcgttgtttgaccgtgtatacacacaccagagtgacgtgtggtccttcgggatcctgctgtgggaaatcttcaccctcgggggctccccataccccggcatcccagtggaggagctgttctcactgctgcgagaggggcacaggatggagcggcccccaaactgcccctcagagctgtatgggctaatgagggagtgttggcacgcagctccttctcagaggccgacttttaagcagctggtggaagctctggacaaggtcctgctggctgtctctgaagagtaccttgacctccgcctgacctttggaccctattcccccaacaatggggatgccagcagcacgtgctcctccagcgactcggttttcagccacgaccctttgcccctcgagccaagccccttcccatttcctgaggcgcagaccacatgagcctgggaacgatgttgcatgggctcgtaggcccgtggccgtgggactccaacctgtttcatcagcatttgacgttggcactgtcatcaggcctctgactcgaggctactgctggcccagatcctctctctggccctgttttggggaggcccattcttggtcttggggttcacagttgaggccttctgttccaaacttatgttcccagctcagagttcaactcctcgtctcaagatcatggtcgtgcccttggactcatcctcaaaggagcgaagcattaaggccttgacacttagcctccaccccaggggctctccgggcctgactgcaaatctttggtcctaaacatttctagctccccaaacaacctagaggcctcgggacttcactgcacccccgcccccgcagcccacaagcctcgccaccctggtccccaactccccactgcttgttctagcatcttgttgaaggagcctcagctctggtgtccttgagagagggaagcctgtggaaaagacagaagaacaaggcattttataaattattattattttttaaaaaaaaaaaaaaaaatctagaattctgcagaaggatcccgcgccat

SEQ ID NO: 3050 - DNA, 507 bp, Rattus norvegicus
  Genbank Accession No. M93297
tttagatttatttgtttactttgagtgttttgcctacctgtatgtatgcaccatgtgggtgctgggagtcaaacgcagagctctgggaaagcagcaagtattccagactgctaagccgtctctcccacccctcataattaattctcaacaggcagttgccaaacaaatagaaagaagctattaaaactcctgtttcttttgtagcgtgctcttcaggatcccaatgttgctgctttcatggtggagcccatccagggtgaagcgggtgttatcgttccagatccaggatacctgacgggagttcgagaactttgcacccggcaccaggttgtcccactcactttgcagtgacgccaggctcgcctgcacttgtttggactctgctgacaggctagatgatggattccaaggcttgaggaacatgctaatgcttgcaccttctgaggaacacgctaatgcttgcaccctctgaggaacatgctaaatgcttgcaccttctgaggaaca

SEQ ID NO: 3051 - DNA, 604 bp, Rattus norvegicus
  Genbank Accession No. M94557
aggcttgcgcgtcaggaaaagcctaaagattaggttataagaaaaaccaaagccatgtttcgaagacctgtgttacaggtatttcgtcagtttgtaagacaggagtctgaagtagccagcagtttggttcttgaacgatctttgaatcgtgttcagttacttgggcgagtaggtcaggaccctgtcatgagacaggtggagggaaaaaacccagtcacgatattttctctagcaacaaatgagatgtggcgatcaggggacaatgaagcataccaaatgggtgacgtcagtcaaaagacaacatggcacagaatatcagtgtttcggccaggcctcagagatgtggcttatcagtatgtgaaaaagggggctcgtatatttgtggaaggcaaagtggactatggtgaatacatggataaaaacaatgtgaggcggcaagcaacaacaatcatagctgataacattatatttctgagtgaccaggcaagagaaaagccattgaacggatgattcatcgttgatcattgtttggtacagtctcctttgcaaatcatgtacagtctatagtttaaagacaaaaattaaaatttttatataaaatgag

SEQ ID NO: 3052 - DNA, 2028 bp, Rattus norvegicus
  Genbank Accession No. M95762
ggcagcgaacacaagcgcatccggtagaacggaaagaacaggaattgcagagtgacttcaagtctccatacgatttactacccgggtgacggcagtgactcgacagagtagcggctgcaggtgggatggataacagggtctcgggaacgaccagtaatggagagacaaagccagtgtgtccagtcatggagaaggtggaggaagacggtaccttggaacgggagcaatggaccaacaagatggagttcgtactgtcagtggcgggagagatcattggcttaggcaacgtctggaggtttccctatctctgctacaagaacgggggaggtgccttctttattccctacctcatcttcctatttacctgtggcattcctgtcttcttcctggagacagcgcttggccagtacaccaaccagggaggcatcacagcctggaggaaaatctgtcccatcttcgagggcatcggctatgcctcacagatgatcgtcagccttctcaatgtctactacatcgttgtcctggcctgggccctcttctacctcttcagcagcttcaccactgacctcccctggggtagctgcagccacgagtggaatacagaaaactgtgtggagttccagaaaaccaacaattccctgaatgtgacttctgagaatgccacatcccctgtcatcgagttctgggagaggcgagtcctgaagatctcagatggcatccagcacctggggtccctgcgctgggagctggtcctgtgcctcctgcttgcctggatcatctgctatttctgcatctggaaaggggtcaagtccacaggcaaggtggtgtacttcacagctactttcccttacctcatgctggtggtcctgttgatccgaggagtaacactgcctggagcagcccagggaattcagttttacctgtaccccaacatcacacgtctgtgggatccccaggtgtggatggatgcgggcacccagatcttcttctcctttgccatctgcctggggtgcctcacggccctgggcagctacaacaagtaccacaacaactgctacagggactgcgtcgccctttgcattctcaacagcagcaccagcttcgtggccgggtttgccatcttctccatcctgggcttcatgtctcaggagcagggcgtacccatatctgaggttgctgaatcaggccctggcctggcattcatcgcctaccctcgagctgtggtgatgttacctttctcgcctttgtgggcctgctgtttcttcttcatggtggttctcctgggactagacagccagtttgtgtgtgtagaaagcctcgtgacagcgctggtggacatgtatccccgggtgttccgtaagaagaaccggagggagattctcatcctcatcgtgtctgtcgtctctttcttcatcgggctcattatgctcacagagggcggcatgtacgtgttccagctcttcgactactatgcggccagtggcatgtgtcttctctttgtggccatctttgagtccctctgtgtggcttgggtttacggagccagccgcttctatgacaacattgaagatatgattgggtacaagccgtggcctcttatcaaatactgttggctctttttcacgccagctgtgtgcctggcaaccttcctgttctccctgatcaaatacacgccactgacctacaacaagaagtacacatatccatggtggggggatgccctggggtggctcctagctctgtcctccatggtctgcattcctgcctggagcatctacaagctcaggactctcaagggcccactcagagagagacttcgccagctcgtgtgcccggctgaagaccttccccagaagagccaaccagagctgacttctccagcgacaccgatgacgtccctcctcaggctcacagaactggagtctaactgctagggacgaggcctttgacacacctgcgagtctgtctgtggggacagctacagacacagagggcagaaccacccctccgtgctggggcagagagaca

SEQ ID NO: 3053 - DNA, 1616 bp, Rattus norvegicus
  Genbank Accession No. M95768
atggcgctgagtgacctcctggaactcactctgctgctgctgctgcccctgctggagcggctctcggccgaggactgcccgtgctccgaggcttctctctgccgaccgatccgccaccaccgcgacttcgaggtctttgtgtttgatgttggacagaaaacctggaaatcttatgactggtcgcagattacgactgtggcagtttttggaaaatatgactcagaacttatgtgctatgctcattcgaaaggagccagggtagtgctaaaaggtgatgtggccctgaaggacatcattaatcctaccttcagagcgtcatggatagcgcaaaaagttgccttagccaaagcacaacacatggatggaattaatatagacatagaacaggaagttgattgctcgtcacctgaatatgaagcattgacagctttggtcagagaaaccacagagggtttccatcgtgagattgagggatcacaggtaacttttgatgtagcttggtcaccaaagggcatagacaaaaggtgctataattatactgggattgcggatgcctgcgactttctttttgtgatgtcttacgatgagcaaagtcagatctggtcagaatgtattgcagccgccaatgctccctacaatcagacattaactggatatggtgactacctcaggatgggcatcagccccaggaaacttgtaatgggtattccctggtatggctatgattacatttgcctaaacctctcaaaggatgatgtctgcgccattgcaaaggtccctttcagaggggctccttgcagtgatgctgcagggcatcaggtgccctacagggtcatcatgaagcaagtaaacagttctgtttctggaagccagtggaaccaagaccagcaagctccgtactataattacaaggatcccactggccgtttgcatcaggtgtggtacgataacccccggagcatctcactaaaggcagcattcgtcaaacactacggcttgcggggcattggcatgtggaacgcgaactgtctggactactcagatgacgctctagccagagagcaaacggaggaaatgtggggagccctgagaccacggctgtgatacatacagaggaatgtcttttgtcagacggttagatttgcaggactggcctgtgtaagcagatctacctcttcaagagataaaaatatatattttgtcatgttaccctaacttacttattggtctactcaatacacaggaaagaaataaagaaactattcatttgtacttggaaaatacatacatatcttaaatatccaggaatgtaaaagcaaaaacaagtcaacttactctattaaatattcctctgtttcagtattataattatattatattataattagaaaagttgcttttagaattccatgctgaatttttcctcctgttattaaaatatactgttaaaaaccaatagggatttttaaaaatgtataactagtagacaagtgaagatactggagaagggagtgcacatgaccatagtgtgttacacacatgtatagactatcatagtaaagcccattatttttataattaatatatgctaataaaagatgtgtaacttgaaatgg

SEQ ID NO: 3054 - DNA, 2563 bp, Rattus norvegicus
  Genbank Accession No. M96548
cggaacagtctaagggtgttcactttggggactcagtgagtccccctctgttatggagtacagtgtctcttgaatcttacttctggaaatccacggacaagaagactggtgacctatcgattttgtgatgcccacccctggctcctggttccctctctagaggcagaagagccaggcgcagctaatgggacgctttcggagatgctgcgtctgacaggtgcgaagcaacatgtgcaactcctttcttcttcctcccctcagatcctcctccatcttcacccatctttagaggaagagcctacagaaagaagatggctcctgagcaaagagaaggggcctctcaggtgtcagtgacatttgaagatgtggctgtgctctttactcgggacgagtggaagaagctggatctgtctcagagaagcctgtaccgtgaggtgatgctggagaattacagcaacctggcctccatggcaggattcctgtttaccaaaccaaaggtgatctccctgttgcagcaaggagaggatccctggcaggtggagaaagagggccccagatacttctctctcggattgaagtgcagtcatagaaccactaagtcaactcaaacacaagactcttcatttcaggaactgattgtaagaaaatctaaaagaacctttgccttcgaacctttgaacatgaagtcagaaaatcttttcatacatgaaggcaaattagaggaaaagtgggataagaatactttgactgtagaaagaagccataaaaacaatgaatttagcccaaagtcccatagagaaaaacggtcctcagaatgtaaaaagcagatatcttatttatctaacccaccaggaatcacaccggataaacgctataaatgtagcatgtgtgagaaaaccttcattaacacctcatctcttcgcaaacatgagaaaaaccatagtggagagaaattatttaaatgtaaagaatgttcaaaagccttcagccaaagttcagcccttattcaacatcaaataactcacactggagagaagccttacgtatgtaaagaatgtgggaaggccttcactctcagtacgtccctgtataaacatctcagaacccacactgtggagaaatcctacagatgtaaggaatgtggtaaatcctttggccaaaggtcaggtctttttatacaccagaagatccatgcccgagaaaaccctcatagatataacccaggaaggaaggcatccgcttccctctctggatgccagagagctcattccaggaagaagacctacttgtgtaatgaatgtggcaacaccttcaagtctagctcctccctccgttaccatcagagaatccacaccggagagaaacctttcagatgtagcgaatgcggcagagccttcagtcagagcgcatcacttattcagcacgaaagaatccacacgggagaaaagccctacaggtgtggcgagtgtgggaaaggcttcacttctatctcaagactcaatagacaccggataattcatacaggagagaaattgtataattgcaatgagtgtggcaaagccttaagttcccactcaactcttattattcacgaacgaatccacactggagagaaaccgtgtaaatgtaaagtttgtgggaaagccttcagacagagttcagctctgatccaacatcagagaatgcacactggggaaagaccctataaatgtaatgagtgcgggaaaacattcaggtgtaactcatccctaagtaaccaccagcgaatccacactggagagaaaccttatcaatgtatagaatgtgggatgtcgtttggacaaagttctgctcttattcagcaccgaaggattcacacgggagagaaaccgtttaaatgtaacacatgcggaaagacctttaggcagagctcctcacgtatagcacatcagcgaattcatactggggagaaaccctacgaatgtaacacgtgtgggaaacttttcaactataggtcatcccttaccaatcattataaaatccatgtggatgaggacccttaaaaagtaaatttgcatgtaaaaaagccttaaaccaaagctcttcagagaatgggcttgagagctgtaataaacatactatggcgtccctgtagtcatttagttactgtcaactaaattccatggataaatcctgtgtaacaggtaggagtgaaatattcatgcctgtccaacactttaaaaaaattgcttgaaatccggtggttatgtgtagtcctggctaccggggaccctgaggattgcttgactccacaagtttgaagagcaaatgttatggagctttccatctcagaagattagtgacctgaaatgaagaattcacagctgaaggccttgacttcaggtatttggaaaatggtgcttttctctctgcaacagtgtgtgctagatacaattgtaatcataggcatctaagtgaacagaggagtgggatggacttagcaaaacacaaaactctactgttgtgatacttttatactattttaataatatccaaaagggatcaacacaaatcaaaaaaaaaa

SEQ ID NO: 3055 - DNA, 1875 bp, Rattus norvegicus
  Genbank Accession No. M96674
gaattcgcggccgccgccgggccccagatcccagtgcgcgaggagcccagtcctagacccagcaacctgaggagaggtgcacacacccccaaggacccaggcacccaacctctgccagatgtgggggggtggctacccagaggcatgctcctcacccagctccactgtccctacctgctgctgctgctggtggtgctgtcatgtctgccaaaggcaccctctgcccaggtaatggactttttgtttgagaagtggaagctctatagtgaccagtgccaccacaacctaagcctgctgcccccacctactgagctggtctgcaacagaactttcgacaagtactcctgctggcctgacacccctcccaacaccactgccaacatttcctgcccctggtacctaccttggtaccacaaagtgcagcaccgcctagtgttcaagaggtgtgggcctgatgggcagtgggttcgagggccacgggggcagtcatggcgcgacgcctcccaatgtcagatggatgatgacgagatcgaggtccagaagggggtagccaagatgtatagcagctaccaggtgatgtacactgtgggctacagtctgtccctgggggccttgctcctggcgctggtcatcctgctgggcctcaggaagctgcactgcacccggaactacatccacgggaacctgttcgcgtccttcgtgctcaaggctggctctgtgctggtcattgattggctgctcaagacacgctatagccagaagattggagatgacctcagtgtgagcgtctggctcagtgatggggcggtggctggctgcagagtggccacagtgatcatgcagtacggcatcatagccaactactgctggttgctggtggagggtgtgtacctgtacagcctgctgagcatcaccaccttctcggagaagagcttcttctccctctatctgtgcatcggctggggatctcccctgctgtttgtcatcccctgggtggtggtcaagtgtctgtttgagaatgtccagtgctggaccagcaatgacaatatgggattctggtggatcctgcgtatccctgtactcctggccatactgatcaattttttcatctttgtccgcatcattcatcttcttgtggccaagctgcgtgcccatcagatgcactatgctgattacaagttccggctagccaggtccacgctgaccctcattcctctgctgggagtccacgaagtggtctttgcctttgtgactgatgagcatgcccagggcaccctgcgctccaccaagctcttttttgacctgttcttcagctcctttcagggtctgctggtggctgttctctactgtttcctcaacaaggaggtgcaggcagagctactgcggcgttggaggcgatggcaagaaggcaaagctcttcaggaggaaaggatggccagcagccatggcagccacatggccccagcagggacttgtcatggtgatccctgtgagaaacttcagcttatgagtgcaggcagcagcagtgggactggctgtgagccctctgcgaagacctcattggccagtagtctcccaaggctggctgacagccccacctgaatctccactggactccagccaagttggattcagaaagggcctcacaagacaacccagaaacagatgcctggccaaggctgaagaggcaaagcagcaagacagcagcttgtactatccacactcccctaacctgtcctggccgggtacaggccacattgatggagtaggggctggatatgatggagtagccatgctatgaactatgggtgttcccatgagtgttgccatgttccatgcacacagatatgaccttcagtaaagagctcccgtagg

SEQ ID NO: 3056 - DNA, 1420 bp, Rattus norvegicus
  Genbank Accession No. M97662
gtgggacttcagatcctgcaactgcctctggccatggcgggacctgagtggcagtccctggagcagtgcctggaaaagcatctgccgcctgacgatttgagccaggtgaagcgaattctctacggcaagcaaactaggaatcttgatctgcccagaaaagctttagaagctgcctcagaaagaaacttcgaactgaagggatacgccttcggggcagccaaggaacagcagagatgtccccagatcgtgcgcgtggggctcgttcagaacagaatcccgctccccacttccgcccctgtggcagaacaggtctctgccctccacaaacgcatagaggaaatagctgaggtggcagcaatgtgcggagtcaacatcatctgtttccaggaagcctggaatatgcccttcgctttttgtacacgagagaaacttccttggacagaatttgctgagtcagcagaggacgggctcaccaccaggttctgtcagaagctggcaaagaagcacaacatggtggtgatatctccaatcttggagcgtgacagagatcacgggggagttctatggaacacagctgtggtgatctccaactcgggactggtcatgggaaagaccagaaagaatcacatccccagagtgggcgacttcaatgagtccacttactacatggagggaaacctcggccaccccgtgttccagacccagtttggcaggattgccgtgaacatctgctatgggcggcaccaccccctcaactggctcatgtacagcgtcaacggagctgaaatcatcttcaacccttcagccaccattggagaactcagtgagtccatgtggccgatcgaagccagaaacgcagccatcgctaatcactgcttcacctgtgccctcaaccgtgtgggtcaggaacactaccccaatgagtttacttctggagatggaaagaaagctcaccatgacctcggctacttctacggttcgagctacgtggcagctcctgacggtagccggacccccggcctctcacgcaatcaggacgggctgctggtcactgagctcaacctcaacctatgccagcagattaatgatttctggactttcaagatgacgggccgacttgagatgtatgcccgggagcttgccgaagctgtcaaacccaactacagtcccaacattgtgaaggaagacctggttctagcccctagctcgggttaggttcgggggcagtggttaagttctaaacatgtgtgcgagagagttttcaatacccaggcaggaggagggtagactgggcaagcgtgtgtgtgataactgttgataagggatatgagatttttcttctggggatttggaaatgttttggggttcaaaaggtgatccgacagcattgaaacttcaataaacataactggatcgtaaa

SEQ ID NO: 3057 - DNA, 4595 bp, Rattus norvegicus
  Genbank Accession No. NM_012488
aggaccagatctctggcggggagtagggtgcaaggcagccaggtctccgatcctttccgcagcatggggaagcacaggctccggagcctggccctgctgccactgctgctgcggctgctgctgctgctgctgcccaccgatgcctcagctccacaaaaaccaatctacatggtgatggttccctccctgctccacgcaggaacccccgagaaggcctgcttcctgttcagccatctaaacgagacagtggctgtgagagtgtccttggagtctgtccatgggaaccaaagcctcttcactgaccttgtagttgacaaggacctattccactgtacctccttcaccgtcccacagtcttcatctgatgagctgatgtttttcactgtccaagtaaaaggagcaactcatgagttcaggaggcagagcacggtgctggttaagaagaaagagagcctggtctttgctcagactgacaagcccatctacaaaccaggacagacagtgagatttcgtgttgtctcattggacgaaagtttccatccccttaatgaattgattcctctactgtacattcaggatcccaaaaacaatcgcattgcacaatggcagaatttcaatttagagggtggcctcaaacagctgtccttccccctctcctcagagcccactcagggctcctacaaggtggtgatacgtacagaatcaggcaggaccgtcgagcaccctttctctgtggaggaattcgtgcttcccaagttcgaagtgagagtgacagttccagaaacaatcaccatcctggaggaagagatgaatgtgtccgtgtgtggaatatacacctatgggaagcctgttccaggacgtgtgactgtaaacatttgcagaaagtacagtaatccttctaactgcttcggcgaagagtccgtggctttctgtgagaaactcagccaacagttagacggccgtggctgcttctcacagctagtgaaaaccaagtccttccagctaaagagacaagagtatgagatgcagctcgatgtacatgccaagatccaagaagaaggaacaggtgtggaagaaactggaaaggggctcactaagatcacaagaaccataaccaaactatcatttgtgaacgtggattcacatttcagacaaggaattcctttcgttggacaggtgctcctggtggatgggagaggcacccctattccgtatgaaacgatcttcattggggcggatgaagcaaacctgtacataaatacaaccactgataagcacggcctggcgaggttctccatcaacaccgatgacatcatgggcacgtccctaactgtcagggccaaatacaaggatagcaacgcctgctatggattcagatggttgacagaagagaatgtagaggcttggcacactgcctacgctgttttctcaccaagcagaagcttcctgcacctggaatccctgcctgataaactgcgctgtgaccaaaccctggaggtccaggcacattacattctaaatggcgaggccatgcaggagctgaaggagctcgtcttctactatctgatgatggccaagggaggcatcgtacgggcggggactcacgttctgcccctgaagcagggacaaatgagaggtcacttttccatactcatctcgatggagacagacctggctcccgtggctcgactggtcctctatgccatcctacccaatggagaagtggttggagacactgctaaatatgagattgagaactgcctggctaacaaggtggatttggtcttccgcccgaatagcggtcttccagctacccgtgccctccttagtgtcatggcttctcctcagtccctttgtggcctgcgagctgtggaccaaagcgtgctgctcatgaaacctgagactgagctctccgcatccctgatttatgacctgctaccagtgaaagacctcactggcttccctcagggtgcggatcaacgggaagaagacactaatggctgcgttaagcaaaatgacacttacattaatggaatcctgtactcgccagtgcagaatacaaatgaagaggacatgtacggcttcctaaaggatatgggcttaaaggtatttaccaactcgaacatccgtaaacccaaagtctgcgaacggctcagagacaataaaggaataccagctgcgtaccacctcgtaagccaaagccacatggacgcttttctagagtcttcagagtctcccacagagactaggcgaagctacttccctgagacgtggatctgggacttggtggtggtggactcagcaggagtggctgaagtggaagtgacagtccccgacaccatcactgaatggaaggccggggccttctgcctgtctaatgacactggtctgggcctgtctcctgtggtccaattccaagccttccagcccttcttcgtggagctcacaatgccctactccgtgatccgtggagaagccttcacgctcaaggccactgtgctgaactacctccctacatgcatccgggttgccgtgcagctggaggcctctcccgattttctggctgccccagaggagaaggaacaaaggtctcactgcatctgtatgaaccagcggcacaccgcgtcctgggcagtgatccccaagtcattaggaaatgtgaatttcacagttagtgccgaggcactgaactctaaggagctgtgtgggaatgaggtaccggtggtccctgaacagggcaaaaaagacacgatcatcaagtccctgctggttgaacccgaaggtctagagaacgaagtgacatttaacagtctgctttgtccaatgggtgctgaggtatctgaactgatagccctgaagctgccatcagacgtggtagaggaatctgccagagcctctgtcacagttttgggagatatattgggttctgccatgcagaatacacaggatctcctcaagatgccctatggctgtggagaacagaacatggttctctttgctcctaatatctatgtcctggactatctgaatgaaacacagcagctgacacaggagatcaagaccaaggccattgcctatctcaatacgggctaccaaagacaattaaactacaagcaccgggatggctcctacagcgcctttggggataaacctggcaggaatcatgccaatacctggctcacagcctttgtactgaagagttttgctcaggctcgaaaatatatcttcatcgatgaagtacacatcacccaagccctcttatggctctctcagcagcagaaggacaatggttgtttcaggagctccgggtcactgctcaacaatgccatgaagggaggagtagaagatgaagtcaccttgtctgcctacatcaccatagctctcctggagatgtctcttcctgtcactcatcctgttgtccgcaatgccctcttttgcctggacacagcctggaagtcagcaaggggaggagctggtggcagccatgtctacactaaggcgctgttggcctatgcatttgcccttgctggtaaccaggacacgaagaaggagatcctgaaatcactcgatgaggaggctgtaaaagaagaagattctgtccactggaccagacctcagaaacccagcgtgtcagtgggcctctggtaccaaccccaggctacctcggctgaggtagagatgactgcatatgtgctcctggcttatcttaccactgagccagctccaacccaagaggacctaacggctgccatgctcatcgtgaagtggctcacaaagcagcagaattcccacggtggcttctcttccacccaggacactgtagtggctctccacgctttgtccaaatacgggtccgccactttcacaagagctaagaaagctgcacaggtgaccatccgttcttcgggcacattttctacaaaattccaagtcaacaacaacaaccaattattactccagagagtcacattgccgactgtgcctggggattacaccgtgaaggtgacaggagaaggctgtgtctacctccagacatccttgaaatacagtgttctcccgagagaggaggagttccccttcgctgtggtggtgcagactctgcctgggacatgtgaggatcccaaagctcacaccagcttccagatctcactcaacatcagttacactggaagccgttctgaatccaacatggcaattgctgacgtgaagatggtgtccggcttcatccccttgaaaccaacagtgaaaatgcttgaaagatctgtgcatgtgagccgaacagaagtcagcaataaccatgtcttgatttacctggataaggtgtcaaatcagacggtgaacttgtccttcacggttcagcaagatattccaataagagacctgaagccagccgtagtgaaagtctacgattactatgagaaagatgagtttgcagttgcaaaatacagcgctccctgcagcacagattatggaaatgcctgaggacgcagtgaataagaagtgtttcgccagagccctgacctcaggacttcccaagaaaaacagtgtatttgtatttccagagatttgatcaataaaccatttttttcatatct

SEQ ID NO: 3058 - DNA, 1619 bp, Rattus norvegicus
  Genbank Accession No. NM_012489
actttcaggcctcgtgaggtagagggctggcctgcgcctgcgcctgccatcattttggtttgttaagcaaggcagagcatgagcgagtcggtgggacgcacctccgcgatgcatcggctgcaggtagtgctgggccacctggccggccgacccgagtcgagctccgcgctgcaagccgcgccctgctccgctaccttcccgcaggcttcggcctccgacgtggtggtggtgcacggacggcgcacccccatcggccgcgcgggccgcggcggcttcaaggacaccacccccgacgagcttctgtcggccgtgttgaccgcggttctccaggacgtgaagctaaagcctgagtgtttgggagacatctctgtgggtaacgtacttgagccaggagccggagcagtcatggcgcgcattgcccaatttctgagtggcatcccagagaccgtgcctctgtcagcagtcaacagacagtgttcatcgggactgcaggcagtggccaacattgctggtggcatcagaaatgggtcttacgacattggcatggcctgtggggtggagtccatgtccctgtctaacagagggaaccctgggaatatttcctcccgcctgctggagagtgacaaagccagagactgcctgattcctatggggataacctcggagaatgtggctgagcggtttggcatctcacggcagaagcaagatgccttcgcgctggcctctcagcagaaggcagcaagtgcccagagcaaaggctgcttccgtgctgagatcgtacctgtgacaaccactgtcctcgatgacaagggtgacaggaaaaccatcaccgtgtctcaggatgagggtgtccgccccagcaccaccatggagggcctggccaagctgaagcctgccttcaaggatggaggctctaccacggctggaaactccagtcaggtgagtgatggagcagccgccgtcctgctggcccggaggtccaaggctgaagaactgggcctccccatccttggcgtcctgaggtcctatgcagtggtcggggtccctcctgacatcatgggcatcggacctgcctatgccatccctgcggccttgcagaaagcagggctgactgtgaatgacatagacatctttgagatcaatgaggcctttgcaagtcaggccctctactgtgtggagaagctgggaattcctgcagagaaggtgaaccccctggggggtgcaatagccctgggccaccccctgggctgcaccggagcaaggcaggtggtcacgctgctcaatgagctgaagcgccgaggcacacgggcttatggcgtggtgtccatgtgcattgggactgggatgggagccgctgctgtctttgaataccctgggaactgaggccctgactgcaggcactacccagagagtcctatagtagtgtctggagagggatggtacaggagccatcttcgtgggacactcagcagtggagggatttgtcacagcacttcaattcagaagatgtagtcgatgttggaacaggaggtggaactgccctgtcaagtaccccaagccatgctaaagtgagcatgggacacccaggttgcaaagccatctgtacctctgacggatgc

SEQ ID NO: 3059 - DNA, 1990 bp, Rattus norvegicus
  Genbank Accession No. NM_012493
tccggcttctaccactgtctgggatgaagcagccagcaaccatgaagtggagcgcatccatttccttccttctcctgctaaattttgctgaacccagagtactgcacacaaatgagtttggaatagaatccacgttagactcttcccaatgcccgacagagaaaaatatgtttaacgtagctaccattgtcgttgcccagtttgttcaggatgccacaaaggccgaagtaaacaaaatgagtagcgatgcgttggctgcaatgaaggaaaacactggcgatgggtgtttagaaaaccagctatctgtgtttctggatgaaatttgccacgagacggaactctctaacaagtatggattctcaggttgctgcaaccaaagcggggtggaaagacaccagtgtctgctggctcgcaagaagaccgctccagactctgtcccacccttccactttccagaaactgccgagagttgcccagcatacgaagaaaacagggcgatgtccataaacacgttcatctacgatgtgtcgaagaggaaccccttcctgtatgctcccaccattctttacttagccgctcagtatgacaaggcagttccagcatgctgcaaagctgacaacatggaggaatgcttccagacaaagagagcatcaatggcaaaggaattaagagaaggaagcatgctcaatgagcatgtgtgtgcagtaataagaaagtttggatcccggaatctccaggctgtactcatcattaaactaagtcaaaagtttcccaaagcaaatattactgagattcggaagctggccctggacgtggcccacatccacgagcagtgctgccacggcaacgcgatggagtgcctacaggatggggaaagcgtcatgacacatatgtgttctcaacaagaaattctgtcgagcaaaacagcagagtgctgcaaactacccaccatcgagctcggctattgcataattcatgccgaaaatggcgacaaaccggaaggtttaactctgaacccaagcgagtttttgggagacagaaattttgcccagttttcttcagaggaaaaactcctgtttatggcaagctttcttcatgaatattcaagaaatcaccccaaccttcctgtctcagtcattctaaaaactgctaagtcataccaggaaattttggagaagtgctcccagtctgaaacgccatcgaaatgccaggacaatatggaagaagaattgcaaaaacacatccaggagagccaggcactggccaaacaaagttgtaatctctaccagaagttaggaccctactacttacaaaatctgttcctcattggctacacgcggaaggctcctcagctgacctcagcagagctgatagacctgacagggaagatggtgagcattgcctcaacgtgctgccagctcagtgaggagaaacggtccgcctgcggtgagggactggccgacatttacattggacacttgtgtttaagacatgaggcaaaccctgtgaactccggtatcaaccactgctgcagttcctcgtattccaacaggaggctctgcatcaccagctttctgagggacgaaacctacgtccctccaccattctctgaagacaaattcatcttccacaaggatctgtgccaagctcagggccgagccctacagaccatgaaacaagagcttctcattaacctggtgaaacaaaagcctgaaatgacagaggagcagcacgcggctgtcactgctgatttctctggcctcttggagaagtgctgcaaagaccaggatcaggaagcctgtttcgcaaaagagggtccaaagttgatttccaaaactcgtgaggctttgggggtttaaacatctccaggaggaagaaaggacaaaaaaatgtgtcgacgctttggtgtgagcttttcggtttgatggtaactggtggagacttccatgtgggatttctatgccttaggaataaagacttttcaactgtt

SEQ ID NO: 3060 - DNA, 1442 bp, Rattus norvegicus
  Genbank Accession No. NM_012495
gtcccccccaccccagctgaataggctgcgttctcttggaacgcgccgcagaacgaggttctgtgaccctagccgcgttccctccttagttcctttcgcctacccacccgcgtacccgacagacccaccccgtcctgtgccaggaaagcgctgccaccggcaccatgccccacccatacccagcactgaccccggagcagaagaaggagctggctgacatcgctcaccgaattgtagctccgggcaagggcatcctggctgcagacgagtccactggaagcattgccaagcgcctgcagtccattggcaccgagaacaccgaggagaacaggcgcttctaccgccaactgctgctgactgccgatgaccgtgtgaatccctgcattggaggggtgatccttttccacgagacactgtaccagaaggcagatgatggccgtcccttcccccaagttatcaagtccaagggtggtgttgtgggcattaaggtagataagggtgtagtgcccctggctggaaccaatggcgagaccactactcaagggctggacgggctgtctgagcgctgtgcccagtataagaaggatggagccgactttgccaagtggcgctgtgtgctaaagattggggagcatactccctcgtccctcgccatcatggaaaatgccaatgttctggcccgttacgctagcatctgccagcagaatggcattgtacccattgtggagcctgaaattctccctgatggggaccatgacttgaagcgctgccagtatgtaactgagaaggtactggcagctgtctacaaggctctgagtgaccaccatgtctatctggaaggcacactgctgaagcccaacatggtcacccctggccatgcttgcacccagaaattttccaatgaggaaattgccatggcaaccgtcacagcacttcgtcgaacagtgccccctgccgtccctggggtcactttcctgtctggagggcagagtgaggaagaggcatccatcaacctcaatgctatcaacaagtgtcccctgctgaagccatgggccttgactttctcctatggccgagccctgcaggcctctgctctaaaggcttggggtgggaagaaggagaacctgaaggcagcccaggaggagtacatcaagcgagccctggccaacagcctcgcttgtcaaggaaagtacactccaagtggccagtctggagccgcagccagtgaatctctcttcatctctaaccatgcctactaaccagagctgatctaaggctgctccatcgacactccaggcccctgcctacccacttgctattgaagaggggccttcaggctctttcccatcactcttgctgccctcgtgtgtgcagtgttgtctgtgaatgctaaatctgccatcccttccagcccactgccaataaacagctatttaaggggg

SEQ ID NO: 3061 - DNA, 306 bp, Rattus norvegicus
  Genbank Accession No. NM_012501
atgcagccccgaatgctcctcatcgtggccctcgtggctctcctggcctctgcccgagctgatgagggagagggatccttgctgctgggctctatgcagggctacatggaacaagcctccaagacggtccaggatgcactaagcagcatgcaggagtctgatatagctgtggtggccagcaggggctggatggacaatcgcttcaaatccctgaaaggctactggagcaagttcactgataagttcactggcctctgggagtctggccctgaggaccaactaacaacaccaactcttgagccgtga

SEQ ID NO: 3062 - DNA, 3636 bp, Rattus norvegicus
  Genbank Accession No. NM_012504
ggagcctcggcgggaggaggcggacacgtggcagcggcggcggcagcggcagcagcagcggcggcagcagcggcggcctcggtccggggcgccggccgtcctccctctttcctccggcggcagccctagttcccgcctctcggctcccccggctccactctcccagccgggagctgctctctcctctttctagtctccagccacaggacccggcgcggggcccgcagcgccgccaccatggggaagggggttggacgagacaagtatgagcccgcagctgtatcagaacatggggacaagaagagcaagaaggcgaagaaggaaagggacatggacgaactcaagaaggaagtgtctatggacgaccataaactcagcctggatgaactccatcgtaaatacggaacagatttgagccgaggcctaacacccgcaagggccgctgagatcctggctcgggatggccccaacgccctcacgccccctcccactactcccgagtgggtcaaattctgtcggcagctgttcggtggcttctccatgttactgtggattggagccattctttgtttcttggcttatggcatccgaagtgctacagaagaggaaccaccaaatgatgatctgtacctcggggtcgtgctgtctgctgtcgtcatcataactggctgtttctcctattatcaagaagcaaaaagctccaagatcatggaatccttcaagaacatggtccctcagcaagccctcgtgattcgaaatggagagaagatgagcatcaacgcagaggatgtcgtcgttggtgatctggtggaggtgaagggcggagaccgaatccctgctgatctcagaatcatatctgcaaatggctgcaaggtggataactcctcactcactggtgaatcagaaccccagactcggtccccggatttcacaaacgagaaccccttggagacaaggaacattgccttcttctcaaccaactgtgttgaaggaactgcacgtggcatcgttgtgtacactggggatcgcaccgtgatgggcaggatcgccacccttgcttctgggctggaaggcggccagacccccattgctgaagaaatcgagcacttcatccacctcatcacgggtgtggccgtgttcctgggggtgtctttcttcattctctctctgatccttgagtacacctggctcgaggctgtcatcttcctcattggtatcatcgtagccaacgtgccggaaggtttgctggccaccgtcacggtatgtctgacgctcactgccaagcgcatggcgaggaagaactgcctggtgaagaacctggaagctgtggagaccttggggtccacatccaccatctgctccgacaagactggaactctgactcagaaccggatgacagtggctcacatgtggtttgacaatcaaatccatgaagctgacaccacagagaatcagagtggggtctcctttgacaagacgtcagccacctggttcgctctgtccagaattgctggtctctgtaacagggcagtgtttcaggctaaccaagaaaacctgcctatccttaagcgtgcagtagcgggagatgcttccgagtcggcgctcttaaagtgcatcgaggtctgctgtggctccgtgatggagatgagggagaagtacaccaagatagtggagattcctttcaactccaccaacaagtaccagctctccattcacaagaacccaaacgcatcggagcctaagcacctgctagtgatgaagggcgccccagaaaggatcctggaccgatgcagttctatcctcctccacggcaaggagcagcccctggacgaagagctgaaggacgcctttcagaatgcctacctagagctggggggccttggagagcgtgtgctaggtttctgccacctccttctgcctgacgaacagtttcccgaaggcttccagtttgacactgatgaagtcaatttccccgtggataacctctgcttcgtgggtcttatctccatgattgaccctcctcgagctgctgtccccgatgctgtgggcaaatgccgcagcgctgggattaaggtcatcatggtcacaggagaccatccaatcacagccaaagccattgctaagggggtgggcattatctcagaaggtaacgagaccgtggaagacattgctgcccgcctcaacattccagtgaaccaggtgaaccccagagatgccaaggcctgtgtagtacatggcagtgacttgaaggacatgacctctgaggagctggatgacattttgcggtaccacacggagattgtctttgctaggacctctcctcaacagaagctcatcattgtggagggctgccagcggcagggtgccatcgtggctgtcacaggggatggtgtcaatgactctccagctttgaaaaaggcagatattggggttgccatggggattgttggctcggatgtgtccaagcaagctgctgacatgattcttctggatgacaactttgcctccatcgtgactggagtagaagaaggtcgtctgatatttgataacttgaagaaatccattgcttacaccctaacaagtaacattccggaaatcacccccttcttgatatttattattgcaaacattccactgcccctgggcaccgtgaccatcctctgcattgacttgggcactgacatggttcccgccatctctctggcctatgaacaggctgaaagtgacatcatgaagaggcagcccagaaatcccaaaacggacaaacttgtgaacgagcgtctgatcagcatggcctatggacagatcggtatgatccaggccctgggaggcttcttcacttattttgtgattctggctgagaacggtttcctgccctttcacctgttgggcatccgagagacctgggatgaccgctggatcaatgatgtggaggacagctacgggcagcagtggacctacgagcagaggaagattgtggagttcacctgccacacggccttctttgtcagtatcgtggtagtgcagtgggctgacttggtcatctgcaagaccagaaggaattctgtcttccagcagggaatgaagaacaagatcttaatatttggcctctttgaagagacagctcttgctgctttcctgtcctactgccctgggatgggtgcagcccttaggatgtatcccctcaaacctacttggtggttctgtgccttcccctactcccttctcatcttcgtgtatgacgaggtgcggaagctcatcatcaggcgacgccctggcggctgggtggagaaggaaacctactactagcccactgccctgcacgccgtggaacattgtgccacacactgcacctacccctaccccccctttgtgtacttcaagtcttggagctcggaactctaccctggtaggaaagcaccaaagcatgtggggatccagacgtcctggaatgaagcatgtagctgtaatggggggcggggggagggctgcccgaaaaacaccgtggacggggacgacagcggggaaggtttatatgtgcctttttgtttttgtaaaaaaggaaaacctggaaagactgaaagattacgttttatatctggatttttacaaataaagatggctattataacggaa

SEQ ID NO: 3063 - DNA, 1764 bp, Rattus norvegicus
  Genbank Accession No. NM_012507
gccttaatcggccacctgccgcgttccactgcctctttacatctcggatttcggggcggctccctcccccatctttccctgcttctttgcaccccgctttttctgcgtttgcctcgaattttggagccgtctggttttgcacccctttttgttttgcttttaggcggtgtgtggggtgaaggtgccttggactcccttcctctggttatctttccctgttttgacagcccccctttctatcgcagtcgggggacctagcctcggtgcacctccgccgcactgccagcagaccacagcgcgtggctgtgcaccccggaatttgcaacagctgcatatctgtgatcggagtctccctcgcctcgctcccgcgctcattcggtgcgtggagggcttcagcgcgcaacgccccggcttctccgcagcccccagcagcgcgccgggactcgccccgtgcctccaagatggtcatccaaaaagagaagaaaagctgcgggcaggtggttgaggagtggaaggagttcgtgtggaatcctcggacgcaccagttcatggggcgcaccgggaccagctgggccttcatcctcctcttctacctcgtcttctatggtttcctcacggccatgttcaccctcaccatgtgggtaatgctgcagaccgtctctgaccatacccccaagtaccaggatcgactggccacaccaggcttgatgattcgacccaagactgagaaccttgatgtcattgtcaacattagcgacactgaaagctgggatcagcatgttcagaagctcaacaagttcttggagccttacaacgactccatccaagctcaaaagaatgatgtctgccgtcctgggcgatattatgagcaacccgataatggggttctgaactatccaaaacgtgcctgccagttcaaccggacccagctgggcaattgctctggcattggggaccctactcactatggttacagcaccgggcagccctgtgtcttcatcaaaatgaaccgggtcatcaacttctatgcaggggcaaaccagagcatgaacgttacctgtgttgggaagaaagatgaagatgctgagaatcttggacacttcatcatgttccctgccaatggcaacatcgacctgatgtattttccctactatggcaaaaagttccatgtaaactatacacagcccttggtggctgtgaagttcctgaatgtgacccccaatgtggaggtgaatgtagaatgccgaattaacgctgccaatattgccacggatgacgagcgggacaagtttgctgcccgcgtggccttcaagcttcgaatcaacaaagcctgaggctccccaccccctctcacccataccctcctgtggatgcttctggaatgtccttgaccctgcctgatccctccctcacccgccccaaaggtattttttataacagagctatgacttgtctgagcctcacacccttgcctcaacttctctacctagcctgacgtccacacgatttccaacatcttccaaccgtagcttagccagagacagagaggagtaggagttttctagttcaggagctggagttgttaccgggcgacagatgacttacccagcatgcacaagggcctctgcactgatggagttgttctagtctgagttgatgaatgagatgcccttacagctcctgtttcagtttctactcccatcccccgagagttatagagaagcggtcccatccacccggcctctgccgccacatatcccacgc

SEQ ID NO: 3064 - DNA, 781 bp, Rattus norvegicus
  Genbank Accession No. NM_012515
tgtggatctttccagaacagcagttgcaatcactatgtctcaatcctgggtacccgccgtgggcctcactctggtgcccagcctggggggcttcatgggagcctactttgtgcgtggtgagggcctccgctggtatgctagcttgcagaaaccctcctggcatccgcctcgctggacactcgctcccatctggggcacactgtattcggccatggggtatggctcctacataatctggaaagagctgggaggtttcacagaggaggctatggttcccttgggtctctacactggtcagctggctctgaactgggcatggccccccatcttctttggtgcccggcagatgggctgggctttggtggacctcatgcttgtcagtggggtggcaaccgccactaccctggcttggcaccgagtgagcccaccggctgcccgcttgctgtatccttacctggcctggctggcctttgccaccatgctcaactactatgtatggcgtgataactctggtcggcgagggggctcccggctcacagagtgaggacacctagccatcaggaatgcagccctgccagccaggcatcatgggttgaggtcatcctgctttcatgaccattgggcctgctggtctacctggtcttagtccaggaagccaccaggtaggtcaaggtggtcagtgctaagtcccatgcggggacagttgtacctgcttttctgcactgctgcaggcgtgccctaggagcatggggcctttaaagctaaataaagtctttaactt

SEQ ID NO: 3065 - DNA, 1882 bp, Rattus norvegicus
  Genbank Accession No. NM_012516
gggcccttgtctacgttctgcagagcctccggtccaactttgttccaaatgagcctcactgctgctctttgggttgctgtattcggaaaatgtggcccaccacctgatttaccctacgccctgccagcaagtgagatgaaccagacagactttgaaagtcacactaccctgagatacaattgtcgccctggctatagtagagcgagctcaagccagagtctctactgtaaacctctggggaaatggcagattaatatcgcctgcgtcaaaaagtcatgcaggaatccaggagacttacaaaatggaaaggtggaagttaagacagatttcttgtttggatcacagatagaattcagctgctcagagggatatatcttaattggctcatccactagttattgtgagatccaaggcaaaggagtttcctggagtgatcctctcccagaatgtgtaattgccaagtgtgggatgcctccagacatcagcaatgggaagcacaatggtagagaggaagaattcttcacatatcgttcctcagtcacctataagtgtgatcctgacttcacactccttggcaatgcctccattacctgcactgtggtgaacaaaacagtaggtgtttggagcccaagccctcctacctgtgaaagaatcatctgtccttggccaaaagttttgcatggaacaattaattctggattcaagcatacctataaatacaaagactctgtgagatttgtctgccagaaagggtttgtcctcagaggcagcggtgtaatccattgtgaggctgatggcagctggagtcccgtaccagtgtgtgagctcaatagttgcactgatattccagacattcctaatgctgccctgataaccagtcccaggccaagaaaggaagatgtatatccagtgggtactgtgctccgttacatctgtcgtcctggctatgaacctgctacgagacagcccatgactgtgatttgtcagaaagatctcagctggagcatgcttagggggtgtaaggagatatgctgtccagtaccagacccaaagagtgttagagtcattcaacatgaaaaggcacatcctgacaacgactgtacttacttctttggtgacgaagtgtcatacacatgtcaaaatgatataatgcttacagctacttgcaagtcagatggcacctggcatccccggacaccatcatgtcatcagagttgtgattttccgcctgccattgctcacggacgttatacaaaatcttcttcatactacgtcagaactcaggttacatatgaatgtgaagaaggatacagactggttggagaggcaaccatctcctgctggtattcacaatggacaccagcagctccacagtgtaaagctctatgtcggaaaccagagataggaaatggagtactgtctactaataaagatcaatatgtcgaaactgaaaatgtcaccatccaatgtgactcgggctttgtcatgctaggttcccaaagcatcacttgttcggagaatggaacctggtacccaaaggtgtccagatgtgagcaggaggtccctaaagactgtgagcacgtgtttgcaggcaagaagctcatgcaatgtctgccaaattcaaatgacgtgaaaatggccctggaggtctacaagctgactctggagattaaacaattacagctccagatagacaaggcaaagcacgttgaccgggagttatgagcgggtgttctctcaaggaggaagaagtacctcatgggctttctgacttcagtgccaagcagaacgtctgcatttttagcaacctttgtaactttggcaccaatgttcatggtaataaatatctgcttagaataattcattaaagcataatgtaagc

SEQ ID NO: 3066 - DNA, 691 bp, Rattus norvegicus
  Genbank Accession No. NM_012518
aaaagagtgtggagccgagacgcgcggcagagctcgagctgctgcagctgctgccgccgccagagtaacctcgatccccgagctccggatacgtgccccgccatggctgaccagctgaccgaagaacagattgcagagttcaaggaagccttctccctctttgacaaggatggagatggcaccattaccaccaaggagctggggactgtgatgagatcgctggggcaaaaccccactgaggcggaactgcaggacatgatcaatgaggtggatgctgatggcaatgggaccattgacttcccagagttcctgaccatgatggccagaaagatgaaggatacagacagcgaggaggagatacgagaggccttccgtgtctttgacaaggatgggaatggctacatcagtgctgctgagctgcgtcacgtcatgacgaacctgggggagaagctgactgatgaggaagtggatgagatgatccgagaggcggacattgatggagacggccaggtcaattatgaagagtttgtacagatgatgactgcgaagtgaaggcccgggcagctggccatgcccgttctcctgatctcttcttgcgctctcctctcttcaacactcccctgcgtacccggttctagcaaacgccaattgattgactgagaatctgataaagcaacaaaagatttgtccc

SEQ ID NO: 3067 - DNA, 2495 bp, Rattus norvegicus
  Genbank Accession No. NM_012520
attgcctaccccgggtggagaccgtgctcgtccggccctcttgcctcacgttctgcagctctgcagctccgcaatcctacaccatggcggacagccgggacccagccagcgaccagatgaagcagtggaaggagcagcgggcccctcagaaacccgatgtcctgaccaccggaggcgggaacccaataggagataaacttaatatcatgactgcggggccccgagggcccctcctcgttcaagatgtggttttcaccgacgagatggcacactttgacagagagcggattcctgagagagtggtacatgcaaagggagcaggtgcttttggatactttgaggtcacccacgatattaccagatactccaaggcaaaggtgtttgagcatattgggaagaggactcctattgccgtccgattctccacagtcgctggagagtcaggctcagctgacacagttcgtgaccctcgtgggtttgcagtgaaattctacactgaagatggtaactgggacctcgtgggaaacaacacccctattttcttcatcagggatgccatgttgtttccatcctttatccatagccagaagagaaacccacaaactcacctgaaggaccctgacatggtctgggacttctggagtctttgtccagagtctctccatcaggttactttcttgttcagcgaccgagggattccagatggacatcggcacatgaatggctatggctcacacaccttcaagctggttaatgcgaatggagaggcagtgtactgcaagttccattacaagactgaccagggcatcaaaaacttgcctgttgaagaggcaggaagacttgcacaggaagacccggattatggcctccgagatcttttcaatgccatcgccagtggcaattacccatcctggactttttacatccaggtcatgactttcaaggaggcagaaaccttcccatttaatccatttgacctgaccaaggtttggcctcacaaggactaccctcttataccagttggcaaactggtcttaaacagaaatcctgctaattattttgctgaagttgaacagatggcttttgacccaagcaacatgccccctggcattgagcccagcccggacaagatgctccagggccgcctttttgcttacccagacactcaccgccaccgcctgggaccaaactatctgcagatacctgtgaactgtccctaccgtgctcgcgtggccaactaccagcgcgatggccccatgtgcatgcatgacaaccagggtggtgctcccaactactaccccaacagcttcagcgcaccagagcagcagggctcggccctggagcaccatagccagtgctctgcagatgtgaagcgcttcaacagtgctaatgaagacaacgtcactcaggtgcggacattctatacgaaggtgttgaatgaggaggagaggaaacgcctgtgtgagaacattgccaaccacctgaaagatgctcagcttttcattcagaggaaagcggtcaagaatttcactgacgtccaccctgactacggggcccgagtccaggctcttctggaccagtacaactcccagaagcctaagaatgcaattcacacctacgtacaggccggctctcacatagctgccaagggaaaagctaacctgtaaagcacgggtgctcagcctcctcagcctgcactgaggagatccctcatgaagcagggcacaagcctcaccagtaatcatcgctggatggagtctcccctgctgaagcgcagactcacgctgacgtctttaaaacgataatccaagcttctagagtgaatgatagccatgcttttgatgacatttcccgagggggaaattaaagattagggcttagcaatcacttaacagaaacatggatctgcttaggacttctgtttggattattcatttaaaatgattacaagaaaggttttctagccagaaacatgatttgattagatatgatatatgataaaatcttggtgattttactatagtcttatgttacctcacagcctggtatatatacaacacacacacacacacacacacacacacaccaaaacacacatacactatacacacacacacacacacacactaaaacacacatacacaacacacacatacactacacacacagaacacacaacacaaacatacacacataggcacacacacacacacacacacacacacacacacacacacacacacacatgaatgaagggattataaagatggcccacccagaatttttttttatttttctaaggtccttataagaaaaaccatacttggatcatgtcttccaaaaataactttagcactgttgaaacttaatgtttattcctgtgtagttgattggattccttttccccttgaaattatgtttatgctgatacacagtgatttcacatagggtgatttgtatttgcttacatttttacaataaaatgatcttcatgg

SEQ ID NO: 3068 - DNA, 1699 bp, Rattus norvegicus
  Genbank Accession No. NM_012523
gaattcggcacgaggtattttttctctcttcacttctccttttacacaaatagacatagacttctgggttaccagactgtgctcgccactttaaagataataagcaaattctacctgaagtactgagggacactgccttctaaagggcatactatcccagcatgggcatgagcagcctgaaattgctgaaatatgttctgtttttctttaactttcttttttgggtctgtggctgttgcattttgggctttgggatccaccttctggtccagaatacctatggaatactcttccgtaatctccccttcctgacacttggcaatgttctggtcattgtgggctccattatcatggtagttgccttcttgggctgcatgggatcaatcaaggagaataagtgcctgcttatgtcgttctttgttctgctgctgcttattctccttgctgaggtgaccttagccatcctgctctttgtgtatgaaaaaaagatcaacacgttagtggcagagggcctgaatgacagcatccaacattatcactctgacaacagcaccaggatggcatgggacttcatccagtcacaactgcagtgttgtggtgtaaatggctcaagtgattggatcagtggtccaccatcttcctgcccatcaggtgcagatgttcagggttgttataaaaaagggcaggcgtggtttcactccaatttcttgtatattggaatcgttaccatctgcgtatgtgtgatacaggtgctggggatgtcctttgctctgacactgaactgccagattgacaaaaccagccaggctttagggctgtgatttacacctaccttctgcttaagtgatttatttctctctagaaagtcaaagcacccattccataaggagttaaacaattacgtgcctcactggcattttgactttctcttattccttctttgactggacctctgtcttatacacatccagggaagagaacatttgtcatggacttcccacatcaagcagaagacaaacattaaccaactgatagcagtaaccatatcccttaaagatgatgaaacatacctgggtaattttttaaaagagacactgtagcactgtaatttgatatccactgctagctgcaggtgtgatatatctcagaatactggcctaccacatgtaatccattgagtttagccccaaatccaataaaaagaggtccaagtttaaatgttagactcttaacaattgtaaaatcaatctctaccttctaaatcttgctgctgtcactctacaaagtcacataggagacaagctgaaggaaaatttggagtcccattcattagataattgacatgtccagttcccttttgaacacagtccttgggaataggaatcatacagagatcttttatcactggaaaaacattctgatttctttgttaaaatgtattattgattttgttacatcatccacacatccatccatccatccatccatccatccatccatccatccataaaagactaattattctcatcctaccatcagccagtttgcagctttgaattacattgccaaagaacaactcagaagaattaatatctccagtgtgttagctgataatcatatccatgttgatgttgttgttatttctctattaaataaggttctgttaatgtaccattttaacctgtctcgtgccgaattc

SEQ ID NO: 3069 - DNA, 3578 bp, Rattus norvegicus
  Genbank Accession No. NM_012527
agttggtgtgttcttccttggactatgtcagagagtcacaatgaccttgcacagtaacagtacaacctcgcctttgtttcccaacatcagctcttcctgggtgcacagtccctcggaggcagggctgcccttggggacagtcactcagttgggcagctacaacatttcacaagaaactgggaatttctcctcaaacgacacctccagcgaccctctcgggggtcacaccatctggcaagtggtcttcattgccttcttaactggcttcctggcattggtgaccatcattggcaacatccttgtcattgtggccttcaaggtcaacaaacagctgaagacagtcaacaactacttcctcttaagcctggcctgtgcagacctgatcatcggggtcatttccatgaacctgttcactacctacatcattatgaaccgttgggcactggggaacttagcctgcgacctctggctctccattgactatgtggccagcaatgcctctgtcatgaatctgctggtcatcagctttgacaggtacttttccatcactaggccactcacctaccgagccaaaagaacaacaaaacgacgtggtgtgatgattggtctggcttgggtcatctcctttgtcctatgggctcctgccatcttgttctggcaatactttgtagggaagagaactgtgcccccaggagaatgtttcattcagtttctgagtgagcccaccatcaccttcggcacggcgatcgctgccttttacatgcctgtcaccatcatgactattttatactggaggatctataaggaaactgagaagcgtaccaaagagctggctggcctacaggcctctgggacagaagcggaggcagaaaactttgtccaccccacaggcagttctcgaagctgtagcagctatgaactgcaacagcaaggcgtgaaacgatcatccaggaggaagtacggtcgctgtcacttctggttcaccaccaagagctggaagcccagtgccgagcagatggaccaagaccacagcagcagcgacagttggaacaacaacgatgctgctgcctccctggaaaactctgcttcctccgatgaagaggacattggctcagagaccagggccatctattccattgtcctcaagcttccaggccatagctccatcctcaactctaccaagctaccgtcctcagataacctgcaggtgtccaacgaggacctggggactgtggatgtggagagaaatgctcacaagcttcaggcccagaagagcatgggtgatggtgacaactgtcagaaggatttcaccaagcttcccatccagttagagtctgccgtggacacaggcaagacctctgacaccaactcctcggcagacaagaccacggctactctacctctgtccttcaaggaggccacgctggctaagaggtttgctctcaagaccagaagtcagatcaccaagcggaagaggatgtcgctcatcaaggagaagaaggccgcccagacgctcagtgccatcttgctagccttcatcatcacgtggaccccctacaacatcatggtcctggtgaacaccttctgtgacagctgcatacccaaaacctattggaatctgggctactggctgtgctatatcaacagcaccgtgaaccctgtgtgctatgccctgtgcaacaaaacattcagaaccaccttcaagacgctcctcttgtgccagtgtgacaaaaggaagaggcgcaaacagcagtaccagcagagacagtcggtcatttttcacaagcgagtgccggagcaggccttgtagaaaaggggtatgttgagagcagtgaccacgcaagcgcgtcagcccacacagcctagcaggagtctggcgcaggtggggggagccatccctgatggtgataaaatgggtttttatcgacctcacgggagagaagctacctgtttactgatccattgaataactgattttggtccaatgccaattcagcaggaaagaaggagaggcataccgctaaacatgaagagatgtgttctgaaacagacttttaagtggattttgtttcctctaagagaaaaagaaattattgtctcagagcaagtatcctcagaaattggtctgcctgggtctcttaattcctatcagctctggaatcactggtgagcctcaaggcactagatgccatgtgctctccctaagggtcccaaagtgtccatccagatcccatgtgaagcacggcaagcttgaaaaaaaaaatctgtggtcctgagttattttgtatattgcaaagctgacaccacttgtccccaatcagcttctgtcctctttcagtgtgttgtcaaactctattcgtggatttgactcttggttcttgcaacgtactgtttcgtgctgttcaagtttcacacaaataaaattgtacaggaacatgcatacctatacatgtgtgagtttccgcacgcacgcacattgtgtatataacgtgatggggaacactgaactgaaaggaagttcctaccatactttggtaactgaaactctctaggatcctcaaatgatatgaaactgaactaagcccagtttgacgttgtgttttggtctgggtttttgacactggagctatttcccacaaaccatcctgaagaataatatccagcacagagaatccagaccttctcagcaaacctgtgctagacagacagtcttgagggtcagtcggcaccgtgtcttgactggactcagtacgcactgtctcctgcactgttagctctctgtcgatggagctaaataaaccagggcccctttgagctcaaaagaacgaacttctgtacatgtttgaatttagtcgtccaaatctgaatgtttcaaaacaaaatttctgggatctgaactgctcgaaactcaatcctagagtcacctttgaatgtcacacacagcaatataatgtacatttacatagaaaaatcaaaggaaacgctgtgctcggagctgacggaggaaagtattgtattccacttcctgctacctggcaccttctgaaaggaaggtgggcttacctcctgtcacttagcaggagtcagaacccttctggtagtcactgtataaccttcacctaggagtggttggtgtctaggaagccatgcatcctctgaagaaagaatggcactagaaaaagtattacttcgaaatcgatttctttccattgtgacaaccgaatttcgcatcatcctttgaattgccccaagtgcaccgtgtttcctctgggggaggggtctgctgctctcattcttctggctgctgtattgttgggtttcttcttttccttctgctgggactgtgtggggagcgggtggggtggggggtgggagggctgtggagaacccttcccttgtgcagggcatccatccgtgttgtgaacccagagctgggggccaaagctgcttttgtattcagtgtgaggtggtgtttacagccgactttgacatcagtgggtgtgttctcagtggtgtgtctgtacctgaactatttaatgttgtgtcatgtttatataaagaatatttatgcatacttt

SEQ ID NO: 3070 - DNA, 1146 bp, Rattus norvegicus
  Genbank Accession No. NM_012529
atgcccttctccaacagccacaacacgcagaagctgcgcttcccggccgaggatgaattccctgatctgagcagccacaacaaccatatggccaaggtgctgacccccgagctgtacgcggagctccgtgccaagtgcacgccgagcggctttacgttggacgacgccatccagactggcgtagacaatccgggccacccgtacatcatgacagtgggtgcagtggcgggcgacgaggagagttacgacgtattcaaggaccttttcgaccccatcatcgaggaccggcacggcggctaccagcccagtgatgagcacaagactgacctcaacccagacaacctgcagggcggcgatgacctggaccccaactacgtgctgagctcgcgggtgcgcacaggccgaagcatccgcggcttctgcctcccccctcactgcagccgtggggagcgccgcgccatcgagaagctggcagtagaagccctgtccagcctagatggcgacctgtctggcaggtactatgcgctcaagagcatgaccgaggcggacgagcagcagctcattgacgaccacttcctcttcgacaagcctgtgtcgcctctgctgctggcctccgcgatggcccgcgactggccggatgctcgcggcatttggcacaatgacaataagacgttcctggtgtggatcaacgaggaggaccacctgcgggttatctccatgcagaaagggggcaacatgaaggaagttttcacgcgattctgcactggcctcactcagattgaaactctcttcaagtctaagaactatgagttcatgtggaaccctcacctgggctacatcctcacgtgcccatccaacctgggcactgggcttcgggcaggcgtgcacatcaagctgccccacctgggaaagcacgagaagttctcggaggtgctcaagcgactgcggcttcagaagcgaggcacaggtggtgtggacaccgctgctgtgggtggagtttttgatgtctccaacgctgaccgcctgggcttctcggaggtggagctggtgcagatggtggtggacggagtgaagctactcattgagatggagcagcggcttgagcagggtcagcccattgacgacctcatgcctgcccagaagtga

SEQ ID NO: 3071 - DNA, 1531 bp, Rattus norvegicus
  Genbank Accession No. NM_012531
atgccgttggctgcagtctcattgggtctcctgttgttggccctcctcctgctcttgcgacacctgggctggggcttggtgactattttctggtttgagtacgtgctgcagccagtccacaacctgatcatgggtgacacaaaggagcagcgcatcctgcgctacgtgcagcagaatgcaaagcctggagaccctcagagcgtcctggaggccatcgacacctactgcacacagaaggaatgggccatgaatgtgggtgacgcgaaaggccaaatcatggatgcagtgattcgggagtacagcccctccctggtgctggaactgggagcttactgtggctactcagcagtgcgaatggctcgcctgctgcagcctggagccaggcttctcaccatggagatgaaccctgactacgctgccatcacccagcaaatgctgaactttgcaggcctacaggacaaagtcaccatcctcaatggggcatcccaggatcttatcccccagctgaagaagaagtacgacgtggacacactagacatggtctttcttgaccactggaaagaccgctaccttccagacacacttctcctggagaaatgtggcctgctgcgcaaggggacagtgctcctagctgacaacgtcatcgtcccgggaacccctgacttcctggcgtatgtgagagggagcagcagcttcgagtgcacacactacagctcatacctggagtacatgaaagttgtagacggcttggagaaggcaatctaccagggtccaagtagccctgacaagtcttgatccctcagcctgcccccctgctccccttccagcttctctctgcgagatgacacacattcaatctgaccctttctatgctcctggggcttgtcctcgggggctgtggttccagactgtcatacactggcacattttaaaggtagtgagcccactatgcaaaatcacttcaataaccctgaaaagcacctatggatgaaaggctgaattgaggccaaaggtacactagatcacagcctgcccagcatgcaaaaggcctcaaggttaatcctctgcacccgagcctcatggtctcgctaactagaagaggagatcttcacggggtttcagtgtgggatcactaggcattgtatcaccagttaggcccagcaggaagtcagcaaactgtaaatgtccagacgccaaataacagcagaggctcagagacagtactgtcacttactgtccccagcagctcacaccacatctcatctgaagaatgagtcacaagctttccaggtatggtggtgcacgcctgtcatccccagtatccaggaggcagaggcatcggagttcagcgccagcctggtctacataagtgagttccaagacagccagggctacgtagaaatacatttttaaaaaagttataaccttggggttggggatttagctcagtggtagagcgattgcctagcaagctctaccactgagctaaatccccagccccaacctcttttatattataaaagaaattaaa

SEQ ID NO: 3072 - DNA, 3700 bp, Rattus norvegicus
  Genbank Accession No. NM_012532
ccaagaggaagaaacatgaagtttttgctgcttagtgcacttttatttttgcatagttccttagcttggacaagagaaaagcattattacatcggaattactgaagcagtttgggactatgcttctggcagtgaagaaaaggaacttatttcagttgacacggaacagtccaatttctatcttcgaaatggtccagatcgtattggaagaaagtataagaaggccctttattctgagtacacagatggcacctttacgaagactatagacaaaccagcctggctagggtttttaggccctgtcatcaaagctgaagttggagacaaagtttctgttcacgtaaagaactttgcctctaggccctacacttttcatgctcatggggtaacttacaccaaggcgaacgagggggccatctaccctgacaacaccactgattttcaaagagccgatgacaaactgtttcctggacagcagtatttgtacgtgctgcgtgccaatgagccaagtcctggcgagggagacagcaattgtgtgaccaggatttaccactctcatgtggatgctccaaaagatattgcatcaggactcataggaccgttgatactctgtaaaaaaggttctctgcataaggaaaaagaggaaaatattgaccaagaattcgtactgatgttctctgtggtggatgaaaatctcagctggtacctagaagataacatcaaaaccttctgctctgaaccagagaaagtcgataaagacaatgaagacttccaggaaagcaacaggatgtactctataaatggatatacatttggaagcctcccagggctctcgatgtgtgcagaagacagagtgaagtggtacctttttgggatggggaatgaagttgacgtgcattcagagctctttcatggtcaagccctgaccagcaagaactatcatactgatataatcaacctgttccctgccactctaattgatgtttctatggtggcccagaatcctggagtctggatgctcagttgccagaacctgaaccatctgaaagctggtttgcaggcctttttccaggttcgtgactgcaacaagccctcaccggacgacgatatccaagacagacatgtgagacattattacatcgctgccgaggagaccatttgggactatgctccgtctgggacagacaccttcactggagagaacttcaccagtctgggaagtgattcaagggtcttttttgagcaaggtgctacaagaattggtggctcttataaaaaattggtttatcgtgagtacacagatgattccttcacaaaccggaaggaaagaggccctgatgaggaacatcttggaatccttggtcctgtcatttgggcagaagtaggagacatcattagagtcacctttcataacaaaggacaatttcctctcagcattcagccaatgggggtaagattcaccaaggaaaatgagggaacatactatggcccagatggccgttcctcaaagcaagcctcccatgtggctcccaaagaaacctttacgtatgaatggactgtccccaaagaaatgggacccacttatgcagatcctgtgtgcctatctaagatgtattattctggagttgacctcaccaaagatatatttactgggcttattgggccaatgaaaatatgcaagaaaggcagcttacttgcagatgggagacagaaagatgtagacaaggagttctacttgtttgcaacagtgtttgatgagaatgagagtttactcttggatgataatatcagaatgttcacaactgcacctgagaatgtggacaaggaagatgaagactttcaggagtccaacaagatgcactccatgaatggattcatgtatggcaatctgcctggcctcaatatgtgcctaggagaatccatcgtgtggtatttgttcagcgctggaaatgaggcagacgtgcatgggatatacttttcaggaaatacctatctgtccaaaggagaaagaagagacactgcaaatctgtttcctcataaaagtctcacccttctcatgacacctgacacagaagggtcttttgatgttgagtgtcttacaacagatcactacaccggcggcatgaagcaaaagtacactgtgaaccagtgcaaggggcagtttgaagatgtcactctctaccagggagaaaggacctactatattgcagcagtggaggtggaatgggattattcaccaagcagggactgggaaatggagctgcaccatttgcaagagcaaaatgtttcaaatgcatttttggataaggaagagtttttcataggctcaaagtacaagaaggttgtgtatcgagagtttactgacagcacattcagagaacaggtgaagagaagagctgaagaggagcacttgggcatgctcggtccactgattcatgcagatgttggagccaaagttaaagttgtctttaaaaatatggcaacaaggccatattcaatacatgcccacggagtgaaaacaaagagttctacagttgctccaacgttgccaggtgaagttcgcacttatatatggcaaattccagaaagatcaggtgctggaacggaggattcaccttgtatcccatgggcttattactcaaccgtggatcgagttaaggatctctacagtgggctaataggcccattgattgtttgtcggaaatcttatgtgaaagtattcaatcctaaaaagaaaatggagttttcccttttgtttctagtttttgatgagaatgaatcttggtacttagatgataacatcaatacataccccgatcaccctgagaaagataacaaagacaacgaggaattcatagaaagcaataaaatgcatgctatcaatgggaaaatgttcggaaacctccaaggtctcacgatgcacgtgggagatgaggtcaactggtatgtgatggctatgggcaatgaaatagacctgcacactgtacacttccacggccacagcttccaatacaagcacaggggaattcatagttctgatgtctttgactttttccctggaacataccaaaccctagaaatgtttccccaaacgcctggaacctggttactccactgccatgtgactgaccatattcatgcggggatggtaactacctacactgttttaccaaatcaagagactaagtctggctgaaagaaataaattggtgataagtggaatacgagcacaatgacgttgttttaaacatttaaaaaaatcaaagccacacaaatgttcatttgtgagggaattggtaatgccgatggacagatgaacagactgtatcatgacatgtatttgtttgctgggtaacagaatcgctttacatagtccacttacacctgcactgaaaggactctgaaaagtggaaaaaaataagcaaaaccgtatgatcagatgctgtccttgactgtcctcacaggatcactataaagtccactaaactgtctccaactcttctcatcaagtcctctaacaaaccatggggtaagagggtatagaaaagaaggaaagatgaagataccaagatgcactttgtaaaaatctgaaaaacagttgaaggatgctctcggaaaatagagaaagtcaggatccaattatgttacattttgaaaaaatgaaatggagataataaagtaataaattttaaaatgccaat

SEQ ID NO: 3073 - DNA, 1575 bp, Rattus norvegicus
  Genbank Accession No. NM_012540
atgccttctgtgtatggattcccagccttcacatcagccacagagctgctcctggccgtcaccacattctgccttggattctgggtggttagagtcacaagaacctgggttcccaaaggtctgaagagtccacccggaccctggggcttgcccttcatagggcacgtgctgaccctggggaagaacccacacctgtcactgacaaagctgagtcagcagtatggggacgtgctgcagatccgtattggctccacacccgtggtggtgctgagcggcctgaacaccatcaagcaggccctggtgaaacagggggatgacttcaaaggccggccagacctctacagcttcacacttatcgctaatggccagagcatgactttcaacccagactctggaccgctgtgggctgcccgccggcgcctggcccagaatgcgctgaagagtttctccatagcctcagacccaacactggcatcctcttgctacttggaagagcacgtgagcaaagaggccgaatacttaatcagcaagttccagaagctgatggcagaggttggccacttcgaccctttcaagtatttggtggtgtcagtggccaatgtcatctgtgccatatgctttggcagacgttatgaccacgatgaccaagagctgctcagcatagtcaatctaagcaatgagtttggggaggttactggttctggatacccagctgacttcattcctatcctccgttacctccctaactcttccctggatgccttcaaggacttgaataagaagttctacagtttcatgaagaagctaatcaaagagcactacaggacatttgagaagggccacatccgggacatcacagacagcctcattgagcattgtcaggacaggaggctggacgagaatgccaatgtccagctctcagatgataaggtcattacgattgtttttgacctctttggagctgggtttgacacaatcacaactgctatctcttggagcctcatgtacctggtaaccaaccctaggatacagagaaagatccaggaggagttagacacagtgattggcagggatcggcagccccggctttctgacagacctcagctgccctatctggaggccttcatcctggagaccttccgacattcatcctttgtcccattcaccatcccccacagcaccataagagatacaagtctgaatggcttctatatccccaagggacactgtgtctttgtgaaccagtggcaggttaaccatgaccaggaactatggggtgatccaaacgagttccggcctgaaaggtttcttacctccagtggcactctggacaaacacctgagtgagaaggtcattctctttggtttgggcaagcgaaagtgcattggggagaccattggccgactggaggtctttctcttcctggccatcttgctgcagcaaatggaatttaatgtgtcaccaggcgagaaggtggatatgactcctgcctatgggctgactttaaaacatgcccgctgtgagcacttccaagtgcagatgcggtcttctggtcctcagcatctccaggcttag

SEQ ID NO: 3074 - DNA, 1542 bp, Rattus norvegicus
  Genbank Accession No. NM_012541
atggcgttctcccagtatatctccttagccccagagctgctactggccactgccatcttctgtttagtgttctgggtgttgagaggcacaaggacccaggttcccaaaggtctgaagagtcctcccggaccctggggcttgcccttcattgggcacatgctgaccctggggaagaacccacacctatctctgacaaagctgagtcagcagtatggggacgtgctgcagatccgcattggctccacacccgtggtggtgctgagcggcctgaacaccatcaagcaggccctagtgaagcagggggatgacttcaaaggccggccagacctctacagcttcacacttatcactaatggcaagagcatgactttcaacccagactctggaccggtctgggctgcccgccggcacctggcccaggatgccctgaagagtttctccatagcctcagaccccacatcagtatcctcttgctacttggaggagcacgtgagcaaagaggctaaccatctaatcagcaagttccagaagctgatggcagaggttggccacttcgaaccagtcaaccaggtggtggaatcggtggctaacgtcatcggagccatgtgctttgggaagaacttccccaggaagagcgaggagatgctcaacctcgtgaagagcagcaaggactttgtggagaatgtcacctcagggaatgctgtggacttctttccggtcctgcgctacctgcccaacccagccctcaagaggtttaagaacttcaatgataactttgtgctgtttctgcagaaaacagtccaggaacactatcaagacttcaacaagaacagtatccaggacatcacaggcgccctgttcaagcacagtgagaactacaaagacaacggtggtctcatccctcaggagaagattgtcaacattgtcaatgacatctttggagctggatttgaaacagtcacaacagccatcttctggagcattttgctacttgtgacagagcccaaggtgcagaggaagattcatgaggagctggacacggtgattggcagagatcggcagccacggctttctgacagaccccagctgccatatctggaggccttcatcctggagatctaccgatacacatcctttgtccccttcaccatcccccacagtacaacgagggacacctcactgaatggcttccacattcccaaggagcgctgcatcttcataaaccagtggcaggtcaaccatgatgagaagcagtggaaagacccctttgtgttccgcccagagcggtttcttaccaatgacaacacggccatcgacaagaccctgagtgagaaggtgatgctcttcggcttgggaaagcgccggtgcattggggagatcccggccaagtgggaagtcttcctcttcttagccatcctcctgcatcagctggagttcactgtgccaccgggcgtgaaggtggacctgacacccagctatgggctgaccatgaagcccagaacctgtgaacacgtccaggcctggccacgcttctccaagtga

SEQ ID NO: 3075 - DNA, 3112 bp, Rattus norvegicus
  Genbank Accession No. NM_012551
cgcagaacttggggagccgccgccgcgattcgccgccgccgccagcttccgccgccgcaagatcggcccctgccccagcctccgcggcagccctgcgtccaccacgggccgcggccaccgccagcctgggggcccacctacactccccgcagtgtgcccctgcaccccgcatgtaacccggccaacatccggcgagtgtgccctcagtagcttcggccccgggctgcgcccaccacccaacatcagctctccagctcgcacgtccgggatggcagcggccaaggccgagatgcaattgatgtctccgctgcagatctctgacccgttcggctcctttcctcactcacccaccatggacaactaccccaaactggaggagatgatgctgctgagcaacggggctccccagttcctcggtgctgccggaaccccagagggcagcggcggcaataacagcagcagcagcagcagcagcagcagcgggggcggtggtgggggcggcagcaacagcggcagcagcgctttcaatcctcaaggggagccgagcgaacaaccctacgagcacctgaccacagagtccttttctgacatcgctctgaataacgagaaggcgctggtggagacaagttatcccagccaaactacccggttgcctcccatcacctatactggccgcttctccctggagcctgcacccaacagtggcaacactttgtggcctgaaccccttttcagcctagtcagtggccttgtgagcatgaccaaccctccaacctcttcatcctcagcgccttctccagctgcttcatcgtcttcctctgcctcccagagcccacccctgagctgtgccgtgccgtccaacgacagcagtcccatttactcagctgcacccacctttcctactcccaacactgacatttttcctgagccccaaagccaggcctttcctggctctgcaggcacagccttgcagtacccgcctcctgcctaccctgccaccaagggtggtttccaggttcccatgatccctgactatctgtttccacaacaacagggagacctgagcctgggcaccccagaccagaagcccttccagggtctggagaaccgtacccagcagccttcgctcactccactatccactatcaaagccttcgccactcagtcgggctcccaggacttaaaggctcttaataacacctaccagtcccaactcatcaaacccagccgcatgcgcaagtaccccaaccggcccagcaagacacccccccatgaacgcccgtatgcttgccctgttgagtcctgcgatcgccgcttttctcgctcggatgagcttacacgccacatccgcatccatacaggccagaagcccttccagtgtcgaatctgcatgcgtaatttcagtcgtagtgaccaccttaccacccacatccgcacccacacaggcgagaagccttttgcctgtgacatttgtgggagaaagtttgccaggagtgatgaacgcaagaggcataccaaaatccacttaagacagaaggacaagaaagcagacaaaagtgtcgtggcctcctcagctgcctcttccctctcttcctacccatccccagtggctacctcctacccatcccccgccaccacctcatttccatccccagtgcccacctcttactcctctccgggctcctctacctacccgtctcctgcacacagtggcttcccatcgccctcggtggccaccacctatgcctccgtcccacctgctttccctgcccaggtcagcaccttccagtctgcaggggtcagcaactccttcagcacctcaacgggtctttcagacatgacagcaaccttttctcctaggacaattgaaatttgctaaagggaatgaaagagagcaaagggaggggagcgcgagagacaataaaggacaggagggaagaaatggcccgcaagaggggctgcctcttaggtcagatggaagatctcagagccaagtccttctagtcagtagaaggcccgttggccaccagccctttcacttagcgtccctgccctccccagtcccggtccttttgacttcagctgcctgaaacagccacgtccaagttcttcacctctatccaaaggacttgatttgcatggtattggataaaccatttcagcatcatctccaccacatgcctggcccttgctcccttcagcactagaacatcaagttggctgaaaaaaaaaatgggtctgggccctcagaaccctgccctgtatctttgtacagcatctgtgccatggattttgttttccttggggtattcttgatgtgaagataatttgcatactctattgtactatttggagttaaattctcactttgggggagggggagcaaagccaagcaaaccaatggtgatcctctattttgtgatgatcctgctgtgacattaggtttgaaacttttttttttttttgaagcagcagtcctaggtattaactggagcatgtgtcagagtgttgttccgttaattttgtaaatactgctcgactgtaactctcacatgtgacaaaatacggtttgtttggttgggttttttgttgtttttgaaaaaaaaattttttttttgcccgtccctttggtttcaaaagtttcacgtcttggtgcctttgtgtgacacaccttgccgatggctggacatgtgcaatcgtgaggggacacgctcacctctagccttaagggggtaggagtgatgtttcaggggaggctttagagcacgatgaggaagagggctgagctgagctttggttctccagaatgtaagaagaaaaatttaaaacaaaaatctgaactctcaaaagtctatttttttaactgaaaatgtagatttatccatgttcgggagttggaatgctgcggttacctactgagtaggcggtgacttttgtatgctatgaacatgaagttcattattttgtggttttattttacttcgtacttgtgtttgcttaaacaaagtgacttgtttggcttataaacacattgaatgcgctttactgcccatgggatatgtggtgtgtatccttcagaaaaattaaaaggaaaataaagaaactaactggt

SEQ ID NO: 3076 - DNA, 1725 bp, Rattus norvegicus
  Genbank Accession No. NM_012554
agtgctgctccggtaccgagtcgcgctcacgtttgtccttaagactcccttcggtgtctccaggaccctctttccttcctccgcagcgatcctactgccagaacttcaccatgtccattctcaagatccatgccagagagatctttgactcccgcgggaatcccaccgttgaggtggatctctacaccgcaaaaggtctcttccgtgctgcggtgcccagcggtgcgtccactggcatctacgaggccctagaactccgagacaatgataagacccgcttcatggggaagggtgtctcaaaggctgttgagcacatcaataaaactattgcacctgctctggttagcaagaaactgaatgttgtggagcaggagaagattgaccagctgatgatcgagatggacggcacagagaataaatctaagtttggtgcaaatgccatcctgggagtgtccctggctgtctgcaaggctggtgccgtggggaagggggtgcccctttaccgtcacattgccgacttggccggcaaccctgaagtcactctgccggtcccagctttcaatgtgatcaacggcggttctcatgctggcaacaagttggccatgcaagagttcatgatcctgcctgtgggggcatcctctttccgggaagccatgcgcattggagcagaggtttaccacaacctgaagaacgtcatcaaagagaagtacgggaaagacgccaccaatgtgggtgatgagggtggattcgcacctaacatcctggagaacaaagaagcactggagctgctcaagtctgccattgcaaaggccggctacactgaccaggttgtcatcggcatggatgtggctgcctccgagttctacagggctggcaagtatgacctggacttcaagtctccagatgatgccagccggtacatcacacccgaccagctggccgacctgtacaagtccttcatcaaggactacccagtggtgtccattgaagatccctttgaccaggacgactgggatgcttggcagaagttcacagctactgcaggcatccaggtggtgggggatgacctcacagtgaccaaccctaagcggatcgccaaggctgcaggcgaaaagtcctgcaactgcctcctgctcaaagtgaaccagattggctctgtgaccgagtctctgcaggcgtgtaagctggcccagtccaatggctggggtgtcatggtgtcccatcgatctgaggagactgaggacactttcattgccgacctggtggtggggctctgcactgggcagatcaagactggtgccccctgccgatctgagcgcctggccaagtacaatcagatccttagaatcgaggaggaactgggcagcaaagccaagtttgccggcaggtccttcaggaaccccctggccaagtaaggcatggaccggagatccctggagctaccagatcctctgtctccgtcatccaggcggctcaaggctggcccagtgcttgcccctcccatgtcactgcttccttagatgtccaccccgaccacctggagccctgctggagcccccagctttgtaatcatgtgatcagtctgaatcattgtttctgtcacctgactttccagctagtgtctggagccctctgaactccagcgtaatctctagagtgcccacaccatcaagactccccccagtggtttacttgcaaaaataaaagctgcagaagctcaaaaaa

SEQ ID NO: 3077 - DNA, 4991 bp, Rattus norvegicus
  Genbank Accession No. NM_012555
gaattcggcacgaggcgccggccagccgagagagtgagcgagcgcccgggacagaggagcgagcgggcgaggcgcgggcgaggctgggacccaagctcgctctctgctccgccaagtgccaacttcgcgccgactggctgggcgcgcacctttctgccgggcgatcagcgggaatttgagattttagggctgcgctctgtccccttcccctgagttcaaaatccctattaaaaagcaaaacaacagttacagcaaacttgctctcatcccgccggccccctcaactccggcaccatgaaggcggccgtcgatctcaagccgactctcaccatcatcaagacagaaaaagtggatttggagcttttcccatccccggatatggaatgcgcagatgtcccactgttaactccgagcagcaaagaaatgatgtcccaggcactgaaagctaccttcagtggtttcacaaaagagcagcagcgactgggaatccccaaagacccccggcagtggacagaaacccatgtccgggattgggtgatgtgggctgtgaatgagttcagcctgaagggtgtggacttccagaagttctgtatgaatggagcagcactgtgcgccctgggtaaagaatgcttcctcgagctggctccagactttgtgggggatatcctgtgggagcatctagagatcctgcagaaagaggatgtgaaaccgtatcaggttaatggagtcaaccctacctacccagaatcccgttacacctcggattacttcattagctatggtatcgagcatgctcagtgtgtccctccctcagagttctcagagcccagcttcatcacagagtcctatcagacgctgcatcccatcagctcggaagaactcctgtccctcaagtatgagaacgactacccttccgtcattctccgggaccctctccagacagacaccttgcagacagactactttgccatcaagcaagaagtgttaactccagacaacatgtgcatggggagagccagtcgtggtaaactcgggggccaggactcttttgagagcatagagagctacgatagttgtgaccgtctcacccagtcctggagcagccagtcatctttcaacagcctgcagcgtgtcccctcctatgacagcttcgactccgaggactatcccgctgccctgcccaaccacaagcccaagggcaccttcaaggactatgtgcgtgaccgtgctgacctcaacaaggacaagcctgtcattcctgctgctgccctggctggctacacaggaagtgggccgatccagctgtggcagtttcttctggaattactcactgataagtcttgtcagtcttttatcagctggacaggagacggctgggaattcaagctttccgacccagatgaggtggccaggagatggggaaagaggaaaaacaagcctaagatgaattatgagaaactgagccgcggccttcgctactattacgacaaaaatatcatccacaagacggcgggcaagcgctacgtgtaccgctttgtctgcgacctacagagcctgctgggatacaccccagaggagctgcatgccatgctggatgtgaagccggatgctgatgagtaacggacacggaaggggctgggggggaccgctgagacctttcaaagaacaacccgtgttggttggactcttaatttttaattgttattctatgttttattttccagaactcatttttcacattcaggggtgggagctaagggagttgcagccacattccattggccattggcaaggccggaaagggaaagtcaggacctgtggggtgggtggggcaagaagttcctgaggagatttttcaggagcgagagggtcttctcagaagccgagcgacttgacttacagaggaaaaggtttatgtgtccagtattctgtttgcaatcaaaggaaagagttcatcttgagttgtggatcgactagcaggaggaattgtcacgttaagatgaaagtcagtcagcgttggtgggtgggaggaaaacagtttcttcaggggatgactaaacgcaagaatttattaacctttctactttttttgaaacaaagatggactttaatggaagggatccaaaactgtttttattgttgaagtttattttattaaattctgtgccagtattttttttcttaaaaaaaatcgtcttaagctctaaggtggtctcagtattgcagtattgtgagttcgttgtaatttgctggctgaggagtctcccacaatgaaaggcagctgtttatatagaccccatggaaaaatccaagtctgtactgagaacagagacccccgaactcttacagctaaaggacgtgaatgctgatttggggaccagggaactgtgtgaattccacctgcggtttgtaaaacaacatttccagtccttttacttactgtcaggctgcgggcttagtgttagttaaggggcattaagtctttgcactgaatgtatttttgcagctctgctttggaactgttgtcagcataggtgcactgtttaagtcttggaaaagaaatcgaaggaggaagttgaacctggtttttggttaaatcgctacccgaaacatagaagactcaaactaaatgctgtttgcatgggcattacccctcggatcttaaggcctaaatgcatgccgttccaaactaacattgtacaatttctcctttatggcttatttccccagttcaccacattgctgcccctccccaccttactaatcagtagagtggaatgtaatgtttcctgataggtgaatgaaagtgtaatttcagacatcacagcacaaatcaaagagtacagactttctagggttcagagagcatggaaacgaggaggctatttcaggagcatgggacatggcctcctttgggaagaggctttcctttgaagaattggagcttgtcaggtaggatttcaggtgaggctgtttgcagatgaagtggtagagagcactgggacttcgagcttgacctgttgctacctcggcagagttaagcgaaagtcagctgcggatgagaggaaaacttgatggagggaatacaacggcaggagctaagaacggagaataaggtggcccgtgacagtgaggtatagttttactttcctcaaagtttaaattcaaagacttaatcgaggcagccatcttcctgccagttgagagaggagactggaaagtaaggcattgtgggtaaaaacaaagtaaggaaacatgcctggtatcattagaatccctcccactgtttaccacgcctagttgagacagcgactgtggacttccatgagagaaaagaggcagttggttgaggtggacctctccaggctcacccttcggggattgtaactacctggtatcatcttcatgagagttgatggctgactcccagattcccttgaagactctgaattcctgcgaacataacttgtccatgggtgttctgtactgaccgattggagcatccccaccggaagcaaaggcaaaacatcccagctctatgttttgatcttaacaaatgcaggtgccttaatgaagctctcaaagtatttaggagctgctcagggagtgttaggtgggatcatttggattatgttgtttttctcttatattatgtgatctttgttgggcactggcagtgtgtgtgtgtgtgtgtgggtgtgtgtgtgtacatttgtataagcctgcagctgaaatagtactgacttttctacttaagtctgtccacatttccataacggcgaaagagtacatacagccagggctgatttcatttctcgctctttgcaacagggcttaaataaaaaaaaaatcacttccccaagtcgtcgtccttgcccctattcagttcatgctgaaaacgcccctctcgagagcctaccgcctgcagccagtagcagataagacgtaagaaagtgcctcccacacggctcagcttgctgacttgcttctccccaggtccaccactttcaggatttgtagataggatattagtcagcttggtggtccatctggccagacgctctttcccatgctgtccaaaggccagagaccatcccaggaagagtggcgggtggtttatacactggaaatgtagcggcattgctgcattgatgctctacaaaaacacgttcacttcagaggaaggatgagcacatctgatccagctgggtggctccattgttttcccagagagatgctttaacctgtgcggttggcttttggctcagagctcaggggaataaggatgctccctgcatagagctctgaccgttgcgccatggaaaccagtggaagcactctagatcagagacactcttcctcactttggagatcaacactctgggttttaaagcattaaccttcatggtgaaatcacaccttctctcttctagccatgctgtgcatgccgctttctctgtcggggggtctctataaatttgttgaactcttacgtacattccaaagaagtttcaaggaaccacaagtatatgtatacaaatacatatatgaagtatatatgttaaaatgaaattatctctatcaggaatactgcctcagttaattgaattttttttaaggatacttttttttaagcggagaattattggggtgtaaaagatgttatattgtgtttgactattttccagcttgtattttcacataatttatattttttaaatgctgaaaatttaaaagcgagatttaaaaaggaaaagcaggtgctttttttttaaaaaaaagaatcagaactgaggtagcttagagatgtagccatgtaagtgtcttaaatgttttgtttttaaaaaaaaaacaaatgcaaaaaaattcttatgggggagttttttgtttgtttcttttagtagctgatgctggcacattttgctggaaagttttttatatactgtagcctgatttcatattgtattttaaactgtgctcgtgccgaattc

SEQ ID NO: 3078 - DNA, 493 bp, Rattus norvegicus
  Genbank Accession No. NM_012556
ctgttggtggcagctgggaaaggaaacctcattgccaccatgaacttctccggcaagtaccaagtgcagagccaagagaactttgagcccttcatgaaggcgatgggtctgcctgaggacctcatccagaaagggaaggacatcaagggggtgtcagaaatcgtgcatgaagggaagaaagtcaaactcaccatcacctatgggtccaaggtgatccacaatgagttcaccttgggggaggagtgcgaactggagaccatgactggggaaaaggtcaaggcagtggttaagatggagggtgacaataaaatggtgacaactttcaaaggcataaagtccgtgactgaattcaatggagacacaatcaccaataccatgacactgggtgacatcgtctacaagagagtcagcaagagaatttagacaaggctgtatttcatattcttttacagtataaaattaatacaataaagttacctctgttttgaaataa

SEQ ID NO: 3079 - DNA, 1357 bp, Rattus norvegicus
  Genbank Accession No. NM_012558
gagcttctgcagacactgtatagcgttcagtcctcctgctgtgactatcacctgggggactcacctgcctgcacctttagccagcacctacagacagtacctgtgccagaccccagcaatggtggaccatgcgcccttcgaaacggatatcagcaccctgacccgcttcgtcctggaggagggcaggaaggctgggggcacgggcgagatgacccagctgctgaattcgctctgcaccgcgatcaaagccatctcgtcagcggtgcgccaggccggcatcgctcagctctatggcatcgctggctcaaccaatgtgactggggatcaagtgaagaagctggacatactttccaatgacctggtgatcaatatgctgaagtcgtcctatgctacctgtgtccttgtgtcggaagaagatacacacgccatcataatagagcccgagaagaggggcaaatatgttgtctgttttgatcccctcgatggctcatccaacatcgactgcctcgcgtccatcggaaccatctttggcatttacagaaagacatctgctaatgaggcttcggagaaagatgctctgcagccaggcaggaacctggtggcagcaggctatgcactctatggcagcgccaccatgttggtcctggccatgaattgtggcgtcaactgcttcatgctggacccgtccattggagaattcattttggtggacagggatgtgaagatcaagaagaaaggtaacatctacagcattaatgagggctatgctaaggactttgaccctgccatcaatgagtatatccagaggaaaaagttccctccggataattcagctccctatggtgcccggtatgtggggtccatggtggctgatgttcaccgcactctggtgtatggagggatcttcttataccctgccaacaagaaaaatccatctggaaagctgcggctgctgtacgagtgcaatcccatcgcttacgtcatggagaaggccggtggacttgccacgacggggaatgaagacatattagacatcgtccccactgagatccaccagaaggcaccagttatcatggggtccaccgaagacgtgcaggagttcctggagatctacaataaggacaaagccaaatcaaggccgtccctgcccctgccccagagcagagctcgtgagtcaccggtccattctatctgtgacgaacttttctagaaacaaacccaacagcgcggatagtttcagggccgaatgccttgcaatgcccaaggttgcctcgcctagatgctataatgccactgtatcaggtactatatatttcgaataggtgaaggagaaataaacatattcttccttcataaa

SEQ ID NO: 3080 - DNA, 1358 bp, Rattus norvegicus
  Genbank Accession No. NM_012559
agtgctggctgtaaggggctgggagcaccggtcacccagacactatgaattggtccttgcaactccggagtttcattctatgctgggcgcttttactactttctccaacgggcctggcacagtacactgctactagagataactgttgcatcctagatgagagattcggtagttactgcccaaccacttgtggcatctcagacttcctgaattcttaccaaaccgacgtggacactgacctccagactctggaaaacatcttacaacgagctgaaaacagaaccacagaagccaaggaactgattaaagccatccaggtttactacaacccggaccaacccccaaagccgggtatgatagagggtgccactcagaagtctaagaagatggtagaagaaatcttgaagtacgaagcactgttactaacccatgagtcgagtatccggtatttacaggacatctatacttcaaataagcagaagatcacgaacctgaaacagaaggtggcccagcttgaagctctgtgccaggagccttgcaaggactctgtgcgaatctatgacataaccggaaaagattgtcaggataccgccaacaagggtgccaaagaaagtggactttactccattcggcctttgaaagccacggagcagttcttagtgtactgtgaaaccgacggacctggaaatggctggaccgaattcaagaagaggcttgatggcagtgtggatttcttgaagaactggattcagtataaagaaggatttggacacctgtcacctactggcaccacagagttttggctgggcaatgagaagaatcatctgataagcatgcagtccaccatcccatacgcactgagaatacagctcaaagactggagtggcaggaccagcaccgcggactatgccatgttcagggtgggtcctgaatccgacaaataccgcctgacctatgcctacttcattggtggagatgccggggatgccttcgacggctacgattttggtgatgatcccagtgacaagtttttcacatcccacaacggcatgcacttcagtacctgggacaatgacaacgacaagttcgaaggcaactgtgctgagcaggatggatctggctggtggatgaacaagtgtcacgctggccacctcaatggagtttattaccaaggtggcacttactccaagtcatctactcctaacggttatgacaatggcattatttgggccacgtggaaaacccgctggtattccatgaaggaaaccaccatgaagataattcccttcaacagactctccattggagatgggcagcaacatcacatgggaggatccaaacaggttggagacatgtaa

SEQ ID NO: 3081 - DNA, 1478 bp, Rattus norvegicus
  Genbank Accession No. NM_012562
cggaagcagggatgtgggacctgaaaagtgagtggtgggcggtgggcttcgggcttctgctgctactggcagcttcggcccaggcagggggcttggctccgcaccactacactccggactggccgagcttggactcgcgaccactgccgagatggttcgacgaggccaagttcgggttgttcgtgcattggggggtgtactcggtgcccgcctggggcagcgagtggttctggtggcactggcagggcgagcagtcgtcggcgtacgtgcgcttcatgaaagaaaactacccgcccggcttcagctacgccgactttgcaccgcagtttacagcgcgcttcttccatccggaggagtgggcagacctcttccaggctgccggggccaagtatgtcgtcctgaccgcaaagcatcacgaaggcttcacaaactggccaagcgccgtgtcttggaactggaactcgaaggacgtggggccccaccgtgatttggtcggtgagttgggagcagctgtgcggaagaggaacatacgatacggcctctaccactcgctctttgagtggttccatccactctacctactagataagaaaaatggcctcaagactcagcatttcgtcagtacaaaaacaatgccagagctgtacgacctcgtgaataggtacaagcctgacctaatctggtctgatggggagtgggagtgtcccgattcgtactggaactccacggagttccttgcttggctctacaatgaaagcccggtcaaggatcaggtggtagtgaatgaccggtggggtcagaactgctcctgtcgtcacggagggtactacaactgtgaagacaaatacagaccacacagcctgccagaccacaagtgggagatgtgcaccagcgttgacaaggcgtcctggggctatcggagagacatgagcatgtctaccatcgtcgacgaaaatgaaatcattgaggaattggttcagacaataagtctgggaggcaactatcttctcaacatcggaccgaataaagacggcgtgatcgtccccatcttccaggaaaggctccttgctgttggcaagtggctgcagatcaacggggaggccatctatgcctccaaaccatggagggtgcagtctgaaaggaacaagacagttgtgtggtacaccactaaagactcggctgtttatgccacttttctgcactggccagaagatggagtggtaaacctccaatctcccaaaatgacatcggccacaaagataacgatgctaggaatggaaggagaactgcactggacccaggacccactggaaggcgtcctcatcactctgccccagttgccaccaggcactttcccagtggagtctgcctggactctaaagctgacaaaagtgaactgatcgcaggagctcaaggatagagggcccagtgtgctgctgtctcttaaggattatcgtgaataaagtagcttcctttcc

SEQ ID NO: 3082 - DNA, 2874 bp, Rattus norvegicus
  Genbank Accession No. NM_012570
gtccaggcctgcaagctctgatcttctgtgctcccgccgctctcgcctcagcccgccgccatgtaccgccgtctgggcgaagtgctgctactgtcccgcgccgggcccgctgccctgggctctgcggctgcagactcagccgcactgctgggctgggctcgcggacaaccctctgctgtcccgcaacccgggctcacgccggtcgccaggcgccactacagcgaagcggccaccgaccgcgaagacgaccccaacttcttcaagatggtggagggcttcttcgaccgcggcgccagcatcgtggaggacaagctggtggaagacctgaagacccgggagaacgaggagcagaagcggaaccgagtgcgcggcatcctgcggatcatcaagccttgcaaccatgtgttgagcctctccttccccatccggcgcgacgacggctcctgggaggtcatcgaaggctaccgggcccagcacagccagcaccgcacgccctgcaagggaggtatccggtacagcactgacgtgagtgtggatgaggtgaaggcgctggcgtccctaatgacctacaagtgtgcagtggttgatgtgccatttggaggtgctaaagcaggcgttaagatcaatcccaagaactatacagataatgaattagaaaagattacacgaagattcaccatggagctggcaaagaagggttttattggtcctggcattgatgtgcctgccccagacatgagcacgggcgagcgggagatgtcctggatcgctgacacctatgccagcaccatagggcactatgatatcaatgcacacgcctgtgtcactggtaaacccatcagccaaggaggcatccacggacgcatctccgctactggccggggtgtttttcatgggattgagaacttcatcaatgaagcttcctacatgagcatcttagggatgaccccggggcttggcgataagacgtttgttgttcagggatttggtaatgtgggcctgcactctatgagatatttacatcgttttggtgctaagtgtgttggtgttggagaatctgatgggagtatatggaatccagatggtattgacccaaaagaactggaagatttcaagttgcaacatggatcaattctgggcttccccaaagccaaggtctatgaaggaagcatcttggaggctgactgcgacattttaattcctgcagccagcgagaagcagttgaccaaatccaatgcacccagagtcaaagccaagatcattgctgaaggagccaatggcccaaccactccagaggccgataagattttcctagaaagaaacatcatggttattccagatctctacctgaatgctggaggagtgacagtatcttactttgagtggctaaagaatctaaatcacgtcagctatggccgattgaccttcaaatatgaaagggactcgaactaccacttgctcatgtccgttcaagagagtttagagagaaagtttggaaagcacggcgggactatccctgtggtccccacagcagagttccaggacagaatatcgggtgcatctgagaaagacatcgtgcactctggcttggcctacacaatggagcgatctgccaggcaaattatgcgcacagccatgaagtataacctgggattggacctgagaacagctgcctacgtcaatgccattgagaaagtcttcaaggtgtacaatgaggctggcgtgaccttcacatagacaggtcacagctgacttctttaccaccctcttcacctataatttctgcagacctgtcacaagtttacatgtaaccacagaaatctgttcttgtgactcattagttaatggacactgttctcaacaagtcagttggaatcagccccttaagagaaagattaagttagcggatcatgtaccagctgatggtgtaaaggtaggaatcacgtgtatcctgccagttaggtgtttcgcttttaagtaaagtttctgctcctggccatgctgccttgctctggactcttcccaacagggttagtgctgttgccagggaaggcagtcaagagtcagtcacttcctgacaagtctgggtacttgagcacataagaagtaggcgtgtggcatttgcaaaggtggcatggtcttcgagtgagttattgctgctttacatcagcaaaataactcagtctctaagtcgcaaacaaataaaagctatttctcatgtattttattctttcagaataaaccagttcatgctgctgtaataaaattgccttcaaccacttaagcctaacctttactcaagcagtgaacgcctaaaatataggaaatggaagaagctagtttttataacataaaacagtataatttagcttatcggccctgcagcatagtccagcagaaataaagtagcacctgggggcaggcgtacctgcaagtgacacgggagggacacttgggaacttgttatgcagtccagagagtgaagtaaccactttaccaatttggagatctattatgttgagtaattgaaccatacttcaaatagagtgtcccagaagaaaagactggctccctgtttggaggctggcagacttcagactcagcctgtgtgtcccttctccaaggctttgccgtctacacagcacctcgctatccacaggctggagactgcctggggttgacttctgtttggggagttactggccagggcttttgaacaggagtgttccacagaagtaccagacattatttatataagaatgagcgcttctttttaacagtaccctttcagaaatttctaactactttgtaactgcatgattaacttggtgataaaagcagttattaaaagtctaccttttccaaaaaaaaaaa

SEQ ID NO: 3083 - DNA, 1937 bp, Rattus norvegicus
  Genbank Accession No. NM_012571
ccgacgtcccctcagattccatcgcgatggcccctccatcattctttgcccaggttccacaggccccgccggttctggtctttaagctcattgcggacttccgggatgatcccgatccccgcaaggttaacctcggcgtgggagcgtaccgcacagatgactctcagccctgggttttgccagtagtgacgaaggtcgaacagaagattgctaacgaccacagtctcaaccacgagtacttgcccatcctgggcctggcggagttccggagctgtgcttctcagctagtacttggggacaacagcccagctctcagggagaatggggttgggggtgtgcagtctttgggagcgaccggtgcacttcgaattggagctgacttcttagcgcgatggtacaatggcacagacaacaagaacacgcccgtctacgtatcatcgccgacctgggagaaccataatggcgtgttttctgccgctggttttaaagacattcggtcctatcgctactgggatgcagagaagagaggacttgatctccagggtttcctgaatgatctggagaatgctcctgagttctccatctttgtcctccacgcctgtgcacacaacccaacggggaccgacccaactgaagaggagtggaagcagatcgccgccgtcatgaagcgccgttttctgttccccttctttgactcagcctatcagggctttgcatctggagacctagagaaagatgcctgggctattcgctattttgtgtctgaaggcttcgagctcttctgtccccagtccttctccaagaacttcgggctctacaatgagagagtggggaatctgaccgtggtcggaaaagagcatgacagcgtcctgcgggtcctttcccagatggagaagattgtacgaatcacctggtccaatccccctgcccagggagctcggatcgtggccaccaccctctccaaccctgagctctttaaggagtggaaaggaaacgtgaagacaatggctgaccggattctgaccatgagatccgaactcagggcgcgactagaagctctcaagactcccgggacttggtctcacatcactgagcagattggaatgttcagctttactgggttgaaccccaagcaggtcgagtatttggtcaacgagaagcacatctatctgatgccgagcggtcggatcaacatgtgcggcttgaccaccaagaacctagattatgtggctacctccatcaatgaagctgtcaccaaattccagtgaagaaacaccgagtagttcataccccaaagcagttcctgtcacagctttcctgcctgcgcaaacctagccgtacatgttgtttattagagatgaccaccatggggaggcagccgctgtttagctggccccacaagagaagacatttcttgaaatgaacctgggtcgggtggggggatgactggggttagggccttttggaaaccagagcagattaaagttatttaagaataaaaaaaccctttgatatgagatgtaatcatcttgccttcctctgtagtattctgcaggagtgttgcccacgaagccgtgggcttctgcacgttgcttgagtctgtacagagtcctgtccccaaaatcaagttgtctgaggagccggctgtgactgtggatgttggcattaaaactcaccatttccatcgtctctgtctctcggccccctgatctttccgcatggttgtgaccctggtcttggaacattagttttttaaggccactgtggccagtatttatatcatgacacacaagtggatttacatatttaactgagatgaaagttccgctaaacggtatttgctcttgtgatacgtggcacattgtgacattttcttagtctcttctgtcgtgttctgtttcatttaaaaaaataaaaatgctgatcaagacaaacgg

SEQ ID NO: 3084 - DNA, 1779 bp, Rattus norvegicus
  Genbank Accession No. NM_012578
ccggagcaggccggccaccatgaccgagaactccacctccaccccggcggcgaagcccaagcgggccaaggccgccaagaagtccacggaccaccccaagtattcagacatgatcgtggctgccatccaggcagagaagaaccgcgccggctcctcgcgccagtccatccaaaagtatatcaagagccactacaaggtgggtgagaacgccgactcccagatcaagttgtccatcaagcgcctagtgaccaccggtgttctcaagcaaaccaaaggggtgggcgcctcggggtccttcaggctggccaagggcgatgagcccaagaggtcggtggctttcaagaagaccaagaaggaagtcaagaaagtggccactccaaagaaggcagccaagcccaagaaggctgcttccaaagccccaagcaagaaacccaaagccaccccggtcaagaaggccaagaagaagccggctgccacgcccaagaaagccaaaaagcccaagattgtcaaagtcaagccagtcaaggcatccaaacccaagaaggccaaacccgtgaagcccaaagccaagtcgagtgccaagagagccagcaagaagaaatgacaatgaaggctttgcttggggacactccttcctccctcctgttttctgtaaatacatttctctcttgatcccatctgcaaccctttgcccattctatttggactctatatagaggacagagtttggcttcctcagacagactttgtggaatattttccttaacccattgttcaaggacagcaaacagacctcatctttataatgatggagatgtacttttttcttgatttgatattaaccttatggggttgtgggggggggcgttgtgtgtttccttcggtggtttgtttactatgaaggtaaatggaactggcaaagttctgggtaggtgaggacccaggaactaggttgcttgtccctagtgagcgtttcagaacctttgatgagcaggtgatacccatctacctggccaaggggggttgttggggagaagagaataaactccctgggctgccctaccaatggtggtaagttgggggacctgatttctttttctcttctgccctagtgcctctccaagtgacagctggttagagaagccatagcttctcacaaccgggatttagccattgggaaggaagggtcttctcagcagtctccggttaaatgggagtggacttaggggaggggtgcagagtcagccaagtgcctcagtgtgtctatggaaacttgggtctttccacacggttgatggattgtgtcctaggaggacgttgttcgtttcctttcccctcttcctgtgtaagatgtggcattgcttggtgccacttcagttctaccagcggccacttaaaacccctccaagcttttgagtcttttctaagtagccgaggagggggagaggcagggagtggactgtgggatatactcccgtggattcgaatttgcctaggtagctttagagaagcggattgtgtgcatgtgtgtatatgtatatatccatatctaagactagtacttagtctcacctcgggagctgggagaaaaactctgtacagttgtcctcttattttaataaagtaggaaactcgggtaccctaccccactttttaaacaagtgtaactagtgccgggaaaaaattactgtggttgtaattttaaaactttaaaataaaactggaaaggaaaaaaaaaaaaaaaaaaaaaaaaaaaaaaaaaaaaaaaaaaaaaaaaaa

SEQ ID NO: 3085 - DNA, 870 bp, Rattus norvegicus
  Genbank Accession No. NM_012580
atggagcgcccacagctcgacagcatgtcccaggatttgtccgaggccttgaaggaggccaccaaggaggtgcacatccgtgcagagaattctgagttcatgaggaactttcagaagggtcaggtgtccagggaaggctttaagctggtgatggcctccttgtaccatatctatacggccctggaagaggagatagagcgaaacaagcagaacccagtctatgccccgctctacttccctgaggagctgcaccgaagggctgccctagagcaggacatggccttctggtatgggccccactggcaggaggccatcccttacacaccagccacacagcactacgtaaagcgtctccacgaggtgggaggtactcatcctgagctgctggtggcccacgcatatacccgctacctgggtgacctctcagggggtcaggtcctgaagaagattgcgcagaaggccatggccttgccaagctctggggaaggcctggcttttttcaccttcccgagcatcgacaaccccaccaagttcaaacagctctatcgtgctcgcatgaacactctggagatgacccccgaggtcaagcacagggtgacagaagaggctaagaccgccttcctgctcaacattgagctgtttgaggagctgcaggcactgctgacagaggaacacaaagaccagagtccctcacagacagagtttcttcgccagaggcctgctagcctggttcaagatactacctctgcagagacgccccgaggaaaatcccagatcagcactagttcatcccagacaccgctcctgcgatgggtcctcacactcagtttcctgttggcgaccgtggcagtgggaatttatgccatgtaa

SEQ ID NO: 3086 - DNA, 1947 bp, Rattus norvegicus
  Genbank Accession No. NM_012584
tgccttcagggtctccaacccttggaaacaaaacgaccaccacacatctactgttctctcaactatctgcttcctgtgttgaccatgcctgggtggagctgcctggtgacaggagcaggaggatttctgggccagaggattgtccaaatgttggtgcaagagaaagagctgcaggaggtcagagtcctgtataggaccttcagtccaaaacacaaagaggaactgtccaagctgcagacaaaagccaaggtgacggtactgaggggagacattgtggatgcccagttcctgaggagagcgtgccagggcatgtccgtcatcatccacaccgctgctgcccttgatatcgcaggcttcctgcccaggcagaccatcctagatgtcaatgtgaaaggtactcagctcctgttggatgcttgtgtggaagccagcgtaccagccttcatctacagcagctcaacaggtgtggctggaccaaactcctacaaggagaccatcctgaacgaccgtgaggaagagcatcgtgaaagcacatggtcaaatccatacccatacagcaaaaggatggccgagaaggcagtgctggcagccaatgggagcatcctgaaaaatggtggcacttttcatacatgtgccttaagactcccattcatctatggggaagaaagccaaatcatttcaaccatggtaaatagagcactcaagaacaacagcataattaaaagacatgccacattctccatagccaacccagtgtatgtgggtaatgcagcctgggcacacattctggctgccaggggccttcgagaccccgagaagtcacaaagcatccaaggacagttctactacatctcagatgacacccctcaccaaagctatgatgatttaaattataccctgagcaaagaatggggcttctgccttgattccagttggagccttcctctgcccctgctctactggcttgccttcctgctggaaactgtgagcttcctgctgcgtccattttacaactataggccaccctttaaccgcttcatggtcacgatcttaaatagcgtgtttaccatttcctacaagaaagctcagagagatctgggctatgagccacttgtcagctgggaggaagccaagcaaaaaacctcggagtggatcgggacactagtggagcaacacagggagacactggacacaaagtctcaatgatgggaagagggcagggacatggccccgggtgttaccccgtcctccagccaggaactcagaaataatccaactcttacagttttattttatacactctccaactggtcttcaggtcaccagaaaccttaagagtcactggcccagtcacctgaacaaggtgcaggggacatcatgtagaaggaataaaactgcctgcctcttgtgacacctgggtgttcattcacctgccatgtggtatcacaaacagaagtaggatctcagctggcatcaaaacttcttctttcttacttaccccatattaagtaatgtttataggaagtaatgtttgtaggtggggcttgagctcccacactagagtcaggaggcaaaaccatgctgaagttctatatagcaaaccaaacctgagagtactttcctgatcactacaatagcaagagagcaagagcgagagtgagagcaagagcgagagagggagggaggaagggaggaaaggggatggagggagggaggaagggaaggagagagagagagagagagagagagagagcatcaccatttcacatagggtgtgaacagagtaggaaatcactttgtttctcatttaccaagagaccatctgaaagaatctgcctttctttgcccctgtcataccaagaaaccttattttcgcttattggacaatgttctatggtataaaaaataagagttgtctggttctgggaataaaactaaattccaagg

SEQ ID NO: 3087 - DNA, 1269 bp, Rattus norvegicus
  Genbank Accession No. NM_012585
atggatgtgttcagttttggccagggcaacaacaccacagcgtcccaggagccctttgggaccggcggcaacgttactagcatctccgacgtgaccttcagctaccaagtgatcacctctctgttgctgggtactctcattttctgcgcggtgctcggcaatgcctgcgtggttgctgccatcgccctggagcgctccctccagaatgtggccaactatctcatcggctccttggcggttactgatctcatggtatcagtgctggtgctgcccatggctgctctgtaccaggtgctcaacaagtggaccctgggccaggtcacctgcgacctgtttatcgccctggatgtactgtgctgcacctcgtccatcctgcacctgtgcgccatcgcgctagacaggtactgggctatcaccgaccctatagactatgtgaacaaaaggacgccccggcgcgccgctgcgctgatctcgctcacttggctcattggctttctcatctccatcccgcccatgctgggctggcgcaccccggaagaccgatcggaccccgacgcgtgcaccatcagcaaggaccacggctacaccatctactccactttcggcgctttctatatcccgctgttgctcatgctggttctctacgggcgcatcttcagagccgcacgcttccgaatccgcaagactgtcaggaaggtggaaaagaagggagcaggcaccagcttaggaacttcgtcggcaccgccccccaagaagagcctgaacggacagccaggtagtggggactggaggcgctgtgctgagaacagggcggtggggactccgtgcactaatggggcagtgaggcagggtgacgacgaggccaccctggaggtgatcgaggtgcaccgagtgggcaactccaaagagcaccttcctctgcccagcgagtcaggatctaactcctatgcccccgcctgcttggagagaaaaaatgagcgcaatgctgaagcaaagcgcaagatggccttggcccgtgaaaggaagacggtgaagactctgggcatcatcatgggcaccttcatcctctgctggctgccgtttttcattgtggctctggtcctgcctttctgtgaaagcagctgccacatgcctgcgttgttgggtgccataattaactggctaggctactccaactccctgctcaatccggttatttatgcttatttcaacaaagactttcaaaacgcttttaagaagataatcaagtgcaagttctgccgccgatga

SEQ ID NO: 3088 - DNA, 2352 bp, Rattus norvegicus
  Genbank Accession No. NM_012588
gggagcagcgagcaagcaggtcctcagcgtccagtcaccgctctaagccaggcgccatgcatcccgcgcgccccgcgctctgggcggctgcgctcaccgccctcactctgctccgcggaccgccagtggcgcgggccggcgcgggcgcggtgggcgcgggccccgtggtgcgctgcgaaccgtgcgacgcgcgtgcgctggcccagtgcgcgcctccgcccaccgcgcccgcgtgcacggagctggtgcgagaacccggctgcggctgctgcctgacttgcgcgctgcgcgaaggcgacgcgtgcggcgtctacacggagcgctgtggcaccggcctccgctgccagccgcgaccggccgagcagtatcccctgaaggcgctgctgaatggccgcgggttctgcgccaacgccagcgccgccagcaacctgagtgcctacctcccctcccagccgtctcctggaaacaccactgagtctgaggaggaccacaatgctgggagtgtggaaagccaggttgtccccagcacacatcgcgtgactgattccaagttccatccactccattcaaagatggaggtcatcataaaaggccaggctagggacagccagcgctacaaagttgactatgagtcccagagcacagacacccagaacttctcctccgagtctaagcgggagacagaatatggtccctgccgcagagaaatggaggacacactgaatcatctgaagttcctcaatgtgctgagtcccaggggcgtccacatcccaaactgtgacaagaaggggttctataagaagaaacagtgtcgcccttccaaaggcagaaagcggggcttctgctggtgcgtggacaagtacgggcagccattgccaggctatgacaccaaggggaaagacgacgtgcattgcctcagcgtgcagagccagtagataccgctgtgccacttaacgtggagctcaaatacgccttattttgcacaaaagactgccaacaacgtgatcagcagctggctataccttgatttatatttctctctctctctctctctctctctctctctctctctctctcttttgtggtgaactgaataaaaacaaacaaaacacatacaaaaacaaaaacaaaaaaaaaagccaagtttagacagatttctgaaatgcctctggttgtttaaatagtgaacttggtcatctttgtatctcgcagtagtcaaccaaaagcagtttgaattttcttgttgcttcctatgaaaaccacacgtgtactccaggccacggatgccgtcgccccctaactcacccacccactgtgggcttcagtgctgctggccctctgccttcttgatttcagaggctctgttgctgatagagaaaaaccctctttccatcccctgtaagtaagtgcaggcactgtggagaatggggaagcctggaacccagtgacccggacgtctggaagcatcctcctgaggcctctggtccttattgtgccatctctgaatcaagggcctggccctgtatctgcaagtggcctgacctacttgggaactgtgggagagaaaaatgtgttgtctctcttactaaaaatgactaagaatgttctagggcgctccgagagcccataaagacaaggacaaggaccttcctttgtcaggcagcttcctgatgacttggcccagcagaaatatcaaactccatgtgcagagatgtcgcaaataacggtgcgcttagttctccggatgacttcaagaaaacagtgttttctggcccagcctctcaaaataaaatttgttgtggggtggggctgaggggaggcagctttcaaaagagagaaggttttcatcttccttgttggagaccctggtaagaacatggagagaatcacctgtttgttgatcttggggtccttctcaaactttctttataattcatgcgtatatgcagacaaaatatgttcttaattgttaacattgtatacaacatagcccaaatatattagaatctgtactagataatcctagataaaaggttagagatgctaggtgatgtaaccacagacacgcccgaggaaaggagcctgtgtctggaggctgggccgctttccccgaggccaaggccatggtggtctggcaatacagggtgtgaggagactgtactgcatcccacggggtggacatgcgctgtacagagctttccttgagagcacaaaggaatcttgagacattctgcctgcctgtcagcttttctttatttttttaattaagtttttgggggaaaaatgtatttttgaaaagtttgtcttgcaatgtatttataaatagtaaataaagtttttttactatttaag

SEQ ID NO: 3089 - DNA, 2078 bp, Rattus norvegicus
  Genbank Accession No. NM_012591
ctcgacgaaggagtaggacgagctctcactgtctgagccaaaccgaaccgggccgagctgagccgaggtcagcggtggccagaggaacccagcatctcgggcatcattcgctccgtgcacgcatcgtgtacctacaccgcaactccgtgcctcattcccgggtaccctctgtgactcgctcctgcagcaaagccaccatgcctatcactcggatgcgaatgagaccctggctagagatgcagattaattccaaccaaattccagggctgagctggatcaataaagaagagatgatcttccagatcccatggaagcatgctgccttgcacggttgggatatcaacaaggatgcctgtctgttccggagctgggccattcacacaggccgatacaaagctggggaaaaagagccagatcccaagacttggaaggcaaacttccggtgtgccatgaactccctaccagacatcgaggaagtgaaggaccagagcaggaacaagggcagctctgctgtacgcgtgtaccggatgctgccacccctcaccaagaaccagaggaaagagagaaagtccaagtccagccgtgacactaagagcaaaaccaagaggaagctgtgcggagattctagccctgacaccttatctgacggactgagcagctctactctgcctgatgaccacagcagttacacagctcagggatacctgggtcaggacttggacatggacagggacattaccccagctctgtcaccgtgcgtcgtcagcagcagtctctctgagtggcatatgcagatggacatcatgccagacagcaccactgatctgtacaacttgcaggtgtcgcccatgccctccacctctgaagctgcaacagatgaggatgaggaagggaagttacctgaggacatcatgaagctctttgaacagtctgagtggcagccgacgcacgtggatggcaagggatacttgctcaatgaaccaggagcccaactctctactgtctatggagacttcagctgcaaggaggaaccagagatcgacagccctggaggggacatcgagataggcatacagcgtgtcttcacagagatgaagaatatggaccccgtcatgtggatggacaccctgctgggcaactctaccaggccgccctccattcaggctattccttgtgcaccataatttgggtccctgacccgttcttgccctcctgagtgagctaggtccagcatcatggtggctgtgatacaacataaagctaaacttccgtggaccccttgatgtggcaaaacataatcccattgccaagcagggaagggaccaaaccatcctccttgggtcagtggactgactcttcagagcttaggaggcagggtctaagtttttcaagctggtcctgactcctaggaagatggattggcgttctgaggttagtgtgaggcagaggacctggacggaagttaccttctagctctttgaaagcttcattgcttagagagggtctcaccactgggctggcctgggggatagaccagcgcccacagaagagcattgcactggccttagggctggctccacactgggagacaattgcactaagtcctattcccaaagaactgctgcccttcccaaccgagccctgggatggttctagagccagtgaaatgtgaaggaaaaaatggggtcctgtgagggttgtctcccttagcctcagagggattctgcctcactccctgctccagctgtggggctcaggaaaaaaaaatggcactttctctgtggactttgccacatttctgatcagaagtgtacactaacatttctcccaagtcttggcctttgcatttatttatatagtgccttgccctgtgcctgctgtctctcctcaggcctcagcagtcctcagcaggcccagggagggggttgtgagcgccttggcgtgactctgaacattggaaacgccacctaactactaagttgtgtctgatctcgtgtggatctgtgtaaatatgtatattcatctttttataaaaacctaagttgtttaaaaaaaaaaaaaaaaaaaaaaaaaaaaaa

SEQ ID NO: 3090 - DNA, 2104 bp, Rattus norvegicus
  Genbank Accession No. NM_012592
tggtatacagcggagatggcgactgcagtccggctgctggggcggcgagtttccagttggagactgcggcctttaccgtcgccccttgctgtcccgcagcgggcccactcgatgttgcctgtggatgatgatatcaacgggctaaacgaggagcagaagcagcttcgtcatacgatatctaagttcgttcaagagaacctggcccccaaggcccaagagattgatcaaagcaatgacttcaagaacctgagagagttctggaagcagctgggaagcctgggagtcctgggcatcacagcccccgttcagtatggtggctctggcctgggctacctagaacatgtgttggtgatggaagagatatcccgggcttcagcagctgtggggctcagctatggcgctcactccaacctctgcatcaaccagattgtccgcaatgggaatgaggcacagaaagagaaatatcttcccaagctcatcagtggtgagttcatcggagccctggccatgagtgagcccaacgctggctctgacgttgtctccatgaggctgaaagcagagaagaaaggagatcactacgttctgaatggcaacaagttctggatcaccaatggccctgacgctgatgtcctagttgtctatgccaagacagacttgactgctgtgcctgcgtctcggggcatcacagccttcattgtggaaaaggatatgcctggtttcagcacctcgaagaagctggacaagctaggcatgaggggctccaacacctgtgagctagtctttgaagactgcaaggttcctgctgctaacatcctgagccaagagagtaagggtgtctacgtactgatgagcgggctggacctagaacgcctggtgctggcaggtggaccccttgggatcatgcaggctgtcctggaccacaccattccctatttgcatgtgagggaagcctttggccagaagatcggccaattccagctgatgcagggaaagatggctgacatgtacacccgcctcatggcatgtcgacagtatgtctacaatgtcgccagggcctgtgacgagggccacatcactgccaaggactgtgctggtgtgattctgtatacagccgagtgtgccacacaagtagccctggatggcattcaatgtttaggtggaaatggctacatcaatgacttccccatgggccgctttcttcgagatgccaaactgtacgagatcggaggtgggaccagtgaggtgaggcggctagtcattggcagagctttcaacgcagacttccgctagcctggggccatcaccctgctcccagcagcaggaggcctttggaagcagagacgtggcagccctctgacttggctaaggaagctctgctgctcaactgccctcttgccagccctctgctcttcgtgaagtcggattctccagccgtgccagccagtcaatcaagaaagcctaaaattcggtccccagctccgaaaaaaaaaaaaaaaaaaaagaaccaaaagaaagcctaaaatggctgctaaaaggactttggcttttctggggtttgcagggagggtaacagtgtctgcgcccttgttctctacttctgaatgtagtaacctcaccctctggggtagcatatgacaggtacccaactccttttcgtgggcaagcctctggcaggggagctctttctgttgcaatgtaacagaggcattgcctctttcaattgtcagatacttgtggtctcttttcttgaggaaaaggcaaaaaccatgtccttcttagctgtttccccaagagctagctagacagttccagaatgcctgtgtggcagacccatgaagggcagagtccacagtctagccaagacaacttggagattggctccctggtgtggctgagtgtctacatcactccgtcacaggctagcactgggcctgctcacgtgaccttctgcagctgcctgactccggtggcccagcttaggttgcctggctcaactccagccttgctgtctatgtatatttctctagacgccctgtggctaattttgttacaaccacacaggctctgctgccattttgtattaaacatactgcaaagtaaaaaa

SEQ ID NO: 3091 - DNA, 3617 bp, Rattus norvegicus
  Genbank Accession No. NM_012598
ttctgccccttgtagctgttctgccctcccctttaaaggttgacttgccccgcggcgctccaccgcgctctagtcctctgacgcctccggctcaaccctttgcaacgcggatccccgcccgcctgactgcccgcgcagcgcagttccagcagcaaagcagaagggcgcgccgagatggagagcaaagccctgctcctggtggccctgggagtttggctccagagtttgaccgccttccgcggaggggtggccgcagcagacgggggaagagatttctcagacatcgaaagtaaatttgccctaaggacccctgaagacacagctgaggacacttgtcatctgattcctggattagcagactctgtgtctaactgccacttcaaccacagcagcaaaacctttgtggtgatccatggatggacggtgacaggaatgtatgagagttgggtgcccaaacttgtggctgccctatacaaaagagaacctgactccaatgtcattgtagtagactggttgtatcgggcccagcaacattatccagtgtctgccggctataccaagctggtgggaaatgatgtggccaggttcatcaactggctggaggaagaatttaactaccccctagacaatgtccacctcttagggtacagtcttggagcccatgctgctggcgtggcaggaagtctgaccaacaagaaggtcaatagaattactggcttggatccagctgggcctaactttgagtatgcagaagcccctagtcgcctttctcctgatgatgcggatttcgtagatgtcttacacacatttaccagggggtcgcctggtcgaagtattgggatccagaaaccagtagggcatgttgatatttatcccaatggaggcactttccagccaggatgcaacattggagaagccattcgtgtaattgcagagaaggggcttggagatgtggaccagctggtgaagtgctcgcacgagcgctccatccatctcttcattgactccctgctgaatgaagaaaaccccagcaaggcatacaggtgcaattccaaggaggcctttgagaaagggctctgcctgagttgcagaaagaatcgctgtaacaacgtgggctatgagatcaacaaggtcagagccaagagaagcagtaagatgtacctgaagactcgctctcagatgccctacaaagtattccattaccaagtcaagattcacttttctggaactgagaatgacaagcaaaacaaccaggccttcgagatttctctgtatggcacagtggctgaaagtgagaacattcccttcaccctgccggaggtcgccacaaataaaacctactccttcttgatttacacggaggtggacatcggggaattgctgatgatgaagcttaagtggaagaacgactcctacttccgctggtcagactggtggagcagtcccagctttgtcatcgagaagatccgagtgaaagccggagagactcagaaaaaggtcatcttctgtgccagggagaaagtttctcatctgcagaaaggaaaggacgctgcagtgtttgtgaaatgccatgacaagtctctgaagaagtcgggctgacactggacaaaccaacaagagaagaaagcatctgagttctttgaagaccgaagaaaatgaagtaaattttatttaaaaaaaatacccttgtttgggtgtttgaaagtggattttcctgagtattaatcccagctatatcttgttagttaaatagaagacagtgtcaaatattaaaaggtggctaacacaacgtgaggaacctaatggccgatagcatgtcctccagcatcagaagacagcagagaggagaagcatgccatcttatatcccttaagaaggaatcatttgttcccaaccatacaagactccttcatgtgacccatttggtcatggtctaaaattagtaagggcctcttattttcattagatctctgaggttttaaattgagaccttctcaaagttctcttgaagtctaatatagacaacatttttttgtgctgtgagtcagatccatttctttagcagttgaaacagctggccattgtaactagttcttttaccatcaggatatagcacccctaccaaataaaataaataaataaagtgaccagggacatgtgactttgcaaaagcaatggacgacgtggctcgtggattcctgacccttagtcccaccacaacgaagtacaagtcagtagaggtacaaaacctagactgagtaattcttagtagacttcaagttttatggcttaattcctctgtcttttaaaaacgtgtcacatattataacattattctctagacagatgttgaaatgagcttgtgattcaggtgacatatgaattgagctgagagaaaataatgccctggctgattttatttctctgttttgctttcttgagaaaaggaatacttgtcccactccgtatctgagcctgaccaagaactaaactatgtacttcaggcttaccttgaactctcaaccatcctgccttggcttcctgagtgctgggagcttgataaccataattttattatcagatttttcttagtcattttcaccaatagaacacattcaatgcccaatcgttagcatttcgtttgagactcatcttgaccgtacctctgtcacacgtctaacacatcacattaatttctagtttagaagtgatcaagttcaaattctgcactgcgcaaagtacaagttttagagcaggaccattttttttttaccacgtaaaagtcgaaattactaggaaatgtgtatatcgatgcttgtacactgttgcgtgcaaagtgaggagccttctattgtgatagccatagacagtaccaggctcgttgccgctcttttgttttactataaaaaaataatgaagaattatttatgaacaagatctcatatgttcagattgcttttactattcatcaatataaaatgttaaaaaaaaaaaataaaacaagttctatctcagaggctgttgctgggaacagaaactgtgaaatgtgtgggtatctgaacacctacacacaagcaaagccccacaagagtctttgtcattcaatgtcattcagaaaggaaagagtcaagagatataccataatatgtcagagaagtagttccagatatgctggaatgctagcccttgctaggagaaagttggttgtgcctatgtaatataggacaaaagtgactggtttcattaggctcagtgtcattctaacaataaaatgatgtaccatatgtcaccagcatccccattattgctaattcatggcagtatatacgtacatatctcaatgatgctttgactttaaattttatttattagctgtaaataatgtgtgggtgtgtaaggaagcttgtaaacactggaaacgctgttgtggctatctggggtgtagatttgtggtgctaactctgtgtccacctccatcagtgattgtctcactgagccaactcactctgatgaacagcacaatggaatagcttttgaaggaagaaaataaactcacctgtgtgaagaaatgggatctgctttcaataaaatcgagaacgttttatccggaatccgcg

SEQ ID NO: 3092 - DNA, 717 bp, Rattus norvegicus
  Genbank Accession No. NM_012599
atgctcctgcttccactgctcgtccttctctgtgtagtgagcgtgtcctcatcagggtcacaaacctgtgaggaaaccctgaagacttgctctgtgatagcctgcggcagagacgggagagatgggcccaaaggggagaagggagaaccaggtcaagggctcaggggcttgcagggccctccagggaaactggggcctccaggaagtgtaggagcccctggaagtcaaggaccaaaaggccaaaaaggggatcgtggagacagcagagccattgaggtgaagctggcaaatatggaggcagagataaacaccctgaagtcaaaactggagctaaccaacaagttgcatgccttctccatgggtaaaaagtctgggaagaagttctttgtgaccaaccatgaaaggatgcccttttccaaagtcaaggccctgtgctcagagctccgaggcactgtggctatccccaagaatgctgaggagaacaaggccatccaagaagtggctaaaacctctgccttcctaggcatcacggacgaggtgactgaaggccaattcatgtatgtgacaggggggaggctcacctacagcaactggaaaaaggatgagcccaatgaccatggctctggggaagactgtgtcactatagtagacaacggtctgtggaatgacatctcctgccaagcttcccacacggctgtctgcgagttcccagcctga

SEQ ID NO: 3093 - DNA, 1761 bp, Rattus norvegicus
  Genbank Accession No. NM_012600
atggatccccgagccccccgccgccgacacacccaccagcgcggctacctgctgacgcgggacccgcatctcaacaaggacttggcttttactctggaagagaggcaacagctgaagattcatggcttgttgccaccctgcattgtcaaccaggagatccaggtccttagagtaattaagaatttcgagcgtctgaactctgacttcgacaggtatcttctgttaatggatctgcaagataggaatgagaagctcttctacagtgtgcttatgtctaatgttgaaaagttcatgcctatcgtttacactcccaccgtgggtcttgcatgccagcaatacagtttggcattccggaagccaagaggcctctttatcagtatccacgacaaagggcatattgcttcagttcttaacgcatggccagaagatgttgtcaaggctattgtggtgactgatggagagcgaatcctcggcttgggcgaccttggttgtaacgggatgggcatccctgtgggtaaactggccctgtacacagcgtgcggaggggtgaatccacaacagtgtctacccatcactttggacgtcggcacagaaaatgaggagttacttaaagatcccttgtatattgggctgcggcacaggcgagtgagaggccctgaatatgatgcgtttttggatgaattcatggaggcagcgtcttccaaatatggcatgaattgccttattcagtttgaagattttgccaatctgaatgcatttcgtctcctgaacaagtatcgaaacaagtattgcacatttaacgatgatattcaaggaacagcgtctgtggcagttgccggccttcttgctgctcttcggataaccaagaacaagctctctgatcagacagtgctgttccagggagccggcgaggctgccttggggattgctcatctgattgttatggccatggagaaggaaggtttatcaaaggagaaagctagacaaaagatatggttggttgactcaaaaggattaatagttaaggggcgtgcttctctcacagaagagaaagaggtgtttgcccatgaacatgaagaaatgaagaacctagaagccattgttcagaagataaaaccaaccgctctcataggagttgctgcaattggtggtgctttcacagaacaaattctcaaggatatggctgccttcaacgagcggcccatcatctttgctttgagtaatccgaccagcaaagctgagtgttctgcagaggagtgctataaagtgaccaagggccgtgcgatctttgccagcggcagtccttttgatccagtcactcttccagatggacggactctgtttcctggccaaggcaacaactcctatgtgttccctggagttgctcttggggtagtggcctgtggactgagacacatcaatgattcggtcttcctcaccacggctgaggtcatatcccagcaagtgtcagataaacacctagaagaaggccggctctatcctcctttgaataccatccgagatgtttccttgaaaatcgcagtaaagattgtgcaagatgcatacaaagaaaagatggccactgtttatcctgaaccccaaaacaaagaagaatttgtctcctcccagatgtacagcactaattatgaccagatcctacctgattgttattcgtggcctgaagaagttccagaaaatacagaccaaagtcaatcagtaacacaacagctagaatttttaactttattaataagatcttga

SEQ ID NO: 3094 - DNA, 2168 bp, Rattus norvegicus
  Genbank Accession No. NM_012603
actcgctgtagtaattccagcgagagacagagggagtgagcgggcgggttggaagagcccagtgtgcagagccccactccgggcttcctaggaaggcagctctggagtgagaagggctttgcctccaggcttgctgcctcctcgacccaatcctcccgctgacccaacatcagcggtcgcaaccctcgccgcctctgggaaactttgcccattgcaacgggcagacacttctcactggaacttacaatctgcgagccaggacaggactccccaggcgcaggggagggaatttttgtctatttggggacagtgttctctgcctctgcccgcgatcggctcccctgaaaagagctcctcgcgttatttgaagcctgaatttcctttgggaggtggaaaacccgacagtcacgacgatgcccctcaacgtgagcttcgctaacaggaactatgacctcgactacgactcggtgcagccctatttcatctgcgacgaggaagagaatttctatcaccagcaacagcagagcgagctgcagccgcccgcacccagtgaggatatctggaagaaattcgagctgctgcccaccccgcccctgtcccccagccgccgctccgggctctgctctccgtcctatgtcgcggtcgctacgtccttctccccaagggaggacgatgacggtggcggtggcaacttctccaccgccgatcagctggagatgatgaccgagctacttggaggagacatggtgaatcagagcttcatctgcgatcctgacgatgagaccttcatcaagaacatcatcatccaggactgtatgtggagcggcttctcggccgctgccaaactggtctccgagaagctggcctcttaccaggctgcgcgcaaagacagcaccagcctgagccccgcccgcgggcacagcgtctgctccacctccagcctgtacctgcaggacctcaccgccgcagcgtccgagtgcatcgacccctcagtggtcttcccctacccgctcaacgacagcagctcgcccaaatcctgtacctcgtccgattccacggccttctcttcttcctcggactcgctgctgtcctccgagtcctccccacgggccacccctgagcccctagtgctgcatgaagagacaccgcccaccaccagcagcgactctgaagaagaacaagatgatgaggaagaaattgatgtggtgtctgtggaaaagaggcaaccccctgccaagaggtccgagtcagggtcatccccatcaagaggccacagcaaacctccacacagcccactggtcctcaagaggtgccatgtctctactcaccagcacaattatgcagcacccccctccacaaggaaggactatccagctgccaagagggccaagttggacagtggcagggtcctgaaacagatcagcaacaaccgcaaatgctccagccccaggtcctcagacaccgaggaaaacgacaagaggcggacacacaacgtcttggaacgtcagaggagaaacgagctgaagcgtagcttttttgccctgcgcgaccagatccctgagttggaaaacaacgaaaaggcccccaaggtagttatcctcaaaaaagccaccgcctacatcctgtccgttcaagcagatgagcacaaactcatctcagaaaaggacttactgaggaaacggcgagaacagttgaaacacaaactcgaacagcttcgaaactctggtgcataaactgaccggaagtgaggaggagctggaatctcgagtgtaaggagaacggttccttctgacagaacttggacttcaaaaaatgcatgctcaaagcctaacctcacaaccttggctggggctttgggacttcagccataatgttaactgcctcaaagttaaggcataaaagaacttttttttatgcttcccatcttctttctttttcctttaacagatttgtatttaattgttttttttaaaaaaatcttccggtgtacatagggcctttaaatgtaaataactttaataaaacgtttataacagttatacaagattttaagacatgtatgataaaccataattttttttatttaaagaccttttcatttttaaagttgatttttttctattgtttttagaaaaaataaaataattggaaaaaatataattgagcca

SEQ ID NO: 3095 - DNA, 3259 bp, Rattus norvegicus
  Genbank Accession No. NM_012610
cagctccggcgggcagcaggcgctggagcgcatcgcagttcagctcagcgcagcaccatcggtctgcggagcggactgagctagaagcggagcgctgacgccggaggcgtgcaatgaggagggcaggtgctgcctgcagcgccatggaccggctgcgcctgctgctgctgctgattctaggggtgtcctctggaggtgccaaggagacatgttccacaggcctgtacacccacagcggagagtgctgcaaagcctgcaacttgggcgaaggcgtggcccagccctgcggagccaaccagaccgtgtgtgaaccctgcctggacaatgttacattctccgatgtggtgagcgccactgagccgtgcaagccgtgcaccgagtgcctgggcctgcagagcatgtccgctccctgtgtggaggcagacgatgcagtgtgcagatgtgcctatggctactaccaggacgaggagactggccactgtgaggcttgcagcgtgtgcgaggtgggctcgggactcgtgttctcctgccaggacaaacagaacacagtgtgtgaagagtgcccagagggcacatactcagacgaagccaaccacgtggacccgtgcctaccctgcacggtgtgcgaggacactgagcgccagttacgcgagtgcacgccctgggctgatgctgaatgcgaagagatccctggtcgatggatcccaaggtctacgcccccggagggctccgacagcacagcgcccagcacccaggagcctgaggttcctccagagcaagaccttgtacccagtacagtggcggatatggtgaccactgtgatgggcagctcccagcctgtagtgacccgcggcaccaccgacaacctcattcctgtctattgctccatcttggctgctgtggtcgtgggccttgtggcctatattgctttcaagaggtggaacagctgcaaacaaaataaacaaggcgccaacagccgccccgtgaaccagacgcccccaccggagggagagaaactgcacagcgacagtggcatctctgtggacagccagagcctgcacgaccagcagacccatacgcagactgcctcaggccaggccctcaagggtgatggcaacctctacagtagcctgcccctgaccaagcgtgaggaggtagagaaactgctcaacggggatacctggcgacatctggcaggcgagctgggttaccagcctgaacatatagactcctttacccacgaggcctgcccagtgcgagccctgctggccagctggggtgcccaggacagtgcaacgcttgatgcccttttagccgccctgcgacgcatccagagagctgacattgtggagagtctatgcagcgagtccactgccacatccccagtgtgaactcacagactgggagcccctgtcctgtcccacattccgacgactgatgttctagccagcccccacagagctgccccctctccctcggggatggcccaacggtcagaacggagcatctctgtgcagggcctctgtgttcccactcctgactccgttgctgctcccgagggggcccttgcttctgaccaccctctcctcagcaagagagagagagaggaccacccgagcctgacttgctccatttccatctcaggcctttccttcctttctacacattagctgtgtcagatctgggggtttgacactaggagaagggagcgggggcacccctaagactcaggaggtactgaagaaccagagccatggactccacactgtgaaccggagaacaaggggcggggcattgtggtaggctagaccttccttagcccctcccttctcccctctggccaaagaagaggattacggacctatctgagctgaaagcaggtttggaacccagcccacacttctctctcacacacaggatggtaaaacccagagaaaggcagggactgacctaggccacccaaccacaggaagaacaaatgaaggctgatacactccgtttctgaatgagggcgtcaagtgtgcttgttgacagggatggcgtgactttcagggaaatatctggaagccatgtctgccccgccctcaaccacttccaggcccctacccaacccttgtgcagatgaactgtttgttcaagggctggtccattggtctattctgatggagtcaagctaagggctcaggcttatccataaggcatttgtggagagatgaatctgttagtgcgctcattcttggcataagcctgaagccaacacggcccttaatgtcagccctcggggtcaggaaccaaggactcccaccccacaatccaacactatactacattacacacacacacacacacacacacacacacacacacacacacacacagatatcttgcttttctccccatggctcttttggggctgagactagatcctgctgggagtcactgccagtgagagatccggaggggacagagctgagcttcatggggctgtcttcctcgcccccgggtctggcaggccaagaatgactgcatctgagctggtgtctgtcttccaatggcctgtgcgtggaggaaatgctcccactcctccccttcttgaagctgcccccagaagactacagtgcaaaagagcagactggtgtgagaacacaagaaaaagcagatgctggccctgcagtctgtggcagctttctcctcagcttcaaggcccctgcaaaggacggatttcctgagcacggccaggaaggggcaagagggttcggttcagtggcgctttctcccggctccttggcctgttctgttttgcttgctgttggaatgagtgggcaccccctctatttagcatgaaggagccccaggcagggtatgcacagactgaccaccatccctccccacccagggtccacccaacccggtgaagagaccaggagcattgtacgcatacgcgggtggtatttttatggaccccaatctgcaattcccagacacctgggaagtgggacattctttgtgtatttattttcctccccaggagctggggagtggtggggggctgcaggtacggtttagcatgtgtttggttctgggggtctctccagccttgttttgggccaagttggaacctctggccctccagctggtgactatgaactccagaccccttcgtgctccccgacgccttccccttgcatcctgtgtaaccatttcgttgggccctcccaaaacctacacataaaacatacaggaggaccattaaattggc

SEQ ID NO: 3096 - DNA, 2442 bp, Rattus norvegicus
  Genbank Accession No. NM_012615
gacagaaaacctagagatggaattaaattatggccagctctcacaaggtcaactttgatgtattacgtgaatgatggagtgtatgggtcatttaactgcattctttatgaccatgcacatgtcagtccctgcagccgccgccgccggccgccttcagtcagcagctcggcgccacctccggtcggcgactgcggcgggctcgacgaggcggctgacggggcggcggcgggaagacggccgggtgcgccttggggtttagtggcggcttctccatgggtccagccagccgcttccctgtgctgtgagtgtttccaccactccaggagacagcattcagagttgaccttgtgagagctggccataatttaattccatctctaggttttctgtcttattgtttcagaggcacatcgagaaccaaccatgggcagctttactaaggaagagtttgactgccatatcctcgatgaaggtttcactgctaaggacattctggaccaaaaaatcaatgaagtttcttcctctgatgataaggatgctttctatgttgcggacctcggagacgttctaaagaagcatctgaggtggctgaaagctcttccccgtgttactcccttctatgctgtcaagtgtaatgacagcagagccatagtgagcaccctggctgccattgggacaggatttgattgtgcaagcaagactgaaatacagttggtgcaggggcttggggtgcctccagagaggattatctatgcaaatccttgtaagcaagtgtctcagatcaagtatgctgccagtaatggagtccagatgatgacttttgacagtgaaattgagttgatgaaagttgccagagcacatccaaaggcaaagttggttttgcggattgccactgatgattccaaagcagtttgtcggctcagtgttaagtttggtgccacactgaaaaccagcaggcttctcttggaacgggcaaaagagctaaatattgatgtcattggtgtcagcttccatgtgggcagtgggtgtactgaccctgagaccttcgtgcaggcagtgtcagatgcccggtgtgtctttgacatgggaacagaagttggtttcagcatgtatctgcttgacattggtggtggctttcctgggtctgaagacacgaagcttaaatttgaggagatcaccagtgtaatcaacccagctctggacaagtacttcccatcggactctggagtgagaatcatagctgagccaggcagatactacgtcgcatcagctttcacacttgcagtgaatatcattgccaaaaaaaccgtgtggaaggagcagaccggctcggacgatgaagatgagtcaaacgagcaaactttgatgtattacgtgaatgatggagtgtatgggtcatttaactgcattctttatgaccatgcacatgtgaaggccctgctgcagaagagacccaagccagatgagaagtattactcatccagcatctggggaccaacatgtgatggccttgatcggatcgtcgagcgctgtagcctgcctgaaatgcatgtgggtgattggatgctgtttgagaacatgggtgcatacactgttgctgctgcttctactttcaatgggttccagaggccaaacatctactacgtaatgtcacggtcaatgtggcaactcatgaagcaaatccagagccatggcttcccgccagaagtggaggagcaggatgttggcactctgcccatgtcttgtgcccaggagagcgggatggaccgtcaccctgcagcctgtgcttctgctagtatcaatgtatagatgccattcttgtagctcttacctgcaagtttagcttgagttcacggcatttggggggaccatttaacttaattactgctagtttggaatgtctttgtaagagtagggttggcaccaatgcagtatggaaagactaggagatgggggtcacacttactgtgttcctatggaaactttgaatattttatatggatttttattcacttttcagacctgatactaatgagtgcccctcggctgctgagcaagcatttgtagcttgtacattggcagaatgggctaaaagcttatgttgtgacccattttgaaaataaagtatcttgaaatgattggacattggagaatgtgtgcaagtatcccttacagaaggcacaaacttctgcacaggctgtgtgttacagcagtgagtctagcccagcagagatgtggatgatacaaagctgtgccccctctgtacagcatcaatgtgcttagcccatctcaagtgtttactgtgaacttggtgcccaaagtctcttaagagtgtcatctgcctagtggcctcttgacttggccacttcctaaggagagggcatctgaggctctttgaaccttgcctgcagaaaccctgactgctccctcaacccttggccg

SEQ ID NO: 3097 - DNA, 487 bp, Rattus norvegicus
  Genbank Accession No. NM_012618
aaaacctctctgttcagcacttcctctctcttggtctggtctcaacggtcaccatggcgagacccttggaggaggccctggatgtaatagtgtccaccttccacaaatactcaggcaacgagggtgacaagttcaagctgaacaagacagagctcaaggagctactgaccagggagctgcctagcttcctggggagaaggacagacgaagctgcattccagaagctgatgaacaacttggacagcaacagggacaatgaagttgacttccaggagtactgtgtcttcctgtcctgcattgccatgatgtgcaatgaattctttgagggctgcccagataaggagccccggaagaagtgaagactcctcagatgaagtgttgggccagtgggggaatcttccatgttggctgtgagcatagtgccttactctggcttcttcatacatgtgcacagtgctgagcaagtttaataaagagttttgaaact

SEQ ID NO: 3098 - DNA, 1998 bp, Rattus norvegicus
  Genbank Accession No. NM_012619
agccctcccatcctgagtgccaacctttcccaaccccgctgctaagctagacacctcactcactgagagccagcatggcagctgttgtcctggagaatggagtcctgagcagaaaactctcagactttgggcaggaaacaagctatattgaagacaactccaatcaaaatggtgccatatctctgatattctcactcaaagaggaagttggtgccctagccaaggtcctgcgcttatttgaggagaacgatatcaacctgacacacattgaatccagaccttctcgtttaaacaaagatgagtatgagttcttcacttatctggataagcgtacgaaacctgttctgggcagcatcatcaagagcctgaggaatgacattggtgccactgtccacgagctttcccgagacaaggaaaagaacacagtgccctggttcccaaggaccattcaggagttggaccgattcgccaatcagattctcagctatggagccgaactggatgcggaccacccaggctttaaagatcctgtgtaccgggcgagacgaaagcagtttgctgacattgcctacaactaccgccatggccagcccatccctcgggtggaatacacagaggaagagaagcagacctggggaacggtgttcaggaccttgaaggccttgtataaaacacatgcctgctacgagcacaaccacattttcccacttctggaaaagtactgcggtttccgtgaagacaacattccacagctggaagatgtttctcaatttctgcagacttgtactggtttccgcctccgacctgttgctggcttactgtcatctcgagatttcttgggtggcctggccttccgagtcttccactgcacacagtacattaggcatggatcgaagcccatgtacacacctgaacctgacatctgccatgaactcttgggacatgtgcctttgttttcagatcgcagctttgcccagttttctcaggaaattgggcttgcatcactgggggcacctgatgagtacattgagaaactggccacaatttactggtttactgtggagtttgggctttgcaaggaaggagattctataaaggcatatggtgctgggctcttgtcatcctttggagaattacagtactgtttatcagacaagccaaagctcctccccctggagctagagaagacagcctgccaggagtattctgtcacagagttccagcccttgtactacgtggcggagagtttcagtgatgccaaggagaaagtgaggacttttgctgccacgatccctcggcccttctcggttcgctatgacccttacactcaaagggttgaggtcctggacaatactcagcagttgaagattttagctgactccattaatagtgaggtcggaatcctttgcaatgccctgcagaagataaagtcgtgagcagaaaatgacgtcatgggcagaacttaggaggtcaaccagaaatcggtcgatagaagtatagtaactgcctttgttcccctgaagaaaaaaagttttatttgaaacgtcagcttttattatttttgctaacacagtggagcatcaccaaataaatcaaagttctctgaaatgaaagtgtgttaaaaccctccaggggtagatctttcagaatcacatttgatttagataatctcatagcttcaatttggtttaaaatgtaattttctcagctctcatcaacattcatcaaatttggggcttgtgtcattggggcttcatccgttcatttttaacctctcaggtaagctctgaaggaacacatttggctgagtgtaaaatgtaagactgccatcagggatgaatcattccgttcagtacagattgtaatctacaaagggtagttttcaccttcgttcattatggctctgagaactgctttgttagcctgcttacataaatctcccctgatcggagaccctattaagatagttacaagcaataaagttttagagcattatat

SEQ ID NO: 3099 - DNA, 1898 bp, Rattus norvegicus; identical to SEQ ID NO: 2928
  Genbank Accession No. NM_012621

SEQ ID NO: 3100 - DNA, 2524 bp, Rattus norvegicus
  Genbank Accession No. NM_012639
gcccggctccctcaggtataagtatgttgaaattgcatcaatggagcacatacagggagcttggaagacgatcagcaatggtttcggactcaaagatgctgtgtttgatggctccagttgcatctcccctacaattgttcagcagtttggctatcagcgtcgggcctctgatgatggcaaactcacggattcttctaagacaagcaatactatccgggttttcttgccgaataagcaaaggactgtggtcaatgtgcggaatgggatgagcttgcacgactgccttatgaaagctctgaaggttagaggcctgcagccagagtgctgtgcagtgttcagacttcttcaggagcacaaaggtaagaaagcacgcttagattggaacaccgacgccgcctctctgattggagaagaactgcaagtggattttttggatcacgttccactcacaactcacaactttgctcggaaaacgttcctgaagcttgcattctgtgacatctgtcaaaagttcctgctaaatggatttcgatgtcagacttgtggctacaagtttcatgagcactgtagcaccaaagtacctactatgtgtgtggactggagtaatatcagacagctcttgctgtttccaaattccactgcaagtgacagtggagtcccagcaccaccctctttcacaatgcgtcggatgcgagaatctgtttcccggatgcctgctagttcccagcacagatactccacaccccatgccttcactttcaacacctccagcccttcctctgaaggttccctgtcccagaggcagaggtcaacgtccactcccaatgtccacatggtcagcaccaccctgcctgtggacagcaggatgattgaggatgcaattcgaagtcacagtgaatcagcctcaccttcagccctgtccagcagccccaacaacctgagcccaacaggctggtcacagcccaaaacccctgtgccagcacaaagagagagggcgccaggatctgggacccaggaaaaaaacaaaattaggcctcgtgggcagagagattcaagttattactgggaaatagaagccagtgaggtgatgctgtctactcggattggctcgggctcctttggcactgtgtacaagggcaagtggcatggagatgttgcagtaaagatcctaaaggtggttgacccaactccagagcaacttcaggccttcaggaacgaggtggctgttttgcgcaaaacacggcatgttaatatcctgctgttcatggggtacatgacaaaggacaacctggcgattgtgacccagtggtgtgaaggcagcagtctctacaaacacctgcatgtccaggagaccaaattccagatgttccagctaattgacattgcccggcagacagctcagggaatggactatttacatgcaaagaacatcatccacagagacatgaaatccaacaatatatttctccatgaaggcctcacggtgaaaatcggagattttggtttggcaacagtgaagtcgcgctggagtggttctcagcaggttgaacagcccactggctctgtgctgtggatggccccagaagtaatccgaatgcaggataacaacccgttcagcttccagtccgatgtctactcctatggcattgtgctgtatgagctgatgactggggagcttccctactcccacatcaacaaccgagaccagatcatcttcatggtgggccgtgggtacgcctccccagatcttagcaggctctacaagaactgccccaaggcaatgaagaggttggtggctgactgtgtgaagaaagtcaaagaagaaaggcctttgtttcctcagatcctgtcttccattgagctgcttcagcactctctgccgaaaatcaacaggagcgcctctgagccttccctgcatcgggcagctcacactgaggacatcaatgcttgtacgctgaccacatccccaaggctaccagtcttctagctgacgttatagctgttcttaggccaccaggggacgaagaagagtcagcaggcaccactttctgtttccttgggggcagaatgcatgtttccggaaaagctgctgctaaggacctagactactcacagggccttaacttcatattgccttcttttctacccttcctgccctggaaatggaagctgtccgccaagccagcctgctccagaggtatacaagtcagcgagtatttttagggcaaatggccttggagagagaaggcagggcactccggctactgcagggacatgcagttgggaacttggctcattgagctgtacagacagtggtgcagtgccagttttgcacatggagtcctggccacctgggggagcctgctttggtactacagaacttcactttgtggacacaccttcctcttactgagtctaagatgtcctgtgcagaggatgctttccaagcacggtgctccaccttctggcagcctcccacacgctgaatctgtcttccaggagctgccctatggggtgctgcagc

SEQ ID NO: 3101 - DNA, 1540 bp, Rattus norvegicus
  Genbank Accession No. NM_012645
ggatcgcacatgggggcgatggcaccgcgcacgctgctcctgctgctggcggcggtcctggcccccacccagacctgggcgggctcacactcgctgcggtatttccacaccgccgtgtcccggcccggcctcggggagccccggttcatttctgtcggctacgtggacgacacgcagttcgtgcgctacgacagcgacgcggagaatccgagatacgagccgcgggcgcggtggatggagcgggaggggccggagtattgggaggagcagacactggtcgccaagggacaggagctggattaccgagtgagcctgaggaacctgctaagctactacaaccagagcgagggcggctctcacaccatccagaggatgtatggctgtgacgtggggtccgacgggagcctcctccgcgggtatgagcagcacgcctacgacggccgcgattacatcgccctgaacgaagacctgaaaacatgggctgtggcagactttgcagcatggatcacccggagcaagtggcagcggaatggtgctgcagagagaagcagggcctatctggagggcacgtgtgtggagtggctcctcagatacctggagcgcgggaaggagacgctgctgcgctcagatcccccagaggcacatgtgacccttcaccccagacctgaaggtgatgtgaccctgaggtgctgggccctgggcttctaccctgctgacatcaccctgacctggcagttgaatggggaggacctgacccaggacatggagcttgtggagaccaggcctgcaggggatggaaccttccagaagtgggcatctgtggtggtgcctcttgggaaggagcagaattacacatgccgtgtggagcatgaggggctgcctgagcccctttcccagagatgggagccttctccatccaccgactccaacttacttctgttgttcttggagctgtggcagtttttgtagttttggccatcattggagctatggtggttgttgtgaggaggaggaggagaaacacaggcaggtacagctcccagagctccgttgtgtctctcccagattgtgaagcatgaagacagctgcctggagtggactgagtgacagacgatgtgttcaggtctctcctgtgacatccagagccctcagttctctttagacaccagtgtctgaagttccctgtgattctatggcttcagtgtgaagaactgtggagtccagcctgccctacacaccaggaccctgtccctgcactgcctgtgttgcctaccacattcagccttgctggtccagcctgggggtggagggtggggacatctgcatcctgtccccctgtgccaccctgagcttcagcccctcactccacactgagaataagaatctgagtgtgaacttgattgttcacatccttgacacagtgtggatagctttttaaattactggatggaatacttagaggttttttgttttggggttttgctttgtttccttttgtttttgaaaaaataaatggcagatggagaagcttccagaaaaa

SEQ ID NO: 3102 - DNA, 1179 bp, Rattus norvegicus
  Genbank Accession No. NM_012646
atgctctgggttcccaaggctggtgcgctctggctcagtgcccttctcctgctcctgaatgcctgcttctcctggacttggacccctgagggctcacactccctgcggtatttctccattgtcatgtcctggctgggcctccgggagccacggatcatagtcagcggctgcatagatgatacggagttcgtgcgcttggacaccaacaaggagactgtaagcctgaagcccctagtgccttggcaggagcaggaggggctagagtactgggagcagcaggttcataaagtcaagactcaagaacaacagtctgcaaggaacctgatgatgctggttcgtttttacaataagagcatggacgacttccacacactacagtggcagcaaggctgcgatgtggggtcagatgggcgcctgcttcactggtacgaccagctcgcctttgatggtgtagatcaccccaccctgaacaaagacctgcgtttctggacagcgtggaccagcactgtagctcagatatctcagcccgagttagaagctcgcctgaaggacaactgctcagagctgctgcagaaatacccagaaaaggagaaggagaggctgctgcgttcagacccgccaagggcacatgtgacccggcaacccagacctgaaggtgatgtcaccctgaggtgctgggccctgggtttctaccctgctgacatcaccctgacctggcagttgaatggggaggacctgatccaagaaatggagtttgtggagaccaggcctgcaggggatggaaccttccagaagtgggcatctgtggtggtgcctctagggaaggagcagaagtacacatgccttgtggagcatgaggggctgtcagagccgctcaccctgagatgggagcctgcccaggattccaccactacaatcattctaattattctacccactgtctctgcaattgtcctctgtgttgctgctgctgcggcaatttgcatatgcctgaagaagaaggcaggtgaaagaggaaggcacgacacccaggaagcagatggagacagtccccaagactcttgcaggattgttgtggatgatcaggagatcgagggtccctcttggaatactgagaactacagaactcatctaggattccactctgggactttaggattgcttagcttgtcattttaa

SEQ ID NO: 3103 - DNA, 2462 bp, Rattus norvegicus
  Genbank Accession No. NM_012649
tgtgctgttggaaccatggcgcctgtctgcctgtttgcgccgctgctgctgttgctcctcggaggtttccccgtcgccccaggcgagtcgattcgagagactgaggtcatagacccccaggacctcctggaaggcagatacttctctggagccctcccggacgatgaagacgctgggggccttgagcaggactctgactttgagctgtcgggttccggagatctagatgacacggaggagcccaggaccttccctgaggtgatttcacccttggtgccactagataaccacatccccgagaatgcccagcctggcatccgtgtcccctcagagcccaaggaactggaagagaatgaggtcattcccaaaagggtcccctccgacgtgggggatgacgatgtgtccaacaaagtgtccatgtccagcacttcccagggcagcaacatttttgaaagaactgaggtcttggcagctctgattgtgggcggcgtagtgggcatcctcttcgccgttttcctgatcctgctgctggtgtaccgcatgaagaagaaggatgaaggcagttacgacttgggcaagaaacccatctacaaaaaagcccccaccaacgagttctacgcatgaagcttcttcccatgagtgctgcttggacttcatggggagaggagttgaggattgtggacagtggacattggcagagagagggcaccttaatactgacttgtatctccatctctggtcacctttctggtgtcagaagagatatgatcttctactgtgctgcctcagagagagagagagagagagagagagagatgggatggggtgcggagggagtgtccgtgtgtgtgtgtgtgtgtgtgtgtgtgtgtgtgtgtgtgtgtctgtctgtctgtctgagttgccctggcagaaaaatggggttaaacttgttctttcttgaaggcaagcctggaattgggtctttttgttgttgtttcaaatttctagaatagaatgtaggaccagtttagttcctgccgttaacatgtctcatttatgactgcctttattctagaggcaaggagttgggggcaaggagctggaacccgctgcaccttgagatgtgttcacccgagtacttcctcacactacagggtctctgtggtgtatctcggggcattctaggctcagtgacttttgaaattcaaccttttttttttttttttaaatccagggagggtgggactgaagtgctgacagctcatgctgaagtacacttgtagaagatttgtaaaatgtaaggttttttttttttttttttaatggtccattccttcatgggagcgtgtgccctgggctgagagcgtggggatgcacagatgttctttctagaacatattcgttgcaacagctaactttgtgttttcatggttttttatgttttgttttgtttttttgaaaatgagagaagagctggagagatgatttttatgatttttttttgttttgttttttactatttatagcttcagacggggctgcttttctctacctttctgtctttactgtttcccactattttttttttttaatgttctgtgctcttgtttttgaccctggccctttctgaagttgctttatcttaaaaagtagctacagtgttctagcagattccagaatataatgtagggggtagcgggatatttgtgttcttgtaatatatattatccttcctcggttctaggagaatagataaatatatttttttaggatatagaatgatactacaggtctcatgttggctgggtggctgcgtgagtgagttttcgtgcggctgagtaagctgttgccctcttctcttgccctgctcctggtgccttctcgagatcgagctggagtgactgagggtacctgactctaacctcactgtgccttctgccgggggctctgcccaggagcctctgggtttgctttctccaggctctctagatgcacgatccaatacagtgacctcctgtggctgtatcaatcagttcacttgactatgtgattggaaatcattcctctgttgcactggccacacaatttaagtgcctagtcaccatccaccgagcacagagattgaggctggtttagcaggttacggttcagttttgcttgtctccccgggcaagagaaggggacttaggaggaaggtgatgaggtcccagggactcctgtcacccaggactctccctcttacagaggaaagacctagtagcttaaaaggtctgggctgtgtgggggtggggcggtcataccactccctcaaccatgccctatgcctgtaagcccccatcaccacctccgtgcagggtcctagctggctgggtcctcttctagccttgtgcctgctccttttctgtatcccttactctgttgtctgttactgatttttttgataaaaagataataaaacctggtactttctaaaaaaaaaa

SEQ ID NO: 3104 - DNA, 2547 bp, Rattus norvegicus
  Genbank Accession No. NM_012651
atggaccagaggaaccaggaactacagtgggtggaggcggcacactggatagggctggaggaaaaccttcgagaggatggtgtgtggggtcgtccacatctctcttacctcaccttctggagccttctagaactgcagaaggtcttctcaaaaggcaccttccttctggatctggcagagacatccctggctggggtggccaataaacttctagacagtttcatctatgaggatcaaattcggcctcaagaccgagatgagctgctccgggctctgctactcaaacgcagccacgctgaggacctaaaggatctggagggagtgaagcctgccgtcctgacccgctctggggccccttctgaacctcttcttcctcaccagccatcgctggagaccaagctgtactgtgcacaggcagaggggggctcagaagaaccctcgccatctgggattctgaagatcccccccaattcagaaaccacattggtgctagtgggccgggctagtttcctggtgaagcctgtgctgggcttcgtgagactgaaggaagctgtgccgctggaggacctggtgttgccggagcctgtgagcttccttctagttcttctcggacctgaggctccgcacatcgactacacccagctgggcagggctgcagcaactctcatgacagaaagagtgttccgcgttaccgcctccctggcgcagagccgaggggagctgctgagctccctggatagctttctggactgtagcctggtgctgccgcccacagaggccccttcagagaaagctctgctcaacctggtgcccgtgcagaaggagttgcttaggaagcggtacttgcccagacctgccaagccagaccccaacttgtacgaggcattagacgggggaaaggagggccccggtgacgaagacgaccctctaaggcgcaccggccggatctttggaggcctgatccgtgatatccggcgccggtatccttactacctgagtgacatcaccgatgcgctcagtccccaggtgctggctgctgtcatcttcatctactttgctgccttgtcacctgcggtcaccttcggcggtctcctgggagaaaagacccggaacctgatgggggtgtcagagctgctcatctccacagcagtgcaaggaattctctttgctctcctgggggcacagcccctgcttgtgctcggcttctcaggacccctgctggtgtttgaagaagccttctactcgttctgtgaaagcaataacctggagtacatcgtgggccgcgcgtggatcggcttctggcttatcctgctggtggtgttggtggtggcctttgaaggcagcttcctggtccaatacatctcccgctacactcaggagatcttctccttcctcatctccctcatcttcatctatgagactttctctaagctgatcaagattttccaggactacccgctacaagagagctatgcccctgttgtgatgaagcccaaacctcagggccccgtgcccaacacagccctcctctcccttgtgcttatggttggtaccttcctacttgccatgatgctacgaaagttcaagaacagcacctacttccccggcaagctacgcagagtcattggggactttggggtccccatctccatcctgataatggtcctggtggataccttcatcaagaacacctacacgcagaaactctcggtgcctgatggccttaaagtgtccaactcctccgcccggggctgggtcatccatcccctgggtctgtataaccatttccccaagtggatgatgtttgcttctgttctacccgctctgcttgtcttcatccttatattccttgagtctcagatcaccacgctgattgtcagtaaacctgagcggaagatgatcaagggctccggcttccacctggacttgctgctggttgttggcatgggcggggtggccgccctctttgggatgccttggctcagcgccaccactgtgcgttctgttacccatgccaacgccctcacagtcatggggaaggccagtggtccaggggctgcagcccagatccaagaggtcaaggaacagcggatcagtgggctcctggtctctgtgctcgtgggactgtccattctcatggaacccatcctgtcccgcatccccctggctgtactgtttggcatcttcctgtacatggggatcacatccctcagtggcatccagctctttgaccgcatcttgctcctgttcaagccacccaagtaccacccagatgtgccctttgtcaagagggtgaagacctggcgtatgcacctcttcacgggcatccagatcatctgcctggctgtgctgtgggtggtgaagtccacgccagcctcgctggccctgccctttgtcctcatcctcaccgtgcccctgcgtcgtctcctcctgccgctcatcttcagagagctagaactccagtgtctggatggtgatgatgccaaagtgacctttgacgaggcggaagggctggatgagtatgacgaagtgcccatgcctgtgtga

SEQ ID NO: 3105 - DNA, 2025 bp, Rattus norvegicus
  Genbank Accession No. NM_012656
tctgctgcctgcccaactgcctgcctgcctgtgccgagagttcccagcaccatgagggcctggatcttctttctcctttgcctggccgggagggccctggcagcgcctcagacggaagctgcagaagagatggtggcggaggaaaccgtggtggaggagacagggttacctgtgggtgccaacccagtccaggtggaaatgggagagtttgaagaaggtgcagaggaaactgtcgaggaggtggtggctgaaaacccctgccagaaccatcattgcaaacatggcaaggtgtgtgagctggacgagagcaacacccccatgtgtgtgtgccaggaccccaccagctgcccagctcccattggcgagtttgaaaaggtgtgcagcaatgacaacaagaccttcgactcttcctgccacttctttgcgaccaagtgcaccctggagggcaccaagaagggccacaagctccacctggactacatcggaccatgcaaatacattgccccctgcctggattctgagctgaccgaattccctctgcgcatgcgtgactggctcaaaaacgtcctggtcaccttgtacgagagagatgagggcaacaacctcctcactgagaagcagaaactgcgtgtgaagaagatccacgagaacgagaagcgcctggaggctggagaccaccctgtggagctgctggcccgagactttgagaagaactacaacatgtacatcttccctgtccactggcagtttggccagctggatcagcacccgattgatgggtacctgtcccacacggagctggccccactgcgcgctcccctcattcccatggaacattgcaccactcgcttctttgagacctgtgacctagacaatgacaagtacattgccctggaggaatgggccggctgcttcggcatcaaggagcaggacatcaacaaggatctggtgatctaagttcaagcctcctgcagcagtcctggactctctccccctgatgtccccacccacttccactacccccttgtttaaaatgtttggatggttggctgttctgcctggggataaggtgctaacatagatttaactgaatacattaacggtgctaaaaaaaaacaaaaaacaaaaaaaacagaaagaaagaaaccagatcccaagtcacagcattttcccacgttactcgactctgaggccatagcctatccacagcctcctcgtcccctgcaccgcccagtgtctcactggctgtgttggaaacgggaattgcataagcttgccttcctcaagcaagaaatatctctagctttcatttccattttgactcttaacactcacccagactctgtgcttatttcatttgggggggggtgtgggcttcctggggtcttcccctggtagtttggaggtaggcagagggaagttacagacacagatacaaaacttgggcaaggacgctgtgaggccagtcagaaccagatggcaagtcttggtagcctaggtcaacgactgacagaataatccagagctctgatgcacaaaacagactcccagcagcccgggaccttgctgtctcctccactcttcaggcagtttctttccatgtttggctgttggttttaattttggtgagccaaggggaggcatgggcagaccaatacctcactagggattctcttactcaactgctatagggctttcaggctcttgctgggagctctaggcactgggctacaggaaagtgagactcaagaggaagacagagaaggttgtaacgtagagagagtgagtcataaagtttcaagcatgccccccccacctctccccaccctttgccagttgaaacttactaatcaagagaaacttccaagccaacggaaggaatggtcggatcccacaggctgagaatttgttcccctccaagcatttcatgaaaaagctgcttctcattaaccatgcgaactctcacagtgatgtgaagagcttgacagatctttcaaaataaaaagtaatgacttagaaatggcc

SEQ ID NO: 3106 - DNA, 1664 bp, Rattus norvegicus
  Genbank Accession No. NM_012657
aacacaccagggcaccctgaacatcaggagtcggcaaacacagaggctagtagctggctggtatcacctctgcagccaggaggacagagaagatggccttcattgcagctttggggctcttgatggcagggatctgccctgctgtcctctgtgatggcatactgggaagggacactctaccccatgaagaccaaggcaaggggagacaactgcacagtctcacattggcttccatcaacactgacttcacattgagcctctacaagaagctggctttgaggaatccagataaaaatgttgtcttctcccctcttagcatctcagctgccttggccattttgtctctgggagcaaaagacagcaccatggaagagattctagaagtactcaagttcaatctcacagagatcactgaggaagaaatccaccagggctttgggcacctcctacagaggctcagccagccagaggaccaggcagagatcaatacaggtagtgccctgtttattgacaaagagcagccgatactgtcagaattccaggagaagacaagggctctgtaccaggctgaggccttcgtagctgacttcaagcagtgcaatgaggccaaaaagttcatcaatgactatgtgagcaatcagacccaggggaagatcgcagaactgttctcagaactggatgagaggacatccatggtgctggtgaactatctcctctttaaaggcaaatggaaggtaccatttaaccccaatgacacatttgagtctgagttctacttggatgagaagaggtctgtgaaggtgcccatgatgaaaattaaggatctcaccacaccctacatccgggatgaggagctgtcctgctctgtgctggaactgaagtacacaggaaatgccagcgccctgtttatcctccctgaccagggcaagatgcagcaggtggaatccagcttgcaaccagagaccctgaagaagtggaaggactctctgaggcccaggattataagtgagcttcgcatgcccaagttctccatctccacagactacaacctggaggaggtccttccagacctgggaattaggaaaatcttctcccagcaagctgatctgagtaggatcacagggaccaagaacctgcatgtctctcaggtggtccacaaagctgtgctggatgtggatgagacaggcacagaaggagccgctgccacagcagtcacagcagccctaaaaagtttaccgcaaactatacctcttctgaatttcaaccggccattcatgctggttatcactgacaataatggtcagtctgtcttctttatgggcaaagtcactaaccccatgtgatctgaagctccccaaaatctgacaattctgcccaggatcctggaacagagcctggatgctgatctctgtatatgccctgacatacatgctctgattggctattgcaaagttggcttagacagtgacatcaactatctctatggctcccatgtgcactggagcctttggattgtcagtgtgcaggcacttaggacccttgggagcatctacacatgtttctgaacttggaatctttctttattcttcttccctggtgactcctctttctgtgttcataccccaaaccaagccattgataagtcccagtaaaggttctgagaa

SEQ ID NO: 3107 - DNA, 2472 bp, Rattus norvegicus
  Genbank Accession No. NM_012661
ggcaacaccgcgacctctgaacccgtgcctcagagacaacaccgcgaccctctggcgacctctgaccctgtgaccctgtgtggtgtgacctcacgaccctggcgccctcagcggtgacctttgaccccgcagcgaccccgagaccccaggacccctgcacttatccacaactctgggacctccaaccccgcgaccccaacagcgacctctgaccctggtgaaagcaggagaacccgggacaccagtgaccctgcaacttctgaccccactaagggcaacaactctgagactgtacggtgacctctgacctctgaccctgggctgttcccccgagataacagtgaccccaggaactccaactcagctacaacctggtgacaaccaaggtaacccagggacaacctctgaccccttgaatccacgacttttcacccagtgctgaccactgcagtgtggggcagtctgagagagtgcgtgacctttgatctctgacctctgaccccgacccagccttgcccacaggacgatgctctggccctgtctccttgccctgctcctctcccagctcaactttctctgtgctgcccgtcctggccctggacctaacttcctgctcatcatggctgatgaccttggcattggggacctaggctgctatggcaaccgcacactcaggacgccacacatcgaccgcctggcccttgagggggtgaagttgactcagcacctggcggctgcgcccctgtgcaccccgagccgcgctgccttccttaccgggcgctaccctgtgcggtcagggatggcatcacatggccgcctgggtgtattcctgttctcggcatcatctggggggctcccgcccaatgaagtcacctttgcaaagttgctcaagggtcaaggctacaccaccgggcttgtagggaagtggcatctggggctgagctgccaagcagcctctgacttctgccaccaccctgggcgccatggctttgaccgcttcctgggcacgcccaccaccaacctgagggactgcaagccagggggcgggaccgtgtttggctctgcccaacaagtattcgtggtcctgcccatgaatattctgggggcagtgctgctggccatggcacttgcgcggtgggcagggctggcccggcccccagggtgggtgttcggggtgacagtggctgccatggcggcggtgggcggggcctatgtggccttcctctaccacttccgcccagccaactgcttcctcatggccgacttcaccatcacccaacagcccacggactacaaggggctcacacagcgcctggcaagcgaggctggggacttcctgcgcaggaacagggacacgcccttcctgctattcctgtctttcatgcatgtgcacacggcacacttcgccaaccctgagtttgccgggcagagcctgcatggggcctatggagatgctgtggaggagatggactgggccgtaggccaggtccttgccacactggacaagctgggcctcgccaacaacacactcgtgtacttgacgtccgaccatggcgcacacgtggaggagcttggccccaacggtgaacggcatggcgggagcaacggaatttacaggggcgggaaggccaacacgtgggagggtggcatccgtgtgcctggacttgtgcgctggcccggcgtgattgtgcccggccaggaggtcgaggagcccacgagcaacatggacgtcttccccactgtggccaggcttgcaggggcagagctgccgactgacagggtgattgacgggcgtgacttgatgcccctgctgctgggccatgtacaacactctgagcatgaattcctgttccactactgcaatgcctacctcagcgctgtggcatggcggccccacaacagctcgtccgtgtggaaggcgttttacttcacaccgaacttcgaccccccgggctctaatggctgcttctccacacacgtgtgcatgtgccacggccaccatgtcacgcaccatgatccgcccctgctcttcgacattgcccgtgaccccagggagcgccacccgctcacgcctgaaacagagccgcgccatggtgagatcctgcgcaacatggatgctgcggcccgtgcacacgttgctaccctagaggaggcgcccaatcagctttccatgtcaaatgtcgcatggaagccatggctgcagctctgcctgccttccaagccccacccactcgcatgccgctgtgctggcgacgggtgagttgggcatgccaaacacacaggtatgcaagcatgggacactgtggcctggtgatttcacctcctgaactgatacctgacacaatcttgctgacatgtatgaaaacatatgaacatgtatgaacatgtgtatgctgagtacaaaacacaggaagagcccctcagcatgaccctgatgaataaatgatgtggacacggaaaaaaaaaaaaaaa

SEQ ID NO: 3108 - DNA, 2071 bp, Rattus norvegicus
  Genbank Accession No. NM_012663
gaattcgggctacccccgccatgtcggctaccgctgccaccgtcccgcctgccgccccggccggcgagggtggcccccctgcacctcctccaaatcttaccagtaacaggagactgcagcagacccaggcccaggtggatgaggtggtggacatcatgagggtgaatgtggacaaggtcctggagcgagaccagaagctatcggaactggatgatcgcgcagatgccctccaggcaggggcctcccagtttgaaacaagtgcagccaagctcaagcgcaaatactggtggaaaaacctcaagatgatgatcatcttgggagtgatttgcgccatcatcctcatcatcatcatcgtttacttcagcacttaagtccctgaggagtctgccctgcctaagaagggcctctcccccaccctcagcccgtcctccacctctcagccatatctttcagccccctcccttggatccgtgtgtgtgtgtgtccgtgtgtgtgccccctgtaaatagccagctgttatttatacatatataatattatatatatttggtctgtttgtagttttattactagaagattttttccggttgtccttaacaccccttcctgaggttcccatcacctctctctctcaccctctgccccctttcctctttcctgttcagccccaagtcccttcatttgcatctgctatgcaatagcccctctcctccttcccttggatttaaccaatccttcccctatcttccctgtacaattccagaccctccccaaacagagcaaaccccacagaaacaaacaaaacaccccacctgtctaggcttccataggttgcatctttgtatcccttgggagcctctaagactggtcctacttggtcctaagaatcccaaggatttctgggagcttccaacatgttgattagcatatcatttgcatacactgtcttttttttccctcggtttcttcctttctgttccattactcttcactcttctgtgtttttttttttttctttctttcttttcggaagagttagtttccattggtcctcttatcacacttttatttgcacgacattatctgcaggtggtggggagcctgggcttttggggaactaggaccccaaagttgcctcctcccagcccctctagtctagtttgcttcccttaccccatttccacacctcttgtaccctcctctccctcccccagctggtgtgtaagtgtcttggagttcagtgtgttatgatgggaccaataattctgccacttggggtctctccctacattcctgctccccagttttcgtgtggggcattcagctgacatttcccgggggtctccctccctcccatctgcctgatctgctgcctcctcccaccaggagaactggaggctgaccacaatctggttctttgaggaggggtggctctagtgtgtgtgggggtcatcactgccttggggaggagtaggacaaaacagaaccccccctaattcctgcctgaaatctctggcctcatccttgctagaggttggactgaaaactttcctccccaatcctggggggtattaccccccatcactgcccagctcctctgactgcccccctgtattcagggtgggggtactagtcactgccaatatgtgtatgggacttgctggaggatggggatccttgtccttctctagggctgctgagccctgagagagagagagagagagagagagagagagagagagagagagagagaagcaagctatttccctgttgggtacaatgatagagaaaggatctaatcgggaaaaatggcacagttttaggggtctgagggtacagccccttaacctgcctcttgggggggggtgttccccaaactcttcccccacacacaccaggttttctgtgtggaggggaaccaaggagatgtaaactgtggtgtgaaagggtaggagagatgctgggggtgggggtgcttgtgttttacacccccaatattatcccagtgtcccctgccttccttcttcccctgccccatgcccccaattctgtggcgcatccagccgaattc

SEQ ID NO: 3109 - DNA, 2362 bp, Rattus norvegicus
  Genbank Accession No. NM_012668
atcatcagaggacttggtggaggagagcttataggtttggctgctgggaggctgctttgcctggacttggaagattttcctgtaggcttcgagaggcatggactcctacgtgattcagacggatgtcgacgacagcttgtcctcagttctggatgtgcatgtcaatattggtgggagaaactcggtacaaggaagaaagaaaggcaggaaggccagatgggacgtgagaccctctgacatgtccaataagaccttcaatcccatccgagccatcgtggacaacatgaaggtgcagcccaatccgaacaagaccgtgatttctctgtcaattggggaccctactgtgtttgggaacctgcctacagaccctgaagttacccaagccatgaaagatgccctggactcggggaagtacaatggctatgccccgtccatcggctacctatccagtcgggaggaggtcgcttcttactaccactgtcatgaggctcctctggaagctaaggatgtcattctgacaagcggctgcagtcaggccattgagctatgtctagctgtgttggccaatcctggacaaaacatcctcattccaaggcccgggttttccctctataggactttggctgagtctatgggaattgaggtcaagctctacaatctcctgcctgagaagtcttgggaaattgacctaaaacaactggaatctctgatcgatgaaaaaacagcgtgtcttgttgtcaacaacccatccaatccctgtggctccgtgttcagtaagcgacaccttcagaagattttggcagtggctgaaaggcagtgtgtccccatcttagctgacgagatctatggtgacatggtgttttcagattgcaaatacgaaccactggccaacctcagcaccaatgttcccatcctgtcctgtggtgggctggccaagcgctggctggttcctggctggaggttgggctggatcctcattcatgatcgaagagacatttttggcaatgagattcgagacgggctggtgaaactgagtcagcggatcctgggaccatgcaccatagtccagggtgctctgaagagcatccttcagcgaacccctcaggagttctatcacgacacgttaagcttcctcaagtccaatgcggacctctgctatggggcactggctgccatccctggactccagccggtccgcccttctggagccatgtaccttatggtgggaattgagatggagcatttcccggaattcgagaacgacgtggagttcacagagcggttgattgcggagcaggctgtccactgtctcccagcaacgtgcttcgagtacccaaatttcttccgagtggtcatcacagtccccgaggtgatgatgctggaggcttgtagccggatccaggagttctgtgaacagcactaccactgtgctgaaggcagccaggaggagtgtgacaaataagccctcacccgtcctcctgaagacatgtcccacgcaaggacggttggactggaccgctcctcctcagggagccaaatgtctctgatgggagaggaacctctaaagcaccgcatgaagacttgaagatcatttctccttcccccagtttcacccaacgcacgcctggaaacccagacccctccctactcagttctgctggagccatgagctcactgccccccaccccccacttccttatcctgagggtatcagaccaatttaccagaaagaagctgggccaagaaaagagagagctcaggatgagagaagcagaagacggaggatgcctctcccacccatttcctcgtgctgacatcctcttcagtcaggtcggaagtcacctcagttgctgcctcacttcaggcaaacctcactcctcgtggtacagctacaccagagagaagtcgaggacttgtgaattcagttaattgtattctaaacacatcaggaaacttgatgtttaaaggatccctgacagaatttttatttttattttttgtaaaggattattttgcggtgcaaataaataccagcttcctaaactgatcaacttcctaactgattagatagatctacttgtatcaggttttcctaaaataggaggacacctcactgaaggagaaagaagggaccggaggcctctctagagactttgctgtgtacaggacagcatcttcctccttgtcttctcgtagaatcatatatagccacttttgctatcatgtgaatattgatttattgatatttgtaatattaacttttcatatattttcctaagaaacatttatattataaggccttttattttgtcaagggcataaattattttttctttatttttgaaataaaaatttatcaaat

SEQ ID NO: 3110 - DNA, 3538 bp, Rattus norvegicus
  Genbank Accession No. NM_012669
ggtgcccacagggcttgactagtgggatttgggggagcagtgggtgcagcgagcctggtccgttgactgccagcagtagacaccggccgtgtgtgggggaggcggctagctcagtggccttgggccgcgtggcctggcggtagaggagccatggtttctaagttgagccagctgcagacggagctcctggctgctctgctcgagtcgggcctgagcaaagaggctctgatccaggctctgggggagcccgggccctacctgatggttggagatggtcccctggacaagggggagtcctgcggtgggactcgaggggacctgaccgagctgcccaatggcctgggggagacgcgtggctcggaagatgacacggatgacgatggggaagacttcgcgccacccattctgaaagagctggagaacctcagcccagaggaggcagcccaccagaaagccgtggtggagtcacttcttcaggaggacccatggcgcgtggcaaagatggtcaagtcgtacctgcagcaacacaacatcccccagcgggaggtggtggacactacgggtctcaaccagtcccacctgtcccagcacctcaacaagggcacccccatgaagacgcagaagcgggccgcgctgtacacctggtacgtccgcaagcagcgagaggtggctcagcaattcacccacgcggggcagggcggactgattgaagagcccacaggtgatgagctgccaaccaaaaaggggcggaggaaccggttcaagtggggccccgcatcccagcagatcctgttccaggcttacgagaggcagaagaaccccagcaaggaagagcgagagaccttggtggaggagtgcaatagggcggagtgcatccagagaggggtgtcaccatcgcaggcccaggggctaggctccaaccttgtcaccgaggtgcgtgtctacaactggtttgccaaccggcgcaaggaagaagcctttcggcataagctggccatggacacgtataacgggcctccacccgggccaggccccggccctgcgctacctgcccacagttccccgggcctgcccacaaccaccctctctcccagtaaggtccacggtgtgcggtatggacagtctgcaaccagcgaggcagctgaggtgccctccagcagcggaggtcccttagtcacagtgtctgcggccttacaccaagtgtcccccacaggcttggagcccagcagcctgctgagcaccgaggccaagctggtctcagccacggggggtcccctgcctcccgtcagcaccctgacagcactgcacagcttggagcagacgtctccaggtctcaaccagcagccgcagaaccttatcatggcctcgctgcctggggtcatgaccatcggcccaggggagcccgcctccctgggtcccacgttcactaacacgggtgcctctaccctggtcattggtctggcctccacacaggcacagagcgtgccagtcatcaacagcatggggagcagcctgaccaccctgcagccggtccagttttcccagccactgcacccttcctatcagcagcctctcatgccccctgtacagagccacgtggcccagagtcccttcatggcaaccatggcccagctgcagagcccccacgccctgtacagccacaagcctgaggtggcccagtacacgcatacaagcctgcttccgcagaccatgctgatcacagacaccaacctcagcacccttgccagcctcacgcccaccaagcaggtcttcacctcagacacagaggcctccagtgagcctgggcttcatgagccgtcgtctccagccacaaccattcacatccccagccaggacccgtcaaacatccagcacctgcagcctgctcaccggctcagcaccagtcccacagtgtcctccagcagcctggtgttgtaccagagttctgactccaacgggcacagccacctgctgccatccaaccacggtgtcatcgagacttttatctccacccagatggcctcctcctcccagtaaccatggtgactgcctcccaggagctgggctcccagagcctgcacagggggagaggagggccacagccatgctgcctggagggtgttggagcctgccacctgccacaggctgctggccttcccagaactctatgccttcatgctgcagctgctcctccatcatcagaaagggatggctctgaggtgtctcctcagcctgaggggcaagcctcaaggagccggaggacagcccaatctggaccgccatccctgctggttagaatagaaaacttaatgcttggaacagaagggggaagcctgtattgctggcaccctccagtcagagcttgcaggccctgaaggatctctgctgagctcggaggccctacatcaacatggctgccatctgtctcctgtgcctcccaggccactccaccctgcgccagagacccatgtgcctcttggtgggttaccctccctccacaggatcttccaggcagttctctggctaggcttgggagcctagggagcagggctctcctaggctttcccctactaagtcgctcttcctcccggccccaggacctcatttgtttccgtgaccgtatcttctgatgccagcttggcatcttgcctgcactagaaaggctgcttcagggctaagattgtcacccttgttccttagggcacgtaactcatgccaaggtcacatcctaggcaatcacctcctctggctgcagggccctacaacttccttcctggtgtgagagacgtgtagaactcggaagacaaggcctgagcaatgtctagtggagagagtgctgagaccagcagagagaagccacccaaggggctaggggctggcagctattctgatctctggcctgctgcagagagcctggccctcagtgggctcccccctcagcctggaaagagccagcgccccctgcagcctacggccggtcatgggcaagcctagatgtttatttaacttttagtaaagccagtaagaagtgtgtagtagcttcctgattacctaggcatctgtggccaggagggacggtggagggaaggcagagggaagcagggtgaaggcaggggcctgagctgtcggcaggctcatgggatatgtgtttacacatctttttgttcaactggaaatgaggtgaggtgactgcctggatttctgtgtcctcctcggtactgcaagaaacccacccagtccaggtgtggtgccattcccagagtcttaagctggggtgacaaagcgtatccggggtgtgggtggaaggatcccactgtggttttatgagacgtccccctaacattgagcacagaggatgtgcctcggtggcacaatgcctgcctggtaagtgtaaagccacgggtttgatccccggcactcaaacaacaacgcactgacagctccttgtaactacgcaggaggcaaaccaggagactggccaggttgagctacagagacacagacaaacaataaacaaaaagggttggtactgaccagg

SEQ ID NO: 3111 - DNA, 650 bp, Rattus norvegicus
  Genbank Accession No. NM_012673
ctgcaagctaggggagcccagacccaggacggagctattggcaccatgaacccagtcatcagcatcactctcctgctttcagtcttgcagatgtcccgaggacagagggtgatcagcctgacagcctgcctggtgaaccagaaccttcgactggactgccgtcatgagaataacaccaacttgcccatccagcatgagttcagcctgacccgagagaagaagaagcacgtgctgtcaggcaccctgggggttcccgagcacacttaccgctcccgcgtcaaccttttcagtgaccgctttatcaaggtccttactctagccaacttcaccaccaaggatgagggcgactacatgtgtgaacttcgagtctcgggccagaatcccacaagctccaataaaactatcaatgtgatcagagacaagctggtcaagtgtggtggcataagcctgctggttcaaaacacttcctggctgctgctgctcctgctttccctctccttcctccaagccacggacttcatttctctgtgactggttgggcccaaggagaaacaggaaacctcaaggtctgctgaagaggtcttgcttctcccggtcagctgactccctccccaagaccttcaaatatctcaaaacgcggggagaaatgg

SEQ ID NO: 3112 - DNA, 2338 bp, Rattus norvegicus
  Genbank Accession No. NM_012674
tctacaaccatgaaggtagcaattatctttcttctcagtgctttggccctgctcagtttagcaggtaaccctccagctgaggtgaatggaaaaacgcctaattgccctaagcaaattatgggatgtcccaggatttatgaccctgtgtgtgggactaacggaattacttaccccagtgaatgcagtctgtgctttgaaaacaggaaattcggaacatctatccacattcagaggagagggacttgctgaatgtcctgattttgaaatcttttagggctaccataatgtttagcaagaaggtttgctgaataaatgcatctgaacatattttgttcttcccaaagcttttgctcaaaggcatatatgagtatattgagaatagggatctgagaagaaaaccagagtagagcaagctttaccacttagttcttcatgctcatacttcaaaaattgcagatgatgacaacacatagttgagcatgaacatgtgtaatgaatagagtttgggttaggatgaagaaggtagcctatctgtgcacaagaaagaagtagactgacttggatctttcttaggggagtttaccaaaggaaagactgccttgtatatctacagtgtttcacttgtgagacaccacaactctgcagatttactcttgttctgtgaggaaacttagaagagtcaaattgtttgactaatagtccaacatacatgatgccagggtgttcttttagatcaagctgacctcttccttcatccatatgagcactccttcttttaaccacaatcttctcttgtggatcatgccttgactttcttcaatgggaatcctagataatattccctactgtaagatcttgcatgtctatattcagtgatagaatatagacgtgatataataggatataaccaaatgaattagaaacaaggaaatattctcaaaagggaaagtatcaacaactacttttaaaaaaggaatcattttaagatcctgagtttctaaagaaaatcttagtctaagatggaaagagagtaaagagctaacacaggtgagtctgggcaaggaaccctagtacagtggggttgggtcagcacctttgccagaaataaccaagctattcagaaatacactaggaaaggagagttgcctagtaacccacttctggtcatattcagtattcatgccttgaactgaactcttgctcctagaggatgctataactaacaaaccgagcaacttaaacagcctgacagctctcaccaaataccttgctatctcaagttatggatgcaagatggctcccagtgtctatctgtgattctagaggacacttgaagggcaccaacacttaacaaattctgtgggggtaaatttattttaatcactggatgctggaagacacacacagagacacaaacacacaaagagagacagagagagagaaagagagagagagaggtagagagagagagagagagagagagggagagagagggagagagagagtgttttgggttttgttgttgttgttgttgttgatttggaattatatcaagatataagataatctcaaatgtatctttagtagttctgctccctggacccatgagaagacaggaatgaggattctgtgcatgtggtacttacatttcaaaaggagtatctaataaactggaaactgcttaaaagaatgagactatcagcactgataagaatataaagcttcaagctatgaagagtgattcaaagaaggaaaagaattccctcagaactgggaggaccttttaaaaaattctgagtccccgtttctaaagtttcaccttcctaacttcatgtattttttaatagctcaaagagtccaattactgctgctcatatactcatgagtgtgacaccatgcactgttactgccaatatatgaaaggccatacccctaaagaaaattgacttaagaactccttgtttagggttgggtacttctgtgaccctcccacattcatgctggaatgttgactggcttcatttttataaggcaaaagatcttcccactctcttctgagagagaataaatcagttttgctcaatggagtgattctgagtatactaatcacgatcccaggacaggccccattctcacaagcagttagctaacacaaatagaactccatattttatagcagtttttatcttttgttcttggttttagttcttattttcaagacagagaaaaacacatgaagttggaagggtagaagtgggggggggcgtgggtctgggaggagttgggggatagagaaaaatataataaaaatatatgaaattctcgagaatgaataaat

SEQ ID NO: 3113 - DNA, 1638 bp, Rattus norvegicus
  Genbank Accession No. NM_012679
acccgcgtcaccaggaggagcgcactggagccaagccgcagacgggactccagactccaaagaggccacaccatgaagattctcctgctgtgtgtggcactgctgctgacctgggacaatggcatggtcctgggagagcaggagttctctgacaatgagctccaagaactgtccactcaaggaagtaggtatgttaataaggagattcagaacgccgtccagggggtgaagcacataaagaccctcatagaaaaaaccaacgcagagcgcaagtccctgctcaacagtttagaggaagccaagaagaagaaagagggtgctctagatgacaccagggattctgaaatgaagctgaaggctttcccggaagtgtgtaacgagaccatgatggccctctgggaagagtgtaagccctgcctgaagcacacctgcatgaagttctacgcacgcgtctgcaggagcggctcggggctggttggtcgccagctagaggagtttctgaaccagagctcacccttctacttctggatgaacggggaccgcatcgactccctgctggagagtgaccggcagcagagccaagtcctagatgctatgcaggacagcttcactcgggcgtctggcatcatagatacgcttttccaggaccggttcttcacccatgagccccaggacatccaccatttctcccccatgggcttcccacacaagcggcctcatttcttgtaccccaagtcccgcttggtccgcagcctcatgcctctctcccactacgggcctctgagcttccacaacatgttccagcctttctttgatatgatacaccaggctcaacaggccatggacgtccagctccatagcccagctttacagttcccggatgtggatttcttaaaagaaggtgaagatgacccgacagtgtgcaaggagatccgccataactccacaggatgcctgaagatgaagggccagtgtgagaagtgccaagagatcttgtctgtggactgttcgaccaacaatcctgcccaggctaacctgcgccaggagctaaacgactcgctccaggtggctgagaggctgacccagcagtacaacgagctgcttcattccctccagtccaagatgctcaacacctcatccctgctggaacagctgaacgaccagttcacgtgggtgtcccagctggctaacctcacacagggcgatgaccagtaccttcgggtctccacagtgacaacccattcttctgactcagaagtcccctctcgtgtcactgaggtggtggtgaagctgtttgactctgaccccatcacagtggtgttaccagaagaagtctccaaggataaccctaagtttatggacacagtggcagagaaagcgctacaggaataccgcaggaaaagccgcatggaatgagacagaagcatcagttttctatatgtaggagtctcaaggagggaatctcccagctttccgaggttgctgcagacccctagagaactccacatgtctccagcgcctaggcctccaccccagcagcctctccttcctctgggttctgtactctaatgcctgcacttgatgctctcgggaagaactgcttcccccacgcaactaatccaataaagccaccttgcg

SEQ ID NO: 3114 - DNA, 5573 bp, Rattus norvegicus
  Genbank Accession No. NM_012680
cgcgggagcagttctctaccaccgccctgcccaccatggccaaaccaactagcaaagattcaggtttgaaggagaagttcaagatactattaggactgggaacgtcaaggccaaatcctaggtgtgcagaaggcaaacagacggagtttatcatcacagcggaaatcttgagagaactgagtggtgaatgcggcctcaacaatcgaatccggatgatagggcagatctgtgatgtggcaaaaactaagaaacttgaagagcatgcagtggaggcactttggaaggctgtctcagacttgctacagccagagcggccaccggaggcccgacatgcagttctggccttgttgaaggccattgtgcagggacagggtgatcgtttgggggttctccgagccctcttcttcaaagtgatcaaggactatccttccaacgaagacctccatgaaaggctagaggtttttaaggccctcacagacaatggaaggcatattacctacttggaagaagaactggcagagtttgtcctgcagtggatggatgttggcttgtcctcagaattccttctggtactcgtgaacctggtcaagttcaacagctgctaccttgacgaatacattgcgccaatggttcacatgatttgtctgttatgtatccggacagtgtcctctgtggacatcgaggtgtccttgcaagtgctggatgctgtggtctgctacaactgcctgcctgctgagagcctgcctctgttcattatcaccctgtgccgcaccgtcaacgtcaaggagctgtgtgagccgtgctggaagctgatgcgaaaccttctaggtacccatctaggccacagtgccatttacaacatgtgccgtatcatggagaacagatcctacatggaagacgcccccttgttgaggggagccgtgttctttgttgggatggcgctctggggagctcaccgactctattcgctcaagaactcccccacatctgtgctgccgtctttttatgaggccatgacctgtcccaatgaggtggtgtcatatgagattgttctgtccataacaagactcatcaagaagtacaggaaggagctccaggctgtgacatgggacattctgctggacattattgaacgactgctccagcaactccagaacctggacagcccggaactcaggaccattgtccatgacctgctgaccactgtggaggagctgtgtgaccagaacgagttccacggatcgcaagaaagatactatgaactggtggagagctatgcagaccagaggcctgaatcctctctcttaaacctgataacctacagagcccagtctatccacccagccaaggatggctggatccagaacctgcagttgttgatggagaggttcttcaggaacgagtgccgcagtgccgtgcgcatcaaggtgctggacgtgctgtccttcgtgctcctcatcaacaggcagttctacgaggaggagctgattaactcggtggtcatctcacagctctcccacatccccgaggataaagaccatcaggttcgaaagctggctacccagctgctggtggacctggcagagggctgccacacccaccacttcaacagtctgttggacatcattgaaaaggtgatggctcgctccctttctccacccctggagctggaggaaagggatctggctgtgtactcggcctccctggaggatgtgaagacggcagtcctcgggctcctggtcatccttcagaccaagctgtataccttgcccgccagccatgccacacgagtgtatgagacactcattagccacatccagctccattacaagcatggctactccttgcccattgctagcagcatccggctgcaggcctttgacttcctgctgctactgcgggctgactcgctgcatcgactgggcctgcccaacaaggatggggtcgtgcgattcagcccttactgcctctgtgactgcgcggaactggacagggcctcagagaagaaagccagcggacccctttcaccgccaactgggccccccagccctgtgccaacgggccctgctgtgaggctcggccacctgccctactccctgcttttccgtgtcctgctgcagtgtttgaagcaggagaccgactggaaggtgctgaagctggtgctcagcaaactccctgagtcgctgcgctacaaagtcctcattttcacctccccctgcagtgttgaccagctgtcttctgctctctgctccatgctttcagccccgaagacccttgagcggctccgaggcaccccagaaggcttctccagaactgacttgcacttggctgtggtccctgtactgacagcgttaatatcttaccacaactatttggataagactagacagcgtgagatggtttactgcctagaacaaggccttatctaccgctgtgccagccagtgtgtggtagccttggccatctgcagtgtggagatgcccgacatcatcatcaaggcgctccctgtcctggtggtgaagctgacacacatctctgctacagctagcatggccatccccctcctggagttcctgtctaccttggccaggctgcctcacctctacaggaacttcgccgcagagcagtatgcaagtgtgtttgccatctccttgccctacaccaacccctccaagttcaaccagtacattgtgtgtctggcccatcacgtcatagccatgtggttcattaggtgccgactgccctttcggaaggattttgtcccttatatcactaagggtctgcgttccaatgtcctcctgtcctttgatgatacccctgagaaggacagtttcagagcacggagcaccagtcttaatgagagacccaaaagtttgaggatagccagagcccccaaacaaggcctgaataactctccacctgtgaaagaattcaaagagagctgtgcagccgaggccttccggtgccgcagcatcagtgtatctgaacatgtggtccgcagcagaatacagacatctcttaccagtgccagcttggggtctgcggatgagaactctatggcccaggctgatgacaacctgaagaatctccacttggaactcacagaaacatgtctggacatgatggcccgatatgtgttctccaacttcactgcggttcccaagaggtcccctgtgggagaattcctcctggcagggggcaggaccaaaacgtggctggttggaaataagctggtcactgtgacaacgagtgtgggaactggtacgcggtcgttgctgggcctggactccggggatctgcagggtggctcagcatcaagctctgatcctggcacacatgtgaggcagacaaaggaagcaccggccaaactggagtcccaggctgggcagcaggtgtcccgtggggcccgggaccgagtccgctccatgtcagggggccacggccttcgagttggtgtcctggacacttcagctccctacaccccaggaggccctgcttctctgggagcacaggcagcaccagcagcaaggcctgagaagccctgtgcaggagcccaacttccggcagcggagaaggcgaacctggcagcctatgtgcctttgctgacccagggctgggcagagatcctggtccgcaggcccacaggaaacaccagctggctgatgagcttggagaacccgctcagccccttttcctcagacatcaacaacatgcccctgcaagagctgtctaatgcccttatggctgctgagcgcttcaaggagcaccgggacacggccctatacaagtcattgtcagtgccagcggctggcacagccaagcctcctactctcccacgttctaacacagtggcttctttctcctccctgtaccagcccagctgccaaggacagctgcacaggagcgtttcctgggcagactcggccgtggttcttgaggagggaagtccaggagaggctcatgtgccagtggagccccccgaattggaggactttgaggcagcattaggtacagacaggcactgccagcggcctgacgcctacagcaggtcttcctcagcatctagccaggaagaaaagtcccacttggaggagctggctgcagggggtatccccattgagcgggccatctcctctgagggggctcggcctacagtggacctgtccttccaaccctcacagcctttgagcaagtctagctcttctcctgagttacagaccttacaggacatccttggagacctaggggacaagactgacattggacggctgagtcctgaggctaaggtccgatcccagtcggggatcctggatggggaagcagctacctggtcagctccgggtgaagagagccgtatcacagtcccacctgaaggtcccctgccttccagttctccccgctcccctagtggcctccggccccgaggctataccatctctgattcagctccatcacgaaggggaaagagggtagaaagggacaacttcaagagcagaactgcggcctccagtgctgaaaaggtgccaggcatcaaccctagctttgtgttcctacagctctaccattcacccttttttggtgatgagtccaataagcccatcctgttgcccaacgagtcctttgaacggtcagtgcagctccttgaccagatcccatcctatgacactcacaagattgctgtcctgtatgtgggagaaggccagagcagcagtgagctggccatcctatcaaatgagcatggctcttataggtacacagagtttctgacaggcctgggtcggcttattgagctgaaggactgccaaccagacaaggtgtacttaggtggactggatgtgtgtggcgaggatggacagttcacgtactgctggcatgatgacatcatgcaagctgttttccacattgctaccctgatgcccaccaaggatgtggacaagcaccgttgtgacaagaaacggcacctgggcaatgactttgtttctatcatctacaatgattctggtgaggacttcaagctgggcaccattaagggccagttcaacttcgtccatgtgatcatcacaccgctggactataaatgcaacctgttgaccctgcagtgcaggaaagacatggagggccttgtggacaccagtgtggccaagattgtgtctgaccgcaacctgtcctttgtggcccgacagatggccctgcatgcaaatatggcctcacaggtacaccacagccgatccaaccccacggacatctatccctccaagtggatcgcaagactccgccacattaagcgtctccgtcagcggatccgtgaagaagtgcactattcaaacccaagcttgcctctgatgcaccctccagcccataccaaagtcccagctcaagcccctacggaggctacacccacctacgagacaggccagcggaaacgcctcatttcctctgtggatgacttcacagagtttgtgtgaggccaccagagccacaactggagtcccgtggccatgcacctggcccttccctgaatgacacctcctgactgtactcttacatgaaataaaactgcccgtgcccatctg

SEQ ID NO: 3115 - DNA, 3912 bp, Rattus norvegicus
  Genbank Accession No. NM_012690
gcggccaacacgcgcgtgaagttcaggctgagatggatcttgaggcagcaagaaacggaacagcgcggcgcctggacggcgactttgaactaggcagcatcagcaaccagagcagagaaaaaaagaagaaagtgaatttaattggcccgttgacactgttccgatactctgattggcaggataaattgtttatgctcctgggcaccgccatggccatagctcacggatcaggtcttccccttatgatgatagtctttggagaaatgacagataagtttgtagataatgctgggaacttttccttgccagtgaatttttcattgtcaatgctaaatccaggaagaattctggaagaagaaatgactagatatgcatactactattcgggactaggtggtggagttcttttggctgcctatatccaagtctccttctggactttggcagctggccgacaaataaggaaaatcaggcaaaaattttttcacgccatccttcgacaagaaatgggctggtttgatatcaagggcaccaccgaactcaacacgcggctgacagatgacatctccaaaatcagtgaaggaattggtgacaaggttggaatgttctttcaagcaatagccacgttttttgcaggattcatagtggggttcatcagaggctggaaactcaccctcgtgatcatggccatcaccgccatcttggggctctctacagccgtttgggcaaagatactctcaacattcagtgacaaagaactagctgcctatgcaaaagcaggtgccgtggcggaagaggctctgggagccatcaggaccgtgatagctttcgggggccagaacaaagagctagaaaggtatcagaagcatttagaaaatgccaaaaagattggaattaaaaaggctatctcggccaacatctccatgggcattgcctttttgttaatatatgcatcctatgcactggccttctggtatggatccactctggttatatcaaaagaatatacaattggaaatgccatgacagtgttcttctcaatcctcattggggccttcagtgtggggcaggctgccccctgtattgatgctttccccaatgctagaggagcagcctatgtgatctttgacattattgataataatcctaaaattgacagtttttcagagagaggacacaagccagacagcatcaaaggaaatttggagttcagtgacgttcacttttcctacccatctcgggctaatatcaagatcttgaagggcctcaacctgaaggtgaagagcgggcagacggtagccctggttggcaacagtggctgtgggaaaagcacaactgtccagctgctgcagaggctctacgaccccacagagggtacgattagcatcgatgggcaggacatccggaactttaacgtcaggtgtctaagggaattcatcggcgtggtgagtcaagagccggtactgttctctaccacgattgctgaaaatatccgctatggccgtgggaatgtaacaatggatgagattaaaaaagctgtcaaagaggctaatgcctatgacttcatcatgaaactgccacagaaatttgacaccctggttggtgacagaggggcgcagctgagcgggggacagaaacagaggatcgccattgctcgtgccttggtccgcaaccccaagatcctcctgctggacgaggccacgtcagccttggacacagaaagcgaagctgaggtgcaggccgctctggataaggccagagaaggccggaccaccatcgtgatagctcaccgactgtcaactgtccggaatgcagatgtcatcgctgggtttgaggatggcgtcatcgtggagcaaggaagccacagtgagctgataaagaaggaagggatctacttcagacttgttaacatgcagacatcaggaagccagatcctgtcagaagaatttgaagttgagctaagtgatgaaaaggctgctggaggtgtggccccaaatggctggaaagcacgcatatttaggaattctacgaagaaaagtctgaaaagttcacgggcgcatcaaaataggctggatgtggaaaccaatgaacttgatgcaaacgtgccaccagtgtcttttctgaaggtcttaagactgaataaaacagagtggccctactttgtggtggggacactctgtgccattgccaacggggccctccagccggcattctccatcatcctgtcagagatgatagctatctttggccctggggatgacacagtaaagcaacagaagtgtaacatgttctcgctggtcttcttgggcctaggagtccactccttctttactttcttccttcagggtttcacattcgggaaagctggcgagatcctcaccacaaggctccggtccatggccttcaaagcaatgctaagacaggacatgagctggtttgacgatcataaaaacagtactggtgccctctctacaagactcgccacagacgctgcgcaggtccaaggagccacaggaaccaggttggctttaattgcacagaacacagccaaccttggaacgggtattattatatcatttatttacggttggcaactgacacttctgctcttatcagttgttccattcattgctgtagcgggaattgttgaaatgaaaatgttggctggcaacgccaagagagataaaaaggagatggaagctgctggaaagattgcaacagaggcaatagaaaatattcggactgttgtatccttgacccaagagagaaaatttgagtcaatgtatgttgaaaaattacacggaccttacaggaattcagtgcggaaggctcacatctacggcatcacttttagcatctcacaagcattcatgtacttttcttatgctggctgctttcgatttggttcttacctcattgtgaatggacacatgcgcttcaaggatgtcatcctggtgttctcagcaatcgtgcttggtgcagtggctctaggacatgccagctcatttgctccagactatgcaaaagccaagctgtctgcagcatacttattcagtctgtttgaaagacaacctctgattgacagctacagcagagaaggaatgtggccggataagtttgaaggaagcgtgacattcaatgaagttgtgttcaattatcccacccgggccaatgtgccagtgcttcaggggctgagcctcgaggtgaagaaggggcagaccctggccctggtgggcagtagtggctgcgggaagagcaccgtggtccagctgctcgagcgcttctacgaccccatggccggaacagtgctcctcgatggtcaggaagcaaagaaactcaatgtccagtggctccgagctcaacttggcattgtgtcccaggagcccatcctgtttgactgcagcatcgccaagaacatcgcctacggagacaacagccgtgtcgtgtctcaggatgagattgtgagggcggccaaggaggccaacatccaccccttcattgagacactgccccaaaagtatgaaacaagagtaggagacaaggggacacagctctctggaggccagaaacagaggattgctatcgcccgagccctcatcagacagcctcgggtcctactgctggatgaagccacgtcggctttggacactgagagtgaaaaggtcgtccaggaagcgctggacaaagccagggaaggccgcacctgcattgtgatcgcgcaccgcctgtccaccatccagaacgcagacttgatcgtggtgatcgacaacggcaaggtcaaggagcacggcacccaccagcagctgctggcccagaaaggcatctatttctccatggtcaacattcaagctggcacacagaacttatgaacttgttacagtatatttttaaaataaattccaatcgtttttt

SEQ ID NO: 3116 - DNA, 1687 bp, Rattus norvegicus
  Genbank Accession No. NM_012692
tcaatcctcactggccactatgctggacacaggactgcttctggtggtcatattggcctccctgagcgtcatgctcttggtgtccctctggcagcagaaaatcagggggagattgcctccaggacccactcctttgcctttcattggaaattatctgcagctgaatacaaaagacgtatacagttccatcacacagctcagtgagcgctatggtcctgtgttcaccatccaccttgggcctcgccgggttgtggtgctttatggatacgatgcagtcaaagaggctttggtggaccaagctgaggagttcagtggacgaggcgaacaggctacctacaatacactcttcaaaggctatggcgtggcattcagcagtggggagcgggcaaaacaactcaggcgcctctctatagccacattgagagattttggtgtgggcaagcgtggtgtagaggagcgtatcctggaggaggcaggctatttgatcaagatgttgcagggcacttgtggagcccccattgaccccaccatctacctgagcaaaacagtctccaatgttattagctccattgtcttcggggaacgcttcgactatgaggacacggagttcctgtcactgctgcagatgatgggtcaaatgaacagatttgcagcttcacccacagggcagctctatgacatgttccattcagtgatgaagtacctgcctggaccacagcaacagatcatcaaggttactcagaaactggaagacttcatgatagagaaagtgaggcagaaccatagtaccctggaccccaattccccaaggaacttcattgactcctttctcatccgcatgcaagaggagaaaaatggcaattcagagttccacatgaagaacctagtgatgacaacactaagcctcttctttgctgggtctgagacagtcagctccacactacgctacggcttccttctactcatgaagcatccagatgtggaggccaaggtccatgaggaaattgagcaggtgatcggcaggaaccgacagcctcagtatgaggaccacatgaagatgccctacacccaggctgtgatcaatgagatccaaagattttctaacttggctcccttgggcattcctcgaaggattatcaagaacacaaccttccgtggcttcttcctccccaaggccaccgatgtgttccctatattaggttctctgatgacagacccaaagttcttccctagccccaaagacttcgacccccagaacttcctggatgacaagggacagttgaagaaaaatgctgctttcctccctttctccactgggaagcgattctgcttgggagatggcctggctaagatggagctcttcctgctgctcaccactattttacagaacttccgtttcaagttcccaatgaaactagaagacatcaacgagtcccccaaacccttggggtttaccaggatcataccaaagtacaccatgagcttcatgcccatctgattctgagttgaatcaaggtggggcaagagggagagagagcctgaagtggggccagggtgcaggtggagagaacaggggaggtgaagatgagggttaagaagggaccacacccatggaagaaacacaaaagacttctcactttggtaaaattgtaacagtcctaataaaaagaaagaaatactcagtcgg

SEQ ID NO: 3117 - DNA, 2259 bp, Rattus norvegicus
  Genbank Accession No. NM_012693
ctggctactatgctggacacaggactgctcctggtggtcatactggcctccctaagtgtcatgttcttggtgtccctctggcagcagaaaatcagggagagattgcctccaggacccactcctttgcctttcattggaaattatctgcagctgaatatgaaagacgtatacagttccatcacacagctcagtgagcgctatggtcctgtgttcaccattcaccttgggcctcgacggattgttgtgctttatggatacgatgcagtcaaagaggctttggtggaccaagctgaggagttcagtggacgtggcgaactgcctacctttaatatactcttcaaaggctatggtttttcattgagcaatgtggaacaggccaagcgtatcaggcgcttcaccatagccacattgagagattttggtgtgggcaagcgtgatgtacaggagtgtatcctggaggaggcaggctatttgatcaagacgttgcagggcacttgtggagcccccattgacccttccatctacctgagcaaaacagtctccaatgtcattaactccattgtcttcgggaaccgcttcgactatgaggacaaagagttcttgtcactgttggagatgatcgatgaaatgaatatatttgcagcctcagccacagggcagctctatgacatgttccattcagtgatgaagtacctgcctggaccacagcaacagatcatcaaggttactcagaaactggaagacttcatgatagagaaagtgaggcagaaccatagtaccctggaccccaattccccaaggaacttcattgactcctttctcatccgcatgcaagaggagaaatatgttaattcagaattccacatgaacaacctagtgatgtcatcattaggcctcctctttgctgggactgggtcagtcagctccacgctataccatggtttcctgctactcatgaagcatccagatgtggaagccaaggtccatgaggaaattgagcgagtgatcggcaggaaccgacagcctcagtatgaggaccacatgaagatgccctacacccaggctgtgatcaatgagatccaaagattttctaacttggctcccttgggcattcctcgaaggattatcaagaacacaaccttccgtggcttcttcctccccaagggcaccgatgtattccctataataggttctctgatgacagaaccaaagttcttccctaaccacaaagacttcaacccccagcacttcctggatgacaagggacagttgaagaagaatgctgcatttctccctttttccattggaaagcgattctgcttgggagatagcctggctaaaatggagctcttcctgctgctcaccaccatcttgcagaacttccgttttaagttcccaatgaatctagaagacatcaacgagtaccccagtcccatagggtttaccaggatcataccaaattacaccatgagcttcatgcccatctgattctgagttgaatcaaggtggggcaagagggagggagagcctgaagtggggccagggtgcaggtggagagaacagagaagatgaagatgagggttaagaagggaccacacccatggaagaaacacaaaagacttctcagtttggtaaaattgtaacagtcctaataaaaagaaagaaacacccagtaggcagcagtaacaacaactgagactcatggggcaaaggtggctcacctctgcagaagctgtcctgcccttctctcactcagtcctctacacaagagcagcatgtccccaagcccaacgtacaggttcaaaagatagaacttaaaaaatttgaacctaaactgaggtggaaaagacacagttagctaggattgacacattggactctatcaccagcattcaggagggagggaacatggctccctaggaggcctgccagaattacaaagtgaaactcatctcaaaaaaggaacaacagaaaataaaatttcaaattgatttctcttagaccataagagtccagatctgtatccaaagctatttggttatattttttgttattgttgttttgtttacacattgtgtttttctttcggtttgtaagtctgtttgggatatttaatttacatttactgattagtgtgggtggtagggcataccatggctcaaatgtggaaaccaaagaaaagcttttggaagtgtcatctcccttacaatacgtgtgtccaagaactcaaattcagacaataaagcttgatagcaagca

SEQ ID NO: 3118 - DNA, 3404 bp, Rattus norvegicus
  Genbank Accession No. NM_012694
gaattcccgcaggagtcagtcgaagaagaaagaagcagagttccttgggctccggtctacccatgagtaagagcaaatgctccgtgggaccaatgtcttcagtggtggccccggctaaagagtccaatgctgtgggccccagagaggtggagctcatcctggtcaaggagcagaacggagtgcagctgaccaactccaccctcatcaacccgccacagacaccagtggaggctcaagagcgggagacctggagcaagaaaattgatttcctgctatcagtcatcggctttgctgtggacctggccaatgtctggaggtttccctacctgtgctacaaaaatggtggaggtgccttcctggtgccctacctgctcttcatggttattgctgggatgcccctcttctacatggagctggctctcggacagttcaacagagaaggagctgctggtgtctggaagatctgtcctgtcctgaaaggtgtgggcttcactgttatcctcatctctttctacgtgggcttcttctacaatgtcatcatcgcatgggcactgcactacttcttctcctccttcaccatggacctcccatggatccactgcaacaacacctggaatagccccaactgctccgatgcccatgccagcaactctagcgacggcctgggcctcaatgacacctttgggaccacacccgctgctgagtactttgagcgtggcgtgctgcaccttcaccagagccgtggcattgatgacctgggccctccacggtggcagctcacagcctgcctggtgctggtcattgttctgctctacttcagcctatggaagggagtaaagacctcagggaaggtggtgtggatcacagctaccatgccctatgtggtcctcacagccctgctcctgcgtggagttacccttcctggagccatggatggcatcagagcatacctcagtgtggacttctaccgactctgtgaggcatctgtgtggatcgatgctgccacccaggtgtgcttctccctcggcgttgggtttggagtgctgattgccttctccagttacaataaattcaccaataactgctatagagacgcaatcatcaccacctccattaactccctgacaagcttctcctctggcttcgtcgtcttctccttcctggggtatatggcacagaagcacaatgtgcccatcagagatgtggccacagatggacctgggctcatcttcatcatctatcctgaggcgatcgccacactcccgctgtcttctgcctgggctgctgtcttcttcctcatgctgctcactctgggtatcgacagtgcaatggggggcatggagtcagtgatcactgggctcgtcgatgagttccagctgctacatcggcatcgagagctcttcactcttggcattgtcctggctactttcctgctgtctctcttctgcgtcaccaacggtggcatctacgtcttcacactgctggaccactttgcagctggcacatctatcctctttggcgtgctcattgaagccattggggtggcctggttctacggcgtccagcaattcagtgatgacatcaagcaaatgacagggcagcgacccaacctgtactggcggctatgctggaagctggtcagcccctgcttcctcctgtatgtggtcgtggtcagcattgtgaccttcagacccccacactatggggcctacatcttcccagactgggccaatgccctgggctggatcatcgccacatcctccatggccatggtgcccatttatgcgacctacaagttctgcagcctgccggggtccttccgggagaaactggcctatgccatcacacctgagaaagaccatcagctagtggacagaggggaggtgcgccaattcacgctgcgtcactggctgttgctgtaaagtggaaggagacagctgccagctgggccacctcacaacagcggggacagggagatcgcaaaggaaacccacgagtcaagaaaggaaggagggccacttccatgcttctcctttgtcgtacggaaaaataatcgaagcatgggcttcaacctttgactgttcacacccaaatcattgccacaaagaagcctctgtctgtgtatggctgtaaaaacatacacctctacacagtgaggtcaacaatgtccctgtccctactgggtgggaaaaccctagctggtatcctgtccctgcaaggctgactcccccatctgtggtcactctgggagaacaggtcatactgccccctgaattctagaaggaccttggtacctgtacatacactgtgccagaatccttgtgctcacagtagttgcctaaaccaattctgttgcttacatttacagtgtcaagtatcctattttgctgttggtagaaaagacagttaatacatgccaagtcctttcctggtgcttggctccgagcagacaccttagcattctgttcacacattacacacacacacacacacacacacacacacacacacacacacacacacacggtctgttctgagccacggaggacaagggacttggtgcaagtgaccagagattatgtttttcctttatagatgagataaataaaattcgtgaaataaggttgggagacacaccctacccctggcccctggaaggcctggtcagcttgcagccactttagtatggacttgtaggccacataaaaagtgtactcttcatagtcagtgtgtcctcaccttctggacacctgctctgcacagggtctcgagataacttgaagaccatattcttggcctagagccctacctggtcttcaaggaaagacacccactgtagggtttgatttcctactggctcctgtcacatcaatggacattatccatgttataaatgactttttaaaaccatatttatgtgtgaatcgaacttactctcaaaatgcaaggttagtttgttcaaatccatttgctgaagagtaattagtgtaagaggaaggtatgccaagaatcaccttcttcccggagcactggctttagttcctggagtgaaaagtggatgtcatgattttccttgagctaataaatgcaaactttggcctggcctgtgtcctatataagtggcaccatgtgtctccctgagagagagtcaaccttagtattctctgcaagtatacattggcacgagggtgttaaatgtgctaccagggtgttaaatgcaggcctgttggctttgagactgtagtatggcagagaaggctccggtttaccatctctcagaggagtggctccatgtagacatccaggtgttgtaagcatctgttttttgtgtctatagccagtaccttgtgtgggttcttacaaacaataaaagaaatatatgttggaaaaaaaaaaaggaattc

SEQ ID NO: 3119 - DNA, 1000 bp, Rattus norvegicus
  Genbank Accession No. NM_012695
ctggaatcctaacaggacctacacagagctatttataatgccagactatacttggtttgaaggaataccttttcctgcctttgggattccaaaagaaactttgcaaaatgtttgtaataagtttgtggtgaaagaagaagatttgatcttattgacttatcccaagtcaggaacaaactggctgattgaaattgtctgcttgattcagaccaagggagatcccaagtggatccaatctgtgaccatctgggatcgctcaccctggatagagactgatttaggatatgatatgttaatcaaaaagaaaggaccacgactcataacctcccatcttcccatgcatcttttctccaagtctctcttcagttccaaggccaaggtgatctatctcatcagaaatcccagagatgttcttgtttctggttattatttctggggtaagacaactcttgcgaagaagccagactcactgggaacgtatgttgaatggttcctcaaaggatatgttccgtatggatcatggtttgagcacatccgtgcctggctgtctatgcgagaattagacaacttcttgttactgtactatgaagacatgaaaaaggatacaatgggaaccataaagaagatatgtgacttcctagggaaaaaattagagccagatgagctggatttggtcctcaagtacagttccttccaagtcatgaaagaaaacaacatgtccaattataatctcatggagaaggaactgattcttcctggttttactttcatgagaaacggcactactggggactggaagaatcacttcactgtagcccaagctgaagcctttgataaagtgtttcaggagaaaatggccggtttccctccagggatgttcccatgggattaaaatttcaaaagttttaaatattttatgaacattgatttttatgtttctgttgttctatgtctgaataagtgaatgtggtcattgaataaattctattctggcattgtg

SEQ ID NO: 3120 - DNA, 1417 bp, Rattus norvegicus
  Genbank Accession No. NM_012696
agagggaacctttaatcatgaagctaattactatcctgctcctctgctccaggctcctgccaagtttagcgcaggaagaaggcgcccaggaattgaactgcaatgatgagactgtatttcaggctgtggatactgctctgaagaaatataacgctgagttagaaagcggcaaccagtttgtgttgtaccgagtgactaagggcactaagaaggatggcgctgaaacattgtattccttcaagtatcaaatcaaggagggcaactgctctgttcagagtggcctcacctggcaggactgtgacttcaaggacgctgaggaagccgctactggcgaatgcacaacaactttggggaagaaagaaaataaattctccgtagccacccagatctgcaatattactccaggtaagggtcctaagaagacagaggaggacctctgtgtcgggtgtttccaacccataccgatggatagctcagacctgaagcctgttctgaaacacgctgtggagcattccaacaacaacacgaagcacacccacctctttgctctcagagaagtaaagagtgcccactcacaggtggtggctggcatgaattataaaattatctactccattgtgcaaacaaattgttcaaaggaggattttccttccctccgtgaagactgtgtaccccttccctatggcgatcatggtgagtgtacgggtcatacccacgtggatattcataacacaattgccggcttctcacagagctgtgacctttatccaggagatgatttgtttgaactacttcccaagaattgccgtggctgccccagggagatacctgtagacagcccggagctgaaggaggcacttggtcattccattgcacagcttaatgcacagcataaccatattttctatttcaagattgacaccgtgaaaaaggcaacatcacaggtggttgctggagtaatatatgtgattgagttcatagccagagaaactaactgttccaagcaaagtaaaacagaactgacagcggattgtgagaccaaacacctcggtcaaagcctcaactgcaatgctaacgtgtacatgagaccttgggagaacaaagtcgtcccgactgtcagatgccaagcactagatatgatgatttctaggcctccaggattttcacctttccggctggtgcgagtacaagaaactaaagaaggaacaactaggctcctaaactcatgtgagtacaagggcagactctcaaaggcaagggcaggcccagcacctgaccatcaggcagaagcttcaaccgtgacatcatagcctggcaaagacccggagtggaaggaccagaagactcctgggatgtgtgcagtatggaagcatgtttcttcatcacctgatcctgggtgaaataaagttcagactcg

SEQ ID NO: 3121 - DNA, 1936 bp, Rattus norvegicus
  Genbank Accession No. NM_012699
gccagtagtgagcgggccgaacaggacgaaggttgctcggctgttagaggcgaggtcggagcgtgtgcggcgagggtgagggagccggagccggagccggagccggagccggagccgggccgccgcggtttggagaagctgcgtcggggcgcacgggttattagaaatggcaactccacagtcagttttcgtctttgccatctgcattctaatgataacagaattaatcctggcctcaaaaaactactatgatatcttaggtgtgccaaagtcagcctcagagagacaaatcaaaaaggcctttcacaaattagccatgaagtaccaccctgataaaaataaaagccctgatgctgaagcaaaattcagagagattgcagaagcatatgaaacactctcggatgccaatagacggaaagagtatgatataattggacacagtgcttttactaatggcaaaggacaaagaagcaatggaagtccttttgagcagtcatttaacttcaattttgatgacttatttaaagactttaatttgtttggtcagaaccagaacactcggtctaagaagcattttgaaaatcacttccagacacgccaggatggttccagtagacaaaggcatcacttccaggagttttcttttggaggtggattgtttgatgatatgtttgaagacatggagaagatgttttcttttagtggctttgatagcaccaatcgacgcacagtacagactgaaaatagatttcatggatccagcaagcactgcaggaccgtcactcagcggagagggaatatggttactacgtacaccgactgttcaggacagtagttggatcttttcctgtgtccactaagcccacctagtttactcttcctcactatgtctgatgaaaaaagttttctgtgaactagtttggcatgatttcacttatgttaagcagtttgttattaggtatttcatatattgaaatttttttttttttttttaacaaaacacattcagctagtaaacaattctaattttcctgattaggaaaagttcttttgaaagatcatttgaaagatagattttcctctttacctgtcctttggctcattaatttgcccctccctcccccaacaaaaaaagaaaatcccaaacaactcagttagccccaacatacttaatgattaaataatgattaaattttaagttatcatagatttgcattgtatgaacttgaataatatttgcagtgaaacctctgggaacttaaaactacacagcctatggtccctgtaactcgggctactaaatgtatatgaagctgtaattgagtcatttagtgaagaccaccattgtttttggctctttgccactgaaagctttagaaagtgatggtttgatgtctatcacagaaagattcctcttctacaggagaattggtgtgatggggatgattgtattgcacgtagttaagctgaagaaagtttaaaatttataaactattgccaagaaattgtgttttagtaatgggctaatgattttgtatgatcaaaatcatagctttgtaaacttctttttgaatatttttgtttgttgactttctaggtcttcgtatgaatttgttttttgtttttggtgtgtgtgtgtgtagttactctgttgcacttatctttatctagagattgactaatacctcattctttttgtaaaagcagccagtaatttctgtgcaaccttactatgtgcaatatttttaaattttaagaaacgtgtgcttcttttgttgttagagttatttctttagttctgcacttttccatgttatactccatatgagtattaatcctatggatgcatatgaaaactagtaatgtctcatacaatattgtgtgtgagtgagagaaactataaatatttacaacctgaaaaaaaaaaaaaaaaaaa

SEQ ID NO: 3122 - DNA, 453 bp, Rattus norvegicus
  Genbank Accession No. NM_012703
atgcaagtgctaacgaaacgctaccccaagaattgcctgctgaaggtcatggatcggtactcggctgtggtgcggaacatggagcaagtggtgatgatccccagccttctgagggatgtggagctgatggggtacggaggctcggtccaggacggagcccccgatctctatacctacttcaccatgctcaagagcatctgtgtagaagtagaccacgggctgctgccgcgggaggaatggcaggccaaggtggcaggcaatgaaggcagtgaggctgagaatgaggctgctgaaacagaggaggctgaggaagacaggctttcggaggagctggacctagaagcccagttccacctgcacttctccagcctccatcacatccttacccacctgacccagaaagcacaggaggtgacgcagaaataccaggaaatgacggggcaggtcctgtag

SEQ ID NO: 3123 - DNA, 880 bp, Rattus norvegicus
  Genbank Accession No. NM_012708
gatctccgcactgctaggatgctgcaagccggagcacctaccgccggctctttccggacgggagaagtccacaccgggacaaccatcatggctgtggaatttgacgggggtgtcgtggtgggctctgattcccgagtgtcagcgggagcagccgtagtgaaccgcgtgtttgacaagctctcccctctgcaccagcgcatctactgtgccctctcgggttccgctgctgatgcccaagccatagccgacatggccgcctaccagctggagctgcacgggttggaactggaggagccgccccttgttctggctgctgcaaacatagtgaagaacatctcctacaagtaccgcgaggacttgttagcgcatctcatggtagctggttgggaccaacatgaggggggccaggtgtatggaaccatgggagggatgctaattcgacagccctttgcgatcggcggttccggaagcacctatatttacggttatgtggacgcagcttataaaccaggcatgacccccgaggagtgccggcgtttcaccacagacgccatcactctggccatgaaccgagatggctccagtgggggtgtcatctacctggtcaccattacagctgatggtgtggaccatcgcgtcatcctgggagacgagctgccaaaattctacgatgagtgaagtcccttctttgtttgcaataaactttatggagccagaggttggtgtaatgggcagaggtgaaatgggtatcagagaaacggagtgcgtggagggaagcttcctcccggccgagagatcagcaagcacctcccattcttttttaaaaaataaactttattattaaaataaaaaactcttataaataaaaaataagtaaaac

SEQ ID NO: 3124 - DNA, 2599 bp, Rattus norvegicus
  Genbank Accession No. NM_012713
gaattccgcctctccgggcttacagcccgcggtcccgccgccccggggccgccacctctcggggctccccccagtccccgcgcgcgcaagatggctgacccggctgcggggccgccgccgagcgagggcgaggagagcacggtgcgcttcgcccgcaaagggcccctccggcagaagaacgtgcacgaggtgaagaaccacaaattcaccgcccgcttcttcaagcagcccaccttctgcagccactgcaccgacttcatttggggcttcgggaagcagggattccagtgtcaagtctgctgctttgttgtacacaagcgctgccatgaattcgtcacgttctcctgccctggtgcagacaagggcccggcctctgatgacccacggagcaaacacaagtttaagatccacacctactccagccctaccttctgtgaccactgtggatcactgctgtatgggctcatccaccaggggatgaaatgcgacacctgtatgatgaatgtccacaagcgctgcgtgatgaacgtccccagcctctgtggcaccgaccacacagaacgccgtggccgcatctacatccaggcccacatcgacagggaggtcctcatcgttgttgtaagagatgctaaaaatctggtacctatggaccccaacggcttgtcagatccctacgtaaaactgaaactgatccctgatcccaaaagtgagagcaagcagaagaccaagactatcaaatgctccctcaacccggagtggaacgaaaccttcagatttcagctgaaggaatcagacaaagacagaagactgtccgtagagatctgggattgggacctgaccagcaggaatgacttcatgggatctctgtcgtttgggatttcagaactacagaaagccggagtggatggctggttcaagttactaagccaggaagaaggcgagtactttaatgtgccggtgccgccggaagaaagcgagggcaatgaagagctgcggcagaagtttgagagagccaagattggccaaggtaccaaggctccagaagaaaagacagcgaacactatatccaaatttgacaacaatggcaacagggaccggatgaaactgaccgattttaacttcctgatggtgctggggaaaggcagctttggcaaggtcatgctctcagagcggaagggtacagatgaactctatgccgtgaagatcctgaagaaagatgtggtgatccaagatgacgatgtggagtgcacaatggtggagaagagggtgctggccctgcctgggaagcccccattcctgactcagctccattcctgcttccagaccatggaccgcctctactttgtgatggagtatgtgaacgggggcgacctcatgtaccacatccaacaagttggccgtttcaaggagccccatgctgtattttacgctgcagagattgccatcggtcttttcttcttgcagagcaagggcatcatttaccgtgacctgaaacttgacaacgtgatgctggattccgaggggcacatcaaaatcgctgactttggcatgtgtaaagagaatatctgggatggggtgacaaccaagacattctgtggcactccagactacattgccccagagatcattgcttatcagccctacggaaagtctgtggactggtgggcgtttggagtcctgctgtatgaaatgttggctggccaggcaccttttgaaggggaggatgaggatgaactcttccagtcaatcatggagcacaacgtggcgtatcccaagtccatgtctaaggaagctgtggcaatctgcaaagggctaatgaccaaacacccaggcaagcgcctgggttgtgggcctgaaggggaacgagacattaaggagcatgcatttttccggtatatcgactgggagaaactcgaacgcaaggagattcagccaccttataaaccaaaagctagagacaagcgagacacctccaacttcgacaaagagttcaccaggcagcctgtggaactgactcccactgacaaactcttcatcatgaacttggaccaaaatgaatttgctggcttctcgtatactaacccagagtttgtcattaatgtgtaggtgaatgcagattccatcgctgagcctgtgtgtaaggctgcagcgtgaatgtctattatcaattccagtcttccaggattcatggtgcctctgttggcatccgtcatgtggagagcttgtcttagagggcttttctttgtatgtatagcttgctagtttgttttctacatttcaaaatgtttagtttagaataagtgcattgcccactgatagaggtacaattttccagacttccagaaactcatccaatgaaccaacagtgtcaaaacttaactgtgtccgataccaaaatgcttcagtatttgtaatttttaaagtcagatgctgatgttcctggtcaaagtttttacagttactctcgaatatctcctttgaatgctacctaagcatgaccggtatttttaaaagttgtgagtaagctttgcagttactgtgaactcttgtctcttggaggaactttttgtttaagaattggtatgattaaactgaattc

SEQ ID NO: 3125 - DNA, 3320 bp, Rattus norvegicus
  Genbank Accession No. NM_012716
gaattcggcacgagctgcgaagtgactggtcggtcgtgtaggtgctgcagccaacgagcccggtggcgggcaagggacacgagcaggacccccggctccgaagaattgcggcccgcgccgccgcgtcacgcacactctgggcgccgcgagatacacataacgatactaggttttcgccgcatcttggaattcatcgacacctaagatgccacctgcgattggcgggccagtggggtacacccccccagatggaggctggggctgggcggtggtagttggagccttcatttctattggcttctcctatgcatttcccaaatccatcactgtcttctttaaagagattgaaattatattcagtgcaacgaccagtgaagtgtcatggatatcgtccatcatgctggctgtcatgtatgccggaggtcctatcagcagtatcttggtgaataaatatggcagccgtccagtaatgattgctggtggctgcctgtctggctgtggcttgattgcagcttctttctgtaacacggtgcaggaactttacttctgcattggtgtcattggaggtcttgggcttgctttcaacttgaacccagctctgactatgattggcaagtatttctacaagaagcgaccattggccaatggcctggctatggcaggcagcccagtgttcctctctaccctggctccacttaatcaggctttctttggtatttttggctggagaggaagcttcctaattcttgggggcctcctcctcaactgttgtgtagctggatccctgatgcgaccaatagggcctcagcaaggcaaggtggaaaaactcaagtccaaagagtctctccaggaagctgggaagtctgatgcaaatacagatctcattggaggaagtcccaaaggagaaaagctgtcagtcttccaaacagttaataaattcctggacttgtccctgtttacccatagaggctttttgctgtacctgtctggaaatgtggtcatgttctttgggctctttacccctttggtctttcttagtaattatggtaagagtaagcatttttccagtgagaagtcagccttcctcctttccattttggcttttgttgatatggtggccagaccgtccatgggtcttgcagccaacaccaggtggatcagacctcgagtccagtacttttttgctgcttctgttgttgcgaatggagtgtgccatttgctggcacctttgtctacgacctatgttgggttctgcatctacgcgggagtctttggatttgcctttggttggctcagctccgtattgtttgagacgttgatggacctcgttggaccccagaggttctccagtgctgtgggcttggtgaccattgtggaatgttgtcctgtcctcctgggaccaccacttttaggccgcctcaatgacatgtatggagactacaaatacacatactgggcttgtggcgtgatcctcatcatcgcaggcctctacctcttcattggtatgggcatcaattatcgacttgtggccaaagaacagaaagcggaggaaaagaagagggacggtaaagaggacgagaccagcactgatgttgatgagaagcccaagaagacaatgaaagaaacacagtcgccagcgccactgcagaacagctctggagaccccgcggaggaggagagcccagtctgacctgtggagcatgaagagagcaggtgtgacccgagacatccgaaaccattctgctggcccctagtctaccagtggtgccccgtgcagacagtggacaattgtgtggaaaacccaccagggtgttcattggtgggatttttttttttcactccttaccaatgcctggatttaaaatatactctgctttaggtagggagtggttgacaaagaatatggggaagaagcagtgatctgtttgtttgtttgtttgtttgtttgtttgtttgttttaatcttagcttttaacagtgtcatgaagattataatatgtgccttaagttttagtttttagaactctttagagagccttaacttttaaaaccattctgctgaattcatctgtttaaaacgtcattttaagaggaaaaataacaactagcttgcttgaggtaactaaccttaatcttgttttgttgttgttgtaatgctttgtcagacagacattgttaccggaacatttatgaatagaaatactgcttaaaggtcacaggtttataaaatactgagctaaagtatttttctagcattatagttgcctggtacatctgctgctaggtatatatttgagaaatttgaagcataaaattctggatcttggcagttccagccacagcctgtcacctgctgggcacctcttctggaatgctcactacagtctagtgctaaggtgttgccactgaattgatacctttgctcctattcagagacactgtgtggttagaagtaattggccatttttgaaatcaaatgcaaaaagttagtattaaaatctacaaaacaattccttaacacgtctgatttaatgtaaacagtatttcaagcatcagctgaattcagcgtaggttgtcccaaaaccttagttatggtgtgatactctgggtatgtgtgggtttgaggggctgtgagtgaggtcttggttcttaggattgacccagggccatgagcatgcgaagtacatgctgtacggccgagccacaacccacaggcaccctggagtcctcctagtccctgagaccttttctctgatttttgatagctcatttatttactgatagtttagagctgtatgtgagatatccagtacagggtgaatgtatgcgctctttgttttttacattgttttcagtatttgcaaaaccgagagggtcagtgtttggcctcagggaagccaataaagataaaatagggtggaagtttgcagactttcagtaagtacccacctcccgccacacacaccagacttacaggggaacttctatcatgcttacgattatttgacgcagtcttacctccacatcttaactttcacgaccctttcacttacctgacatgtagaaaaatgggtttaatatatggataggaggaaagatggaccagattggaattacagtgggttttttttttttaaacctgatgttttctgaatagaggcagaaaaaataagacatatgacactgaattggacgatgcatttaaaataccattgtaatgacagggtgaatacagatttacaaccttgtgtaagaagctgactttttccaaataaaacatttattttatttttagaaaaaaaaaaaaaaaaaaactcgag

SEQ ID NO: 3126 - DNA, 3442 bp, Rattus norvegicus
  Genbank Accession No. NM_012720
agggaacctttcacagcagccaatacctgcagggcaacaaagaatcaaatgagagcgagacaagctgggaatgaagtcctggttgccagatgggagcttgaaaacacagtaagatgagtcaaaaagtggccaaggagggccccaggctctccaagaaccagaagttctcagagcacttcagcatccactgctgcccacccttcaccttcctcaactccaagcgtgagatcgtggaccgcaagtacagcatctgcaagagcggttgcttttaccagaagaaggaggaggactggatctgctgtgcctgccagaagaccagattgagaaggaggagcaggtcaaccccaagaaaaaagtgaccgagaagggacttctcgtgaatggacagcctctgcttgtggatttactgcttcaccgcaacccatctgccctcagacttatctggcctcgagtatgacgcaggggtggacacctgctgatgtaacaactacagatgccctcagtccccatggtgtgggagccttagggcagcctgcctggaggtgaggagggagctcttcatgccttactctagccacagagtcctggaaggacccctcgggctccagagctcagggaatgggtcttttggtttcatctggagcccttttctctctggcaggtgcacagttcctcagggtctttggcaaaggtgattacagagtcaatccacacacattcctcctccttccaattcccctctctccctgggtcaggttgacaacctggctctttttcctttccttcctaattctctgcctggcctctcttgatcacgtgacatctgtctcccattgaccttcttaatcaggagtggtcagagccaacgtccacactggtgaaggctcaggttatttttggagtaagatacagagttgctgtatgatccttaaatgcagcaatgttctcataagaatgggatcccgttaaatcttcacgtcaactgtaggtaacttgtgtcagaaacagagaaaagggggcatcttcctccctccccctctgcaggcccagtctccagcgttacacagggctttgtgagcaccagctcctgccccagtctggggataacaaccctctaaacactgactttgacttgtccccagtgcagttggcactcagcctcacagactctcagtgcagctctgactgctctcaattatataatttaggaaggtcatgtggcttcagccctgtcccccattccccatcacctcccttgaggcatcctggacaagtcccatgtgcacttgtataggtctagaaagaatgcttggagagtttctgtctccaggtcaaaattcctcaaattcctgggaagggcagaggcttgatgctccagtgttttccgtggctgaccctccacatctgggtctgtggtaagggagaagtcaagaaaaaggggaaaggaacttgactttctataaaggaaggtagtgtgtgtgtgtgtgtgtgtgtgtgtgtgtgtgtgtgtgtgtgtgtgtgtacgtgtgcacatgtgtgtgttagagagctagcaatccaagagtccttcccagactaggaggccaatccatggtatgaaggagtttgtgctcaactgtctatgtggagcagggttgggctgagtttctgtctccttgctctagtttgcctccacgatctgtagctcagactcttgggaaagaatgagcttcggtatggacacttgttctagaccataggagccaaccctcccccatggcacttgcttgtacctcatctgcactcttgctgtgaggacagagattgggccagatgtaaccgccttgtactgccttgtactcgtgtggactggcgtgtgggtgtcggcgttgggattagcttggggagatatttgccagctctcggttttcttgcccaagtgcagatgctagagagcccctccaagtcccaacttaattcttgcctccctgaagacctcaaccgtagaaggtcatcatgaaaaggccaccacttcagagtcctggcctaaactcagagtccacatgccttcccagcaggggccacagaggtgatccacttgggcctctttccccactcagcccagatgggtgggggtggagggtggagggtggaaggagaggagttggagaaaatccatgtctattcaggctccgtctgggtctgctgcacaacaacttcagcttgtttgagcccaaacttacataagttataatcacaaagctggaactagagaaagagagaaggacacacacacacacacacacacacacacacacacatacacacacactcatatatacacatacacacatatacacatatatacacatacacacgcatacacacatacacacatatacacacatacataacacacatacacatgcatacacacactcatatatacacatacacacatatacacatatatatacgcatacacacatacacacatatacacacatacataacacacatacacatgcatacacacacacacacacacacacacacacacacacacacacacaccctcgtcactcctcatccctcctaacattttctccttaggaggctagtagaagggaaggaagccgtttctatttacaaggaagtccggctcacggcccgggagatgactgccttgcaggcatgggggatagagttcggatccccgtgacccacgtgaaggctgggtaggcctggcagtggacctctaaatccaaactcagaaagtggagacaggagatgccagagcaagtcaagaggccatatccatgaactctgggactgatggagaaacccttccttcctccagtgaatatgattagaagacataggctgactcccagtgtcaaactcagggactccatgcacacacacccctgcatgctcctgcacatacacttgcaaacatgagcacacacacttcatacatccacatggaaatgggggtaagagaaacgagagagtacctggctcatggttcctctaggatgggcccaccctgcccaggacttagaagccctttccacacctagcaggaccacacgatttcttctgcctgttctctctcttgtacgtgtgaacaaacgggatgtgtcatccaccatggggctgtgtgcgcactcctagggcctcttgtgctctgacctccctgtcctacatggatgccctcggctcaaatatcaccccagagattcttccacggtcaccgactccgtcattctagtttgtcttcaggaatcatcactcacttgtttaattattgtttaattctcgctccaatgctttgcttaatgtaaatcccatggctgcccctttgatttctcctgtcttcccttgtctggcactaacaagacgtcaataaattcttgccgactgaaaaaaaaaaaaaaaaaaaaaaaaaaaaaaaaaaaaa

SEQ ID NO: 3127 - DNA, 2583 bp, Rattus norvegicus
  Genbank Accession No. NM_012725
atggactgtattgacaggtcaaacagaagacactgatgccagaagcccagtgtcaacactggagccaagcagagaccaacctcagtgccatattcggagagcttgaagactagcttcatgtgaagactccttctcctccagcagcacaaagcaaccatccttccaggatgattttattcaaacaagtgggttattttgtttccttgttcgctacagtttcctgtgggtgtctgtcacaactgtatgcaaataccttcttcagaggtggggatctggctgccatctacaccccggatgcccagcactgtcagaagatgtgcacgtttcaccctaggtgcctgctcttcagcttccttgccgtgagtccaaccaaggagacagataaaaggtttgggtgcttcatgaaagagagcattacagggactttgccaagaatacaccggacaggggccatttctggtcattctttaaaacagtgtggccatcaattaagtgcttgccaccaagacatatacgaaggactggatatgagagggtccaactttaatatatctaagactgacagtattgaagaatgccagaaactgtgcacaaataatattcactgccaatttttcacatatgctacaaaagcatttcacagaccagagtacaggaagagttgcctgctgaagcgcagttcaagtggaacgcccaccagtataaagccagtggacaacctggtgtctggattctcactgaagtcctgtgctctctcagagatcggttgccccatggatattttccagcactttgcctttgcagacctgaatgtaagccaggtcgtcacccccgatgccttcgtgtgtcgcaccgtttgcaccttccatcccaactgcctcttcttcacattctacacgaatgagtgggagacggaatcacagaggaatgtttgttttcttaagacatctaaaagtggaagaccaagtccccctattattcaagaaaatgctgtatctggatacagtctcttcacctgcagaaaagctcgccctgaaccctgccatttcaagatttactctggagttgccttcgaaggggaagaactgaacgcgaccttcgtgcagggagcagatgcgtgccaagagacctgtacaaagaccatccgctgtcagttttttacttactcattgcttccccaagactgcaaggcagaggggtgtaaatgttccttaaggttatccacggatggctctccaactaggatcacctatgaggcacaggggagctctggttattctctgagactgtgtaaagttgtggagagctctgactgtacgacaaaaataaatgcacgtattgtgggaggaacaaactcttctttaggagagtggccatggcaggtcagcctgcaagtgaagttggtttctcagaaccatatgtgtggagggtccatcattggacgccaatggatactgacggctgcccattgctttgatgggattccctatccagacgtgtggcgtatatatggcgggattcttaatctgtcagagattacaaacaaaacgcctttctcaagtataaaggagcttattattcatcagaaatacaaaatgtcagaaggcagttacgatattgccttaataaagcttcagacaccgttgaattatactgaattccaaaaaccaatatgcctgccttccaaagctgacacaaatacaatttataccaactgctgggtgactggatggggctacacaaaggaacgaggtgagacccaaaatattctacaaaaggcaactattcccttggtaccaaatgaagaatgccagaaaaaatatagagattatgttataaccaagcagatgatctgtgctggctacaaagaaggtggaatagatgcttgtaagggagattccggtggccccttagtttgcaaacatagtggaaggtggcagttggtgggtatcaccagctggggtgaaggctgtgcccgcaaggagcaaccaggagtctacaccaaagttgctgagtacattgactggatattggagaagatacagagcagcaaggaaagagctctggagacatctccagcatgaggaggctgggtactgacggggaagagcccagctggcaccagctttaccacctgccctcaagtcctactagagctccagagttctcttctgcaaaatgtcgatagtggtgtctacctcgcatccttaccataggattaaaagtccaaatgtagacacagttgctaaagacagcgccatgctcaagcgtgcttcctgccttgagcaacaggaacgccaatgagaactatccaaagattaccaagcctgtttggaaataaaatggtcaagggattttattaggtagtgaaattaggtagttgtccttggaaccatcctcatgtaactgttgactctggacctcagcagatcacagttaccttctgtccacttttgacatttgtgtactggaacctgatgctgttcttccacttggagcaaagaactgagaaacctggttctatccattgggaaaaagagatctttgtaacatttcctttacaataaaaagatgttctacttg

SEQ ID NO: 3128 - DNA, 1698 bp, Rattus norvegicus
  Genbank Accession No. NM_012730
ccttaaaagggggtaaagctgcactttaagggaccaggttcccagtctgttgtaagaggatctttcctgattctaagtgtctggacaagtattccttcaaaagcctgcaagccgtggggcagccatggggctgctgattggagatgacctctgggctgtggtcatattcacagccatcttcttgcttctggtggacctggtgcaccggcacaaattctggactgcccactaccctcccggccctgtgccactccctgggctgggaaacctgctgcaggtggactttgagaacatgccatatagcttatacaagcttcgaagccgctatggtgacgtgttcagcctacagatagcctggaagcctgtagttgtgatcaacgggctgaaggccgtgcgggaactgctggtgacctatggagaggacactgctgaccgccccctactgcccatctataatcacctgggctatggggacaaatcaaaaggtgtggtccttgcaccttacggacctgagtggcgagagcagagacgattctctgtgtccaccctgcgtgacttcggcgtgggcaagaaatcgctggagcagtgggtgacagaggaggccggccacctctgtgacaccttcgccaaggaggctgaacatcccttcaatcccagcatcctcctgagtaaggctgtgagcaacgtgattgcctcccttgtttatgctcgtcgatttgagtatgaggaccctttcttcaacaggatgctcaaaacattgaaggagagctttggagaggacaccggcttcatggcagaggtgctgaacgcaatcccaattctccttcagattcctgggctgcctggcaaagtcttccccaagctcaattcatttatagccttagtggataagatgttaattgagcacaagaaaagctgggatcctgcccagccgccccgagacatgactgatgccttcctagcagagatgcaaaaggccaaggggaatcctgagagcagcttcaatgatgaaaatctgcgcttggtggtgattgacctgttcatggcggggatggtgaccacctcaaccacactgtcctgggcccttctgctcatgatcctgcatccagatgtgcagcgccgagtccacgaggagattgatgaggtcatagggcaggtgcgtcgtccagagatggcagaccaggcacgaatgccgttcaccaatgctgtcatccatgaggtgcagcgctttgcagacatcgtcccgacaaatataccacatatgacatcccgagacattaaattccaaggcttcctcatccccaaggggacaaccctcatccccaacctgtcctccgtgctgaaggatgagactgtctgggagaagcccctccgcttccatccagaacacttcctggatgcccagggcaactttgtgaagcatgaggccttcatgccattctcagcaggccgcagagcatgcctgggggagcccctggcccgcatggagctcttcctcttcttcacctgcctcctgcagcgcttcagcttctcggtgctggccggccggccccggcccagcacccatggcgtctacgcattgccagttactccacagccttaccaactctgtgcagtggctcgctagcaggggcaggggctccattcttctccccggtttggtctgattgatgtccaataaacaacttctgtatcttc

SEQ ID NO: 3129 - DNA, 3144 bp, Rattus norvegicus
  Genbank Accession No. NM_012732
ccgtgactgaagaagccattgccaagggtatcgcaggattgttgctgtcacaggtgctgtagactgaggttgaaggactaccccggagacggctgcagtcgttcggttcctgtctcttccgtgtaggatttgatttctcctaaacttggtttaagacttttaaagaaggccctaatttatcgaggcctgtttgtgaagtaaaattcggctggctactctcaacggaagaaagatgcaactgctaggccgggtgatctgtttcgtcgttgggatcctgctttctgggggcccaacggggaccatatcagctgtggaccctgaagcaaacatgaatgtgactgagataatcatgcactggggatatccagagcactcagtacagacaggagatggctacattctgggtgttcaccgaatcccgcatgggcggaagaaccagtttgataaaggtcccaaaccagttgtgtatcttcagtggcgacatggcttcctggcagattctagtaactgggtcacaaacattgacaacaacagcctgggcttcatcctggcagatgctggctttgatgtgtggatgggaaacagcagaggaaacacctggtctcggaagcacaagactctgtcagtttctcaggatgaatactgggccttcagttttgatgagatggcaaaatatgacctccctgcttcaattaactacattttgaataaaactggccaagaacagctgtataatgtgggccactctcaaggctgcaccataggttttatagcattttcacagatgcctgaactggcaaagaaggttaaaatgttttttgccctggctcctgtgttgtctctcaattttgcttcgggcccgatggtcaaattgggacggttgccggatctgcttcttgaggacttgtttgggcagaagcaatttcttcctcagagtgcaatggtgaaatggctaagcactcacatttgcacgcacgtcatcatgaaggagctttgcgccaacatcttctttctgatatgtggcttcaatgagaagaatttaaacatgtctagagtggatgtgtatacaacacactgtcctgcgggaacctctgtgcaaaacatggtacactggacccaggttgttaaataccataagcttcaagcttttgactggggaagcagtgacaagaattattttcattacaatcagagttatccacccttgtacagcataaaagacatgcaactacccactgctttatggagcgggggcaaggactggctggcagacaccagtgacatcaatatcttactgactgaaatccccacgttagtgtaccacaagaacattcccgagtgggaccatctggattttatctggggtttggatgccccctggaggctgtataatgaagtagtcagtctaatgaagaaataccagtgagtgccaagacttgagatgcttccccttcactaggggaaaaaaggacagatgtttgcttaattcctgcaaaatactgtgttttcctggtctagatcatttgtattttttatgtgcaagaaaacgatgatgttgaagacatacatgggtctggtcagtaagaagcacgctggctgtcttctgcttcattctgactgacaagccagagtcacaaccagtgatgcctttgaagtttttagaaagtatgggtgttacgtgaaagaagccattgcaacctcttgtttactttttacggtcgttttcggtgtctgcatgctgtgcatatacatgcctatgtgtgtgccctgtgctggccagagcctccttgtgtggaggtaatggctcacatcagggtatcttccctcagacactggtctctcgacgaaccagtcagtagcttgctattccagttagactggctgaccagggagcctccagaatctgtccgtctctaccttccctcaccaggtctacggagggtgatgtcccagccagcattttacactggttctagggacaggaactcaggttctcatgcttgatagcaagccctttcttcaccaaaccattgcctcaaaccctctgtgatcgaaaagctgctcaattacctttatgttcccacccaatgcaagtgaacgagcacaagacatttcaagctgttgtttgtgagctaaaaatcaatctgccagtgacttgaacatgctagggagaaactcctggccctgagcttgacaaacctgcagtccaggttctccagagattgagacagggaggctgctgttacatttagggttcatttggagagtgagactttgtctctacaaaaccaaagacaaaggagaagaagaaaaaaaaaaccctaaagtactcagttctcatctgttagcctcagagggcttagagagttcctgtgtttacctatccgaacaacattttcatgtctttatgcagtagctacctagtgaaatccagtgttatcccagcttctccaggcgtaaacattctctcttcaatctcatcagacctcagtagcaagcatttagtgaatatttagatttttcaggccaagccaagacaaaaatgaatagaataaaagaaaaaagagcccagactcttgaaagcggtttgcactgatttaaaaataaaaaaaaagaatcttgaagaatgacatgataaactgtgttggttccgcatgtgtagtcggatcccttttctgtggagaacgttctgtggagggacaaaccactaatttgccccaagtgaatgtggctgtagtgacagcgacagtgcctctgatcctgagaagcagggctggctgccggtgacaagcatcccagttcctttccccagagatgaagaggatgttttcagacagagctcggctcagggaatttcgcttggagaatcagtggtttatgtgcacaatgttttagtgagcctgctctgcgcctgatatggggaagccctcgactgttcaccgggctcgtgggcgacggctgccgtcagctggacagtggataagttttctgagtagtcaccacagattcagggatatcgctttgtgtcgactcctaaggaaggcaggacgatatgacttggtaacattgtaaaggttcacatttaaacttttcaataaatctcagcctcacaggcctgaacatcaaaaaaaaaaaaaaaaaaaa

SEQ ID NO: 3130 - DNA, 3653 bp, Rattus norvegicus
  Genbank Accession No. NM_012734
cgccgatctgccgctggaggaccactgctcaccagggctactgaggagccactggccccacacctgcttttccgcatcccccaccgtcagcatgatcgccgcgcaactactggcctattacttcaccgagctgaaggatgaccaagtcaaaaagattgacaagtatctgtacgccatgcggctctctgatgagattctgatagatatcctgacacgattcaagaaagagatgaagaatggcctctcccgggattataatccaacagcctccgtcaagatgctgcccaccttcgtccggtccattccggacggctcagaaaagggggatttcattgccctggatctcggcgggtcttcctttcgaatcctgcgggtgcaggtgaaccacgagaagaaccagaacgtcagcatggagtctgagatctacgacaccccagagaacatcgtgcatggcagtggaacccagcttttcgatcatgtcgctgactgcctgggagacttcatggagaaaaagaagatcaaggacaagaagttacccgtgggattcacattttccttcccctgccgacaatccaagatagatgaggctgtactgatcacgtggacaaagcggttcaaagccagtggcgtggaaggagcggatgtggtcaagttgctgaataaagccattaagaagcgaggggactatgatgctaacattgtcgccgtggtgaatgacacagtagggaccatgatgacctgcggttatgatgaccaacagtgtgaagtcggcctgatcattggcacaggcaccaatgcttgctacatggaggaactgcgacacatcgacctggtggaaggcgacgaggggaggatgtgtattaacacggaatggggagcctttggggatgatgggtccctggaagacatccgaaccgagtttgacagagagttagaccgtggatctctcaaccctgggaagcagctgttcgagaagatggtgagcggcatgtacatgggggagctggtccggctaatcctggtgaagatggccaaggaaggcctcttattcgaagggcgcatcactccagagctgctcacgaggggaaagttcaacactagtgacgtgtccgccattgaaaaggataaggaaggcattcaaaatgccaaggaaatcttaacccgcttgggagtggagccgtctgatgttgactgtgtgtcggtccagcacatctgcacgatcgtctccttccgatcagccaacctggtggccgccacgctcggtgccatcttgaaccgcctgcgggacaacaagggcacaccacgcctgcggaccacggttggcgtggacggttctctctacaagatgcacccacagtactcccggcggttccacaagaccctgaggcgcctggtgcctgactccgacgtccgtttcctcctctcagagagtggcacgggcaagggggccgccatggtgacggcagtagcctaccgcctggctgagcagcaccggcagattgaggaaaccctggcccacttccgcctcagcaagcagacgctgatggaggtgaagaagaggctacggacagagatggaaatggggctgaggaaggagaccaacagcaaagctactgtcaaaatgctgccttcttttgtccggagcatcccggatgggactgaacacggtgacttcctggccttggatcttggaggaacgaatttccgggttctgctggtaaagatccgcagtgggaaaaagagaacagtggaaatgcacaacaagatctactccattcccctggaaatcatgcagggcaccggggatgagctgtttgaccacatcgtctcctgcatctctgacttcctggactacatggggatcaaaggcccccggatgcctctgggcttcaccttctcatttccctgccatcagacgaacctggactgtggaatcttgatctcatggacaaagggtttcaaagccactgactgtgagggccatgatgtagcctccttactgagggatgcggtgaagaggagagaggaatttgacttggatgtggtggctgtggtcaacgacaccgtgggcaccatgatgacctgtgcgtatgaagaacccacttgcgaaattggactcatcgtggggacgggcaccaatgcctgctacatggaggagatgaagaatgtggagatggtggaggggaaccagggccagatgtgcatcaacatggagtggggcgccttcggtgacaatgggtgtctggatgacatcagaacagactttgacaaagtggtggacgaatattctctaaactctgggaaacaaaggtttgagaaaatgatcagtgggatgtacctgggtgagatcgtccgtaacatcctgattgacttcaccaagaaaggcttcctcttccggggacagatctccgaaccactcaagacccgaggcatctttgagaccaagtttctctctcagattgagagtgaccggttagcgctgctccaggtgcgggccatccttcagcagctgggtttgaacagcacgtgtgacgacagtatcctggtcaagaccgtgtgtggggtggtgtccaagagggcggctcagctgtgtggtgccggcatggccgccgtggtggaaaagatcagagagaacagaggcctagaccatctgaatgtaactgtgggagtggatgggacgctctacaaacttcatccacacttctccagaatcatgcaccaaactgtgaaggaactgtcaccaaagtgtaccgtgtccttcctcctgtctgaagacggcagcggcaagggggccgcccttatcacagctgtgggcgtgcggctcagaggagacccttcgatcgcctaaaagccaggatcctcccagcccccagcccgccacccttccagcactcctctctagaaccgacgaccacacccccgtgttccacccagcaagccctgggagacccagccagcgcccactccgccgcagcagagggaggaaggggaccgcagtaacggagcaccacgtagaataccacccagagcgcgtgtgctgttgatctgatctctcgcctggacccctaatccctgccctgccactctgcatgattcaagttcgacctggccatgcattgcccatgagtgaacgtagcggcaccccggtgcgtctactgcagatgtccagctaggaaagagtcccctctcttggacagtcttctgggcccttccaagcccatccgtggagtcggcctctcctcccctctcccccgtgtgaagtgtgttatcaccagcagacactgccggactcctgcccacaggggcgtggcctgaaggcggagtgtggacatggcactgctgttccgttcccttcccctcccagcacccgccgcagcctgccatcccgtctggatgtatcgatgccacagaattgtgaattgtgtgtccgtccgtggagccagtcctagccacattattgacagtcttgcattttgttttgtctcctggtggtgggggtggaggtggtaggggtgcgctaaggtgggcagtcctgtgggagaacatcttgctagaaggaaccaacccacgaaacaacaccatcactggaatttccatcgcccgaattctttagtgagccattgttgtacgtctagtaaactttgtactgattc

SEQ ID NO: 3131 - DNA, 3635 bp, Rattus norvegicus
  Genbank Accession No. NM_012735
cggaaaacctgtttctggaaacgcgaggccctcagctggtgagccatcgtggttaagcttctttgtgtggctcctggagtctccgatcccagccggacacccgggcctggtttcaaagcggtcgaactgctctgcccgctccaccggtagcgctcgagcctcggtttctctactcgaccccgactcgccgcagcaggatgatcgcctcgcatatgatcgcctgcttattcacggagctcaaccaaaaccaagtgcagaaggttgaccaatttctctaccacatgcgtctctcagatgagacccttctggagatttctaggcggttccggaaggagatggagaaagggctaggagctaccacgcaccctacagcagctgtgaaaatgttgcctacctttgtgaggtcaactccggatgggacagaacatggggagttcctggctctggatcttggaggaaccaacttccgtgtgctccgagtaagggtgacggacaatggcctccagagagtggagatggagaaccagatctacgccatccctgaggacatcatgcggggcagtggaacccagctgtttgaccacatcgccgaatgcctggccaacttcatggacaagctacaaatcaaagagaagaagctccctctgggtttcaccttctcgttcccctgccaccagacaaaactggatgagagttttttggtctcgtggactaaggggttcaagtccagtggcgtggaaggcagagatgtggtggacctgatccggaaggctatccagcgcagaggggactttgacattgacattgtggccgtggtgaatgacacagttgggaccatgatgacttgtggctatgatgatcagaactgcgagattggtctcattgtgggcactggcagcaacgcctgctacatggaggaaatgcgtcatattgacatggtggagggagatgaggggcgcatgtgcatcaacatggagtggggagcctttggggacgacggtacactcaatgacatccgaaccgagtttgaccgagagatcgacatgggctcgctgaaccctgggaagcagctgtttgagaagatgattagcgggatgtacatgggggagctggtcaggctcatcctggtgaagatggccaaggcagagctgttgttccaagggaaactcagcccagaactccttaccactggctccttcgagaccaaagatgtctcggatattgaagaggataaggatggaatcgagaaggcctaccaaatcctgatgcgcctgggtctgaatccattgcaggaggattgtgtggccacgcaccgaatctgccagattgtgtccacgcgctcggccagtctgtgcgcagccaccctggccgcggtgctgtggcgaatcaaagagaacaagggcgaggagcgacttcgctccaccatcggtgtcgatggctccgtctacaagaaacatccccattttgccaagcgtctccataaggcagtgaggaggctggtgcccgactgtgatgtccgcttcctccgctctgaggatggcagcggcaagggggctgctatggtgacggcggtggcttaccgtctggctgaccaacaccgggcccgccagaagaccctggagtctctgaagctgagccacgagcagcttctggaggttaagagaagaatgaaggtggaaatggagcagggtctgagcaaggagacgcatgcggtcgcccctgtgaagatgctgcccacttacgtgtgtgccactccagatggcacagagaaaggagacttcttggccttggatcttggaggaacaaacttccgggtcctgctggtgcgtgtgcgtaatggcaagcggaggggcgtggagatgcataacaagatctactccatcccacaggaggttatgcatggcactggggaagagctcttcgaccacattgtccagtgcattgcggacttcctggagtacatgggcatgaagggcgtgtccctgcctttgggtttcacattctccttcccttgccagcagaacagcctagaccagagcatcctcctcaagtggacaaagggattcaaggcatctggctgcgagggtgaggatgtggtcaccttgctgaaggaagcgattcaccggcgagaggagtttgacctggatgtggttgccgtggtgaatgacacagttgggactatgatgacttgtggctacgaagaccctcactgtgaagttggcctcattgttggcaccggaagcaacgcctgctacatggaagagatgcgtaatgtggagctggtggacggagaggagggacggatgtgtgtcaacatggagtggggagcatttggggacaatggctgcctggatgacttgcggaccgtgtttgatgttgctgtggatgagctttctctcaaccctggcaaacagaggttcgagaagatgatcagcggcatgtacttgggagagattgtgcgcaacattctcatcgatttcacgaagcgggggctgctcttccgaggccgcatctcagagcgcctcaagacaaggggaatctttgaaactaagttcctgtctcagatagagagcgactgcctagccctgctacaggttcgtgccatcctgcgccacctagggctggagagcacgtgcgatgacagcatcatcgtgaaggaggtgtgcactgtggttgcccggcgcgctgcacagctctgtggcgcaggcatggccgccgtagtggacaagataagagagaaccgtgggctggacaacctcaaagtgacagtgggcgtggacgggactctgtataagcttcatcctcactttgccaaggtcatgcatgagacggtgagagatctggctccgaaatgtgacgtgtccttcctggaatccgaggacggcagtgggaagggagcagctctcatcactgccgtggcctgccgcatccgggaggctgggcagagatagaagcttggggaccagacggggcttctctgcttcctcacttccccgttttaaattatgagaagatggaccccttggcagagaggaccctgtgagactgggacttttgtctctgtatattcactgtagagtttggtacccaatccttggccttcctgagaatctgaagtaaggagttgttcgcagttcctgctggtcacctcctgggatggtcctcccccactctacttcctgtacaatcctatgggatggggacagtcttgagaaaatggttgcctcagcttggagctgaacctgacatttgtaggtggagaacatcttgaaatgtcgatgcttctctcatcagaggtagatgttgggtgggagggaggaggagagataggacgtcccctgccctacgtggctgtccctcttcaactcaacccataagcatcaccctgccggttctaaaacatttgctgtcctgggatagaggaatctgaaccaaagctagagtggacgtcttcttcaagtgtttgtggctttacctcacatggctgaatgtgtcatccacgagctacagaccttggggacaggagtggctttggtcgctttttagttttttgttttgttttgtttttttcttttttaatttatgtttgaaatttacttagtttaaagcaggtcctctccattgtgtaatggttg

SEQ ID NO: 3132 - DNA, 1423 bp, Rattus norvegicus
  Genbank Accession No. NM_012737
aatcctcacagcgacacagtgaaccatttcttctgacgctaggaaacatccagtgtagctgaggctgtcccaacccagtgaggagcccaggatgttcctgaaggctgtggtgctgaccgtggccctggtggccatcaccgggacccaggctgaggtcacttccgaccaggtggccaatgtgatgtgggactacttcacccagctaagcaacaatgccaaggaggctgtggaacaactgcagaagacagatgtcactcaacagctcaataccctcttccaggacaaacttgggaacattaacacctatgccgatgacctgcagaacaagctggtgcccttcgccgttcaactgagtggacatctaaccaaggaaacagagagggtgagggaagagatccagaaggagctcgaggacctacgggccaacatgatgccccatgccaacaaagtgagccagatgttcggggacaacgtgcagaagttgcaggaacacctgaggccctatgccacggacctgcaagctcagatcaacgcacagacccaggatatgaaacgccagctgaccccctacatccagcgcatgcagaccacaatacaagacaatgtggaaaacctgcagtcctccatggtgccctttgccaacgagctaaaggaaaagtttaaccagaatatggaagggctcaaggggcaactaaccccccgtgccaacgagctgaaggccacgatcgaccagaacctggaagacctgcgcagcagactggcccctctcgcggagggtgtgcaggaaaaactcaaccatcagatggaaggcttggccttccagatgaagaagaacgctgaggagctccataccaaagtctccacaaatatcgaccagctgcagaagaatctggccccgctggtggaagatgtgcaaagcaagctgaaaggcaacacggaaggactgcagaagtctctggaagacctgaacaagcagctggaccagcaggtggaggtgttccggcgtgctgtggagcccctgggggataagttcaacatggctctggtgcagcagatggagaagttcaggcagcagctgggctccgattcgggggacgtggaaagccacttgagcttcctggagaagaacctgagggaaaaggtcagctcctttatgagcaccctgcaaaaaaaggggagcccagaccagcccctagccctccccctcccggagcaggttcaggaacaggtccaggagcaggtgcagcccaaacctctggagagctgagctgtccctgtgtcctcggcccatcacagcagcagacacctgccctgccccaccacctgtctgtcactctgttcccaagcacttctcgtaccagcttgaggacacatgtcctgtgggtgacgatacctcctctcgttactcaataaagcatctgag

SEQ ID NO: 3133 - DNA, 2100 bp, Rattus norvegicus
  Genbank Accession No. NM_012741
agagggaacctttaatcatgaagctaattactatcctgctcctctgctccaggctcctgccaagtttagcgcaggaagaagatgcccaggaaatggactgcaatgatgagagtctttttcaggctgtggatactgctctgaagaaatataatgctgggttaaaaagtggcaaccagtttgtgttgtaccaagtgactgagggcactaagaaggatggctctaaaacattttattccttcaagtatcaaatcaaggagggaaactgctctgttcagagtggcttcgcctggcaggactgcgacttcaaggacgctgaggaagccgctactggtgaatgcacagcaactttggagaagagaagaaataataaattctccatagccacccagatctgcaatattactccgggtaagggtcccatagtgacaaacgagtaccactgtctggggtgtatgcaccctatctcggtggatagcccagagttggggcctgttctgaaacacgctgtggagcatttcaacaacaacacgaagcacacccacctctttgctctcggagaagtaaagagtgctgacagacaggtggtagctggcatgaattatcaaattatctactccattgtgcaaacaaattgttcaaaggaggattttccttccctccatgaagactgcgtgccccttcccagtggtgatgatggtgaatgtaagggtaatgccttcgtggatattcataaaacaattgccggcttctcagacagctgtgaattttatccaggagatgatttgttcgaactacttcctgaggattgccctggctgccccagaaacatacctgtagacagcccagagctgaaggaggcacttggtcattccattgcacaacttaatgcagagaataaccatactttctatttcaagattgacaccgtgaaaaaggcaacatcacaggtggttgctggaacaaaatatgtgattgagttcatagccagagaaaccaaatgttccaaggaaagtaacgcagaactgacagcagattgtgagaccaaacgcctcggtcaaagcctcaactgcaatgctaacgtgtacatgagaccttgggagaacaaagtcgtcccgactgtcaaatgcaaagtactagacatgacatcagtgataagaaggcctccaggattttcacctttccgggcacctcgagtgaaaaagcctaaagaaagtacaactgtaagtccatcctacattgccagggtgcaagaagagagggatccaggaaatgaacaaggacccatccatgggcatggctggttgcatgcaaagcaaataaagaataagaatcaccaaggtcataagcatgggcatggtattggccatggacaccagaaaccacatggccttggtcatggacatcaacttaaacttgatgatcttaaacagcaaagggaagacggctatgaccatagacatccagtgggacatggtcatggtcagaggcatggtcatggtcatggtcatggtcacggtcgtgataaacacacaaataaagacaaaaacaatgtcaagcacactgaccagagaagagcacctttgacaagctcttctgaagacaatactacatctacacagatacaggggaggacagagggcttcaccttgaaccctcccctagctcagccagctgttatctctcgtggttttcaggactcaggtttcactgaaggtgtgatagctaccacatcaccatatgacacggagacccatgatgatttgatccctgatatccatgtacaaccagatagcctttcatttaagctgatatctgactttccagaagcaacttcccacaagtgtcctgggcgcccatggaagccagttagtaggaaggatccaaccatagaaacaacagaattttctgattttgatctcctcgatgctctttcttaacttatacagcgtaggaatctttacaaatgctttcccagcctctttttctactgcccaaacacaaatattgtgacataagtcatcaagccatgaggctcagaacagcctgtcagtaggactttataaatccctgtggactgataataaaactgccatccttctg

SEQ ID NO: 3134 - DNA, 2142 bp, Rattus norvegicus
  Genbank Accession No. NM_012749
atggtgaaactcgcaaaggccggcaaaacccacggagagtccaagaaaatggctcctcctccaaaggaggtggaagaagatagtgaggatgaagaaatgtcagaagatgaagatgacagcagtggagaagaggaggttgtcatccctcagaagaaaggcaaaaaggctaccacaactccagcaaagaaggtggttgtttcacaaacaaaaaaggctgcagttcccacaccagctaagaaagcagctgttaccccaggcaaaaaggcagcagccacaccagccaagaaagctgttacaccagccaaagtagttccaacacctggtaaaaagggagctgcacaagcaaaagcattggtaccaactcctggtaaaaagggagctgtcactccagccaagggggctaagaatggtaagaatgccaagaaggaagacagcgatgaggatgaagatgaagaggatgaagatgacagcgatgaggatgaagatgaagaggatgaatttgagccaccggtagtaaaaggagtgaaaccagcaaaagcagctcctgctgctcctgcctcagaggatgaggatgaggaagatgatgatgatgaagatgatgatgatgatgatgaagaggaggaggaggaagatgactctgaggaagaagttatggagatcacaccagccaaaggaaagaaaactcctgcaaaagttgttcctgtgaaagccaagagtgtggccgaggaggaggaagatgatgaggatgatgaagatgaagaggaggatgaagatgaagaagatgaagaggacgatgaagatgaggatgaggaagaagaggaagaacctgttaaagcagcacctggaaaacggaagaaggagatgaccaagcagaaagaagcccctgaagccaagaaacagaaaatagaaggctcagaaccaactacacctttcaacctgttcattggaaaccttaatccaaacaagtctgttgctgaattaaaagttgccatcagtgaactttttgctaaaaatgatcttgctgctgtggatgtcagaactggtacaaataggaaatttggttatgttgattttgagtctgctgaagacctagaaaaggccctggagctcactggtttaaaagtgtttggcaatgaaattaaactagaaaaaccaaaaggaagagatagtaagaaagttcgagctgcaagaacacttttagccaaaaacctctctttcaacatcactgaggatgaattaaaagaagtgtttgaagatgctgtggagatcagattagtcagccaggatgggagaagtaaagggattgcttatattgaatttaagtctgaggctgatgcagagaaaaacttggaagaaaagcagggggcagaaattgatggacggtctgtttcactctactacactggagagaaaggacaaaggcaagagagaactggaaagaatagcacttggagtggtgaatcaaagactttggttttaagtaacctttcctacagtgcaacagaagaaacacttcaggaagtattcgagaaagcaacctttattaaagtgccccagaacccacatggcaaatctaaagggtatgcatttatagaatttgcttcatttgaagatgctaaagaagctttaaattcctgtaataaaatggaaattgagggcagaacaatcaggctggagttgcaaggacccaggggatcacctaatgcgagaagtcagccatccaaaactctgtttgtcaaaggtctgtctgaggataccactgaagagaccttaaaagaatcatttgagggctctgttcgtgcaagaatagtaactgatcgggaaactggttcttctaaagggtttggttttgtagactttaatagtgaggaagatgccaaagctgccaaggaggccatggaagatggagaaattgatggaaacaaagttaccttggactgggccaaacctaagggtgaaggtggctttggtggtcgaggtggaggcagaggaggtttcggaggcagaggtggtggcagaggcggaagaggcggatttggcggaagaggccggggagggtttggaggcagaggaggcttccgaggcggcagaggaggcgggggagacttcaagccacaaggaaagaagacgaagtttgaatag

SEQ ID NO: 3135 - DNA, 1844 bp, Rattus norvegicus
  Genbank Accession No. NM_012755
gagctcctgggcccggccgcggaccaccggagccgccagggcctcgccggaggagggcggggagaggaccatgtgaatgtgctccggaaccgagcgccacgccacgcagtgtttgaaaggaacacaatgctgatctagtcgtggcaaaaggtcagtcctactgctggtttagaagacatgtggtgtatataacgtttgtgatagttggtggaaatttgggagcttggataatgggctgtgtgcaatgtaaggataaagaagcagcgaaactgacggaggagagggacggcagcctgaaccagagctctgggtaccgctatggcacagaccccacccctcagcactaccccagcttcggtgtgacctccatcccgaactacaacaacttccacgcagccgggggccagggactcacggtctttgggggtgtgaactcctcctctcacaccgggaccctgcgtactagaggagggacaggagtgacactatttgtggcactttatgactatgaagcacggacagaagatgacctgagttttcacaaaggagaaaaatttcaaatattgaacagctcggaaggagactggtgggaagcccgctccttgacaactggggaaactggttacattcctagcaactacgtggctccagttgactccatccaggcagaagagtggtactttggaaaacttggccgcaaggatgctgagagacagctcctgtcctttggaaacccaagaggtacctttcttatccgcgagagcgaaaccaccaaaggtgcctactccctctccatccgagactgggacgacatgaagggagaccatgtcaaacattacaaaatccgcaagcttgacaacggcgggtactacatcaccacgagggcccagtttgagacccttcagcagcttgtacagcattactcagagagagccgcgggtctctgctgccgtctagtagttccctgtcacaaagggatgccaaggcttaccgatctgtctgtcaaaaccaaagatgtctgggaaatccctcgagaatccctgcagttgatcaagagactgggaaatgggcagtttggggaagtatggatgggtacctggaatggaaacacaaaagtagccataaagactcttaagccaggcacaatgtccccggaatccttcctggaggaagcacagatcatgaagaagctgaagcacgacaagctggtgcagctctatgcagttgtgtccgaagagcccatttacattgtcacggaatacatgaacaaaggaagtttgctcgacttcttaaaagacggtgaaggacgggctctgaaattgccaaacctcgtggacatggcggcacaggttgctgcaggaatggcttacatcgaacgcatgaattatatccacagagatctgcggtcagctaacattctggtggggaacggactcatttgcaagattgctgacttcggattggcccggttgattgaagacaatgagtacacagccagacaaggtgcaaagtttcccattaagtggacagcccccgaagcggccctgtatggaaggttcacaatcaagtctgacgtgtggtcctttggaatcttactcacagagctggtcaccaaaggcagagtgccgtacccaggcatgaacaaccgtgaggtgctggagcaggtggagagaggctacaggatgccctgcccgcaggactgcccgatctccctgcacgagctcatgatccactgctggaaaaaggatccggaggagcgccccactttcgagtacttgcagggcttcctggaggactactttaccgccacagagccccagtatcagcccggtgaaaacctgtga

SEQ ID NO: 3136 - DNA, 1209 bp, Rattus norvegicus
  Genbank Accession No. NM_012762
atggccgacaaggtcctgagggcaaagaggaagcaatttatcaactcagtgagtgtagggacaataaatggattgctggatgaacttttagagaagagagtcctgaaccaggaagagatggatacaatcaaacttgcaaatatcactgttatggaaaaggcacgagacctgtgcgatcatgtcactaaaaaaggaccccgggcaagccagatgtttatcacttacatttgtaatgaagactgctacctggcagaaattctggagcttcagtcaggtccatcagctgaaactgtttttgttacagaagattctaagggaggacatcctttctcctcagaaacaaaagaaaaactgaacaaagaaggtggcgcatttcctggaccgagtggttccctcaagttttgccctttagaaatagcccagaaattatggaaagaaaatcattcagagatttatccaataatgaaaacacccactcgtacacgtcttgccctcattatctgcaacacagactttcaacatctttctcggagagtcggagctgatgttgacctcagagaaatgaagttgctgctgcaggatctgggctatactgtgaaagtcaaagaaaatctcacagctctggagatgacaaaagaattgaaagaatttgctgcctgcccagagcacaagacttctgacagtaccttccttgtattcatgtctcatggtctccaggagggaatatgtgggatcacatactctaatgaagttgcagatattttaaaggttgacacaatctttcaaatgatgaacacattgaagtgcccaagcttgaaagacaagcccaaggttatcattattcaggcatgccgtggagagaaacaaggagtggtgttgttaaaagattcagtaggaaactccgaagagggattcttaacagatgcaatttttgaagatgatggcattaagaaggcccatatagagaaagattttattgctttctgctcttcaacaccagataatgtgtcctggagacatcctgtccggggatccctcttcattgagtcactcatcaaacacatgaaagaatatgcctggtcttgtgacttggaggacattttcagaaaggttcgattttctttcgaacaaccagactctagactacagatgccaaccactgaaagggtgaccctgacaaaacgtttctacctcttcccaggacattag

SEQ ID NO: 3137 - DNA, 1843 bp, Rattus norvegicus
  Genbank Accession No. NM_012766
tctcactcacacgcgacgcgtcgcttctcctaggactcgctagcccgcactcctgctctcacccgtgagccatagcaggatggagctgctgtgttgcgagggcacccggctcgcgccccgggccgggcccgacccgcggctactgggggaccagcgtgtcctgcagagtttgctccgcttggaggagcgctacgtgccgcgaggctcctacttccagtgcgtgcaaaaggagatcaagccgcacatgcggaagatgctggcgtactggatgctggaggtgtgtgaggagcagcgctgcgaggaggatgtcttccctctggctatgaactacctggatcgctacctgtcctgcgtccccacccgaaaggcgcaactgcagcttctaggtaccgtctgcctgttgctggcctccaagctgcgcgaaaccacacccctgactattgagaagctctgcatctatacggaccaagctatggctccctggcagttgcgggaatgggaggtgctggtcctggggaagctcaagtgggacctggctgctgtgattgcgcacgacttcctggccttgattctgcaccgcctctctctgcccagtgaccggcaggcactggtcaaaaagcatgctcagacctttttggccctctgtgccacagattacacctttgcgatgtaccctccatccatgatcgccacgggcagcatcggggctgcagtgctaggcctgggtgcctgctctatgtctgcagatgagctcacagagctgctggcgggaatcacaggcactgaagtggactgcctgcgtgcctgccaggagcagcagatcgaagctgccctcagggagagcctcagggaagctgctcagacagcccccagccccgtgcccaaagcccccggggggtctagcagccaggggcccagtcagaccagcactcccacagatgtcacagccatccacctgtagtttgggacaggccccctcaggtggccaccaagcagaggaggggcccctgccaccccctccctccctctaggaacaattcatgccatatctgaagcccgagggggctctttttcccctcacaaagcccaaggggccaggtcctgcctatccccacagtgtgcactaaggggctgcttggtcatgagggtgtctacatggccagtcagttcctcttccttcccactcaaccagcttggctgtcctgggccatgatggtcagagagatacaaacaggtagaacccacacaccagcatttcttttgagtccctcctctgtctggggcgccgatcctttcagttgccaaaacgccccagtaccttccaaaggtgttgttgcccctcgcagggtcactgcatttggatctgggtccttcagaaatcccgatagacgcctatgaggagccaacctagatggctgctgtgtaatccctactccagctgctcttagcgggaaccagcctaggccttggctagaagagcaagcgcccgtaaactgttgctttgcttcctgctatgcttctgtggttgagggtcttgagggtgctgatggtcattttaatttattgctttgaatacaccgtaagagggtacagtgaggcctgtaccccacaagtggtggtaaccctggcggttgctctttccctcccctctgctaccgctttgtggcccaggagctgctacagcctgggagggggtcctgccttcctctccgtagccctccagctcatcttcagcggggagggtttaatagggatggatgccgtggaggtgactggactatccggagagagggcgagccccatggacacaggtgtttcctcaggccacaaggtttggggcgcc

SEQ ID NO: 3138 - DNA, 2431 bp, Rattus norvegicus
  Genbank Accession No. NM_012780
tctcgaccatggcggcgactacagctaacccagaaatgacatcagatgtgccatcactgggtcccaccattgcttctggaaatcccggacctgggattcaaggtggaggagctgttgtccagagggctattaagcgacggtcagggctggattttgatgatgaaggagaagtgaacagtaaatttttgagatgtgacgatgagcagatgtgtaacgacaaagagcggtttgccaggtcggatgatgagcagagctctgccgataaagagagacttgccagggaaaatcatagtgaaatagagcggcggcgacggaacaagatgacagcttacatcacagaactgtcagacatggtacctacctgtagtgccctggctcgaaaaccagacaagctaaccatcttacgcatggctgtttctcacatgaagtccttgaggggaacgggcaatacatccactgacggctcctacaagccgtccttcctcactgatcaggaactgaaacatttgattttggaggcagcagatggttttctgtttattgtctcttgtgagactggccgagtggtgtatgtctctgactcggtgactcccgttttgaaccagccacagtctgaatggtttgggagcacactgtatgaccaagtgcacccagatgatgtggataaacttcgagagcagctttctacttcagaaaatgccctaacagggcggatcctggatctgaagactggaacagtgaaaaaggaaggtcagcagtcttccatgaggatgtgcatgggctcaagaagatcgttcatctgccggatgaggtgtggcaccagctctgtggaccctgtttccatgaatagactgagctttttgaggaacagatgcaggaatggacttggctctgtgaaggaaggagagcctcactttgtggtagtccactgcacaggttacatcaaggcctggccaccagcaggtgtctccctcccagatgatgatccagaggctggccaggggagcaaattctgcctagtggccattggcaggctgcaggtaaccagttctcctaactgtacagatatgagtaacatctgtcagccaacagagttcatctccagacataacattgaagggatattcacttttgtagatcatcgttgtgtggctactgttggctaccagccacaggagctcttaggaaagaatattgtagaattttgtcatcctgaagaccaacaacttctaagagacagctttcagcaggtggtgaaattaaaaggccaagtgctgtctgtcatgttccgattccgagctaagaaccgagaatggctgtggatgagaacaagctcctttactttccaaaacccgtattcagatgaaatgagtatatttatctgcaccaacaccaacgtgaagaactctagccaggaaccacggcctacattgtctaacacaatccagaggtcacagctaggtccgacaactaatttatccctagagatgggtacaggtgtcctggcatccaggcagcagcagcagcagcagcagcagcagcagcagcagcagcagcagcagacagaattggatatggtaccaggaagagatgggctggccagctatagtcattcccaggtttctgtccagcccgtggcaactgcaggatcagaacacagcaagccccttgagaagtcagaaggtctctttgtgcaggacagagatccgaggttttcagaaatctatcccaacatcagtgcagatcagagtaaaggcctctcctccagcactgtccctgccacccaacagctgttctcccagggcagctcattccctcctaacccccggccggcagaaaatttcaggaatagtggtcttacccctcccgtaaccattgtccagccgtcatcttctgcagggcagatattggcccagatttctcgtcactccaaccttacccagggatcagcaccaacttggacctctagcactcgcccaggtttctctgcccagctgcctactcaggctacagccaagactcgttcttcacaatttggtgtgaacaactttcagacttcgtcctccttcagtgccatgtctcttccgggtgctcccactgcctcacccagtactgctgcctaccctactcttcctaaccgtggatccaactttcctcctgagactggacagacaacaggacagttccagacccggacagcagagggtgtgggtgtctggccacagtggcaaggccagcagccccatcaccggtctagttccaatgagcaacatgttcagccaacatcagcacaaccaagtagccagcctgaggtctttcaagaaatgctgtccatgctgggggaccagagcaacacctacaacaatgaagagtttcctgatctaactatgtttccccctttttctgaatagaactattggggtgaggataa

SEQ ID NO: 3139 - DNA, 1443 bp, Rattus norvegicus
  Genbank Accession No. NM_012783
tgaaagtctccagtttctcagagctggttgtgagcaacaccagaaactgctgtaccacaccctggtagaagtgcgtcagtattcgcaactgggaacacatttttggtatggagtcctggaattctcggatcctcttgttctcttcctcttcctctgccgcagtcactccccactggccctcagtttcacgctgtttcttcttccttggacgaggcgacatggcggcggcgctgctgctggcgctggccttcacgttcctgagtggccaaggcgcctgcgcggcggcgggcaccatcgtaacctctgtccaggaagttgactccaagacacagcttacctgctttttgaacagcagtggcattgacatcgttggccaccgctggatgagaggtggcaaggtactgcaggaagacacgctgcccgatctacagatgaagtacacggtggatgcagatgaccgctctggagaatattcctgcatcttccttcctgagcctgtgggcagaggcaacatcaatgtggaggggccacccaggatcaaggtgggaaagaaatcggaacacgccagtgagggagagtttgtgaagctgatctgcaagtctgaggcgtcccaccctcctgtggatgagtgggtctggtttaagacctctgacactggggaccagactatctccaacggcactgaggccaatagcaagtacgtcattatatccacgcctgagctgtcagagctgatcatcagcgacctggacatgaacgtggaccctggcacctacgtgtgcaatgccaccaactcccagggcagtgctcgggagaccatctcactgcgtgtgcgcagccgcctggcagccctctggcccttcctgggcattgtggccgaggtcctggtgttggtcaccatcatcttcatctacgagaagaggcggaagccggaccagaccctggacgaggatgatcctggcgccgccccactgaagggcagcgggtctcacctgaatgacaaggacaagaatgtgcgccagaggaacgccacctgagcggcggggcaggcggggaggggaggtgccagggcacttgaccccagcccagcgtctgcctccactcctgtgtcccatcctgtcccgacctgagcctgcccaacccaacttcttatcccagcccaagtgaagacagagccttaccttacagaaaacccatctgggagaagcaggccacttgcagtacccctgtttctagtttaaactgaatgaggtttctatgcagacaatccattccttagggctacgtttttattttccttcccttctgaagtatgtcactacagccctgtggagtgggggagtggggtcatgagggaaaggccagggcacacatgctctgactttaccctgttggagggggctgggcctgctgggaccccacaaataaagacctacaccacca

SEQ ID NO: 3140 - DNA, 4835 bp, Rattus norvegicus
  Genbank Accession No. NM_012789
gagcagaggcgcaggacgtccgtctccgcgcgcgtgacttctgcctgcgctcaagcttcagagttcagtttcaaggagccgcccaaccatgaagacaccgtggaaggttcttctgggactgcttggtgtcgctgcgcttgtcaccatcatcaccgtgccagtggttctgctgaacaaagatgaagcggccgctgatagcgcgagaacttacacactagctgactatttaaagaatacctttcgggtcaagtcctactccttgcggtgggtttcagattctgaatacctctacaagcaagaaaacaatatcttgctattcaatgctgaacacgggaacagctccattttcttggagaacagtacctttgagatctttggagattctataagtgattattcagtgtcacccgacagactgttcgttctcttagaatacaattatgtgaagcaatggagacactcctacacggcttcatacagtatttatgacttgaataaaagacagctgatcacagaagagaagattccaaataatacacagtggatcacatggtcacaagaaggtcacaaattggcatatgtctggaagaatgatatttatgttaaaattgaaccacatttgcctagtcataggatcacatcaacaggaaaagaaaatgtaatatttaacggaataaatgactgggtttatgaagaggaaatcttcggtgcctactccgcactgtggtggtctccaaacggcacttttctagcttatgcccagtttaacgacaccggagtgcctctcattgaatactccttctactctgatgagtcactgcagtaccccaagacagtctggattccgtacccaaaggcaggagctgtgaatccaactgtaaagttctttattgtaaatacagactctctcagctcaactactactacgattcccatgcaaatcaccgctcctgcatctgtgacaacaggggatcactacttgtgtgacgtggcctgggtttcagaagacagaatctcgttgcagtggctcaggaggattcagaactattccgtgatggcgatctgcgactatgataagaccaccctagtatggaactgtccaacgacgcaggagcatattgaaacgagtgccacaggctggtgcggaagatttaggcctgcagaaccccacttcacctccgacggaagcagcttctataaaatcgtcagtgacaaagatggctacaaacacatctgccagttccagaaagataggaaacccgaacaggtctgtacatttattacaaaaggagcctgggaagtcattagtatcgaagctctgaccagcgattatctgtactacattagtaatgaatataaagaaatgccaggaggaagaaatctttataaaattcagcttactgaccacacaaataagaagtgccttagttgtgacctgaatccagaaagatgccagtattactcggtgtcacttagtaaagaggcaaagtactatcagctgggatgccggggccctggtctgcccctctacactctgcatcgcagcactgatcaaaaagagctgagagtcctggaggacaattctgctttggataaaatgctgcaagatgtccaaatgccttcaaaaaaattggacttcattgttctgaatgaaacaagattttggtatcaaatgatcttacctcctcattttgataaatccaagaaataccctctactaatagatgtatatgcaggtccctgtagtcaaaaagcagatgctgccttcagactcaactgggccacttaccttgcaagcacagaaaacatcatagtagctagctttgatggcagaggaagtggttaccaaggagataagatcatgcatgcaatcaacaaaagacttggaacactggaagttgaagatcaaattgaagcagccaggcaatttttaaaaatgggatttgtggacagcaagcgagttgcaatttggggctggtcatatggagggtacgtaacctcaatggtcctgggatcgggaagtggcgtgttcaagtgtggaatagccgtggcgcccgtgtcacggtgggagtactatgactcagtatacacagagcgttacatgggtctcccaactccagaggacaaccttgaccattacaggaactcaacagtcatgagcagagctgaaaattttaagcaagttgagtacctccttattcacggtacagcagatgataatgttcactttcagcagtcagctcagatctccaaagccctggtggatgctggcgtggatttccaagcaatgtggtacacggacgaagaccatgggatcgccagcagcacagctcaccagcacatctattcccacatgagccatttcctccagcagtgcttctccttacgctagcatggcaaggctctccgcagcttactcaagagcacacttgtcctcattatctcaaaactgcactgttaagatgacgattttaataatgtcgcctcgagaaattccagcctacttcccagttttatacctgcaatcctaactaaggatgcctgtcttcagaacagattattaccttacagcaatttggatttccccctctgttttgtttatcatttaaaaccatttccacatcagctgctgaaacaacaaatataaattatttttgcaagagctatgcatagatttcctgagcagaatttcaatttttttcccccttactaggctggtccaaatcttgttcccttatttaagggggtggcaagacgtgggtaatgatgtcattaggccagcaacaagagaagcgggaacagagaatatggctagaaacccaggtccaagcatacaaacccaaccaggctactgtcagctcgcctcgagaagagctgctcactgccagactggcaccgttttctgagaaagactattcaaacagtctcaggaaatcatatatgcaaagcactgacttctaagtaaaaccacagcagttgaatagactccaaagaaatgcaagggacgctgccagcaatgtaagggccccaggtgccagttatggctataggtgctacataaacacagcaagcctgatgggaaagcatgttaaatgtgcttttaaaaattaccaagtctcctagtgagaagaggcagcttggaacatagcgacttgccccgttaaaagttgaaaatatttgtgtcacaaattctaacatgaaggaatacttgcgtcagttcttcctacttcctttctttgagcattttcattaaagcattttaacttcattatctttctaatggaaaactgtatgagaatgttttgtgttattatttctattctacacactggaatgttgcctggtcatttagcaagtatgcttccattttttcaaaggtaatgggttatatcttgaatcaaacttaaactgcattgacatatggacacatttgttcaaaggttcttgtttaacttgtgtgaaatccaagactgtcttgtaaacatggaaagagttcaacttttaaaaaaaaatttagatacataaaactgtttaaagttatatgattcataagagtttatctaatacccccagaaatttctactcacatttatcacatagcttggtcatttacatactatggaactcataatattatttaacttaggggagcacgtgaggttcgtggcacgagatggaatgctatcagcagagtagacatgtttttccagggtcttgttttttgtttttgtttctggtctcttcctgtttgggcggagggtaatataatagataatatacataatagaatacactctgatacctgacttagccgtgttttgacaacttggaaacttgattcaattatttataacacagctgaaaatttaaaatggactccacacatttaaatgcagtttcaggccaattttctaggtacaattaccacagacaggtgagctacagcataaattccaaacatggcagaaatggaaattacctataaatataaatgagtttagatattgatgagcctgatgctatttcccgggcactccactgttcccctcaccttaaggaactctcaagtcctgctcttccactgcaagcacagctggtccttaaatctacaggcctctggctacagtccgaatttgaacacagttctgtcaccgtgtgcagcagcagcagccatgtgcaaagttctagatcaaggaacaaaggtagcacatgttcctgacagtgtggaaacataaacataaatgcgaattaaatagaaattatcccttctgaattctttttgttcctttcatttctaaataggttgttcctggagcctgaattaataaaaagaacacagcacacatttttcaggcgatgagggtttcacatggtgataatgtgaatacattcagtttttatttgattctcataggtcaagttttactgttcggtaagagttgtaaattagattaaaaccctgatgcataagttgtaaacaaacttaatttaagagcaagtttgaaaagcacaagagctaataacaccactgaggcatatagacaagtctcttatgggcatatgcagctccctgaagcgcatggatcaagctaccgcctcagagcacaccagcaccaggggcgcatgctaaaggaagagctcccctccccaccccccatgcttcacgatccatgttgacttcagtctgtgccattctgggcatcatagttctccttcagattattagcagttccacctcttggcacgtactacttttgctctaagttggagtgagagtactggtttataagattactggatttgtacaatatttaagattcaataaattctaagtg

SEQ ID NO: 3141 - DNA, 2042 bp, Rattus norvegicus
  Genbank Accession No. NM_012792
gaacataaagtcagattgctaaacttctgtgtcgactgaaaaacatggtgaagcgagttgcaattgtgggagctggggtcagtggcctggcctccatcaagtgctgcctggaagaaggactagaacccacctgcttcgagagaagctgtgacttgggaggactttggagattcacggaacatgttgaagaaggaagagccagcctttacaactcagtggtttctaacagcagcaaggagatgtcttgttactccgatttcccttttccagaagactacccaaactttgtgccaaattctctgttcctggaatatctccagctgtatgcaacccagttcaaccttctgagatgcatctatttcaacaccaaagtgtgcagtataacaaaacgcccagatttcgctgtctctggacaatgggaagtggtcactgtctgtcaagggaagcaaagctcagacacctttgctgctgtcatggtctgcactgggtttctaactaacccacatctgcccctggattcctttccaggcatacaaacttttaaggggcagtacttccacagccggcagtataaacatccagacgtatttaaggacaagcgagtccttgtggttggaatgggaaattctggtacagacattgccgtggaggccagtcacttagcgaaaaaggtgtttctcagcaccaccggaggggcatgggtgatcagccgagtctttgattcagggtacccctgggacatgatattcatgacgcgatttcagaacatgctcagaaatcttctcccaactccagttgtgagttggttgatatcaaagaagatgaacagctggttcaaccacgtgaattacggtgtggctccagaagacaggactcagctgagagagcctgtgctgaatgatgagctcccaggccgcatcatcactgggaaagtgttgatcaagcccagcatcaaggaggtgaaagaaaactctgtcgtctttaacaatacaccgaaggaggagcctattgacgtcatcgtctttgccactggatactcctttgcgttccccttcctcgatgaatcaatagtgaaagttgaggatggccaggcatcactgtacaagtacatcttcccggcacatctgccaaaaccaactctggccgtgattggcctcatcaaacccctgggttccatgatacccacaggagagacacaagctcgatgggttgttcaggtcctgaaaggtgcgactacattaccacccccgagtgtcatgatgaaagaagtcaatgaacggaagaagaacaagcatagcggatttggcttgtgctactgcaaggctttgcaatccgattacataacgtacatagatgacctcctgacctcgatcaacgcaaaaccggacctgcgggccatgctcctgactgacccacgcctggctctgagcatcttcttcggcccatgcacaccttaccatttccgcctgactggtccaggaaagtgggaaggagccagaaaggccatcttgacccagtgggaccgaacagtgaacgtcaccaaaactcgaaccgtacaagaaaccccatctacctttgaaactttgcttaaactctttagttttctggctttgcttgtggctgttttctttattttcctgtaagtgaaagatctaactggctttccaaatgtgtggagtataaccttccaacttctctaatgtaacaatttcaccttcgtaattgtaaaccacgtccagagacacccaacccctacctctccccaactcacctcattggcaccttcattgctgggtctcttgctagtccatcaggtttagtgcaagaaaataatgtccagcaattctgttcacttaaaatgttggaaggatccaggccccctttcaggaagaatctgcccccagagaggactctgagcattctttcaatctaaaaaactgctttccctagatcttaatgaaaagcccaacttcgcggaatattggtctgcactaaaatagttctctgtgtattagttgactacaaataaaatggaagaaact

SEQ ID NO: 3142 - DNA, 924 bp, Rattus norvegicus
  Genbank Accession No. NM_012793
cctggtggttccgcagccgtactctcctggcctggtgtgcacagcctcaccatgagttcttctgcagccagcccgcttttcgcgcctggcgaggactgcggccccgcgtggcgcgcggcccccgcggcctatgatacgtctgacacgcacctgcagatcctgggcaagccagtaatggagcgttgggagaccccctacatgcattcgctggcggctgctgctgcctccagagggggccgggtcctggaagtgggctttgggatggccattgcagcctccagggtgcagcaggcccccataaaggaacactggattattgaatgcaacgatggggtcttccagcgtctacaaaactgggccctgaagcagccacataaggttgttcccttgaaaggcctgtgggaggaggaggcacctacactgcctgatggtcactttgatgggattctatacgacacatatccactgtctgaagagacctggcacactcaccagttcaactttattaagactcatgctttccgtttgctgaagcctgggggtatcctcacttactgcaacctcacgtcctggggggaactcatgaagtccaagtacacagacatcactgccatgtttgaggagactcaggtgcctgcactgctggaagctggcttccagagagaaaacatctgtacagaggtgatggcgctggtgcccccagccgactgccgctactatgccttccctcagatgatcacacccctggtcaccaagcactgagcggctggcccagggctacaaggagaatatgtcctcctcagtgcctttgtagctggagtgtggctccagcctctccactatccctgcagtgtgacatcctaacctctgcctggtacggccatctccccagagctcaggagtaaaataaatgctaccaagact

SEQ ID NO: 3143 - DNA, 1258 bp, Rattus norvegicus
  Genbank Accession No. NM_012796
gggggaacgcgtcagacttggccaactgaggctgggctggacccctattgtggaatcgcggacacttcctacagttgtcgaacgcaatccgtctacaccaccttgtgtcactacctaccaccatgggtttggagctctacctggacctgctgtcgcagcccagccgcgcggtctacatcttcgccaagaagaatggcattccctttcagttgcgtaccgtggatttactcaaagggcagcacttgagcgagcaattctcccaggtgaactgcttaaagaaagtgcctgtcctcaaagacggaagcttcgtgttgaccgaaagcactgccatcttgatttacctgagttccaagtaccaggtggcagaccactggtacccggccgacctacaggcccgtgcccaagtccacgaatacctgggttggcatgccgacaacatccgtggcacctttggagtactcctgtggaccaaggtgttggggccactcattggggtccaggttcccgaggaaaaggtggaacggaacagaaatagtatggtcttggctctgcaacgtctggaggacaagttcctcagggacagggccttcattgctggccagcaggtgacgctagcggatctcatgtctctagaggagttgatacagccggtggctcttggctgtaatctgtttgaggggcggcctcaactgacagcgtggcgagagagggtggaggcgttcttgggtgctgagctatgtcaggaggcgcacaaccccatcatgagcgtcctgggacaggcagccaagaaaacattaccagtaccccctccggaggcccatgccagcatgatgcttcgaattgccaggattccctgagtggttttttttccctgagtatttttattgctataaagactcattttgtattttgcctctttgttttgttttgtttttgtttcttcttgtcccaacctttttttttttttttttttttctggctccttttctggctctgggaggagctttgctcaaaagggacaccacctatccttagcatgcttctcttgaggtacagtatgcacaaccaataggagacccaagtcaataatatataaaaggtgcttaaaaaaaaaaaagcaaacagtaacacacacgaagaaatcaaccaaaaattggtggacatctgttttttattataatatagattctgaatattttaaggaataaagagttattgttttattacattgccctctaatctgtatggaataaattat

SEQ ID NO: 3144 - DNA, 1124 bp, Rattus norvegicus
  Genbank Accession No. NM_012797
cggcacgagctaacaccctgttctcagactcctccgcgcctctccgcctgtcctcaggatcatgaaggtcgccagtagcagtgccgcggccaccgcaggccccagctgttcgctgaaggcaggcaggacggcgggcgaagtggtgcttggtctgtcggagcaaagcgttgccatctcgcgctgcgctgggacgcgcctgcccgccttgctggacgaacagcaggtgaacgttctgctctacgacatgaacggctgctactcacgcctcaaggagctggtgcctaccctgcctcagaaccgcaaagtgagcaaggtggagatactgcagcatgttatcgactacatcagggacctgcagctggagctgaactctgagtctgaagtcgcgaccgccggaggccgggggctgcccgtccgggccccgctcagcaccctgaacggcgagatcagtgccttggcggccgaggtgaggtccgagtcagagtattacattattctcctgtgggaaactaaggccacgggaggggggtgtcccccttacttctcaggagcatagttatttaggggcgaccaataggaaaaagctcgcgctttcatcgtgcctcctggagtagagaagtgggaatgcctctcccctccagttctttccagtgggtctcatgccttatctcgctctggtgttcacaggcggcatgtgttccagccgacgaccgcatcttgtgtcgctgaggcggcgcactgaggaaccagatggactccagcccttcaggaggcaagaggaaaaaaagtgctctcggttccccagagcaacccggggaaagacactaccgcggccacgggactcttgacggatctgtccagggggtagagggttgatcaacggagtctcgccctctccacctttcagcctccagagactttgaggagggggttattcaaccccgtgtgtttctgtttttttgaaaaagcagacattttttttaaatggtcacatttcgtgcttctcagatttctgagaaaatgttttgtattgtatattacaatgatcactggctgagaatattgttttacaatagttcttatgggggtgggttttttgttgttattaaacaaacactttagat

SEQ ID NO: 3145 - DNA, 3324 bp, Rattus norvegicus
  Genbank Accession No. NM_012804
gaattccagtgcggctcgctcgccctgccggtgccatggcggccttcagcaagtacttgacggcgcggaactcctcgctggcgggggccgcgttcctgctgttctgcctgctccacaagcggcgtcgcgccctcggcctgcacggtaagaaaagtggaaaaccgccattacagaataatgagaaagaaggaaagaaagagcgagctgtggtggacaaagtgtttttatcaaggctctcacagatcctaaaaattatggtccctagaacattttgtaaagagacagggtacttgatacttattgctgttatgctggtatctcgaacatactgtgatgtttggatgattcaaaatggcacactgattgaaagtggcatcattggtcgtagcagtaaagatttcaagagatacttattcaacttcatcgctgccatgcctcttatctctctggttaataacttcttgaagtatgggttaaatgagctcaaactgtgcttccgtgtgcggctcactagatacctctatgaggagtatctccaagccttcacctactataaaatgggcaacctggataacagaatagcaaacccagaccagctgcttacacaagatgtagaaaagttttgtaacagtgtagttgatctttattcgaatcttagtaagccatttttagacatagttttgtatattttcaagttaacaagtgcaattggagctcagggcccggcaagcatgatggcctacttgcttgtttctgggctattcctaactcgactcagaagacccatcggtaaaatgacgattatggagcagaagtatgaaggagaatatagattcgttaattcacggcttatcactaatagtgaagaaattgccttttacaatgggaataaacgagaaaagcagacaatccactctgtcttccgaaaactggtggaacacctacataatttcattttcttccggttttctatgggtttcattgatagcatcattgccaaatatattgccactgtagttgggtacctggttgtcagtcgcccgttcctagacctggcgcatccgcgacaccttcacagcacccactcagagctgctggaggattactaccaaagtggaagaatgcttttgagaatgtctcaagctttggggcggatagttttggctgggcgtgaaatgactagattggctggttttacggctcggattacggaattaatgcaagtactaaaggatttaaatcatggcaaatatgaacgtacaatggtgtcacaacaggataagggtattgaaggagcacaagctagtcccttgatacctggtgctggagaaatcatcaatgcagacaacattataaagtttgatcatgttcctttagcaacaccaaatggagatatcttgatccaagaccttagttttgaagttcgatctggggccaacgttctcatttgtggtccaaatggctgtggaaagagctccctcttccgtgttcttggtgaattatggcctctctttggaggacatcttactaaacctgagagaggaaagttattttatgttcctcagcgaccctatatgaccctgggaacactgagagaccaagtaatatatccagatggaaaggaggatcagaagaagaaggggatatctgaccaagtgctgaaggggtacttggacaatgtacagttgggccatatccttgagcgggaaggaggctgggacagtgttcaggactggatggatgtactcagcggaggagaaaaacaaagaatggcgatggcaagattgttttatcataaaccccagtttgccattctggatgagtgcacaagtgcagttagtgtggatgtggaagactacatttacagccactgtcggaaggttggcatcaccctcttcactgtctcacacaggaaatccctttggaaacaccacgagtactacctgcacatggatggcagaggcaattatgaattcaaaaagatcacagaagacacagttgagttcggatcatagagaccatctggagaacttcacacttcacaagagaatgaatgaacagaatgcatttgtaaacaacgtgcattgtaaaataaagttaagcttgttttttttaaaaaaacaaagctacaaattgactagatataggataattgaaacatgttaaaacatttaatattgtataggatattgctaattgtgtatatgttggtttaattattaattatgtactaagaatgtccttattcttgtggttaaaaaacctgcctgaattaaattgggcttaaatcagtgtaacctgattcatgggatgtaaaccatttgaagtcagctaatttgacttttatagctctgtctttttctttaatgaagaaccctatttaaaactgggtcattagctgtttattctaacaaagtagtcttgagttcctttttgggtttttttttttttttttttttttttttttttgtgccccatggtagtgggaaccaaaccaatcacaatgttttattggaacatattccatcatcacaggatagcatttattaaacagtggcggatttctctagctgctacatttattctcattcctcatacataccttgaggtgcatttgattccaggagagccatttgggttttctttagctaaataataaatgtacccgtctcagtcttttggactgagtcgttctgaaggctctcgtgtggacagcagtgtgtgcagtctcttacagtccgtgcctgctccacatggtaccagtcttaccagtgcttgagagctcagacacaccctgctgcatgaagttggaggtctcgggagggttttagattttgtgacgggaaccggaaaggctcgtcagagtgtggctgtgtcatggtgagcaccacgtggctgtagaggcccgacatgaggtaatgcactgagcacacaacgccactgctgctgtctgtggctgtgggttcttaaaagtgctggactttgtcatgctcgtgggccaatgacatttcctaggagcggcctctgactcctgtgcagctgcgtctgtgtcagctctggctccctggaaccacgagtgactttgcacaaaggagggctgagagcggacttgatcagtaagtcgtcgtgaatcagtttgcttgagtgggctcggaatgggccttatcacgatggttttgtttcttcgtaactcataatcactggctaccaggataaccctgatgtattgattccgtgaatacatcacattcaatcttaccatgtctccttagcaaacgtgtgtacttattttctgttcagattaaaaaaaaaaaaaaggaattc

SEQ ID NO: 3146 - DNA, 1969 bp, Rattus norvegicus
  Genbank Accession No. NM_012811
ctagcatcggagcttgtggaccatttcccgcgtcccgcagcatgcagttctcccgtgtgctggccgcgctgtgcggtgtgctgctctgcgcctccggcctcttcgctgcgtccggtgacttctgtgactccagcctgtgcctgaatggtgggacctgcttgatgggccaagacaatgacatctactgcctctgccctgaaggcttcacaggccttgtgtgcaacgagactgagaaaggaccgtgttccccaaacccttgcttccacgatgccaaatgcctggtgactgaggacacacagcgaggggacatcttcactgagtacatctgccagtgccctgtgggctactcgggcatccactgtgaactcggctgttccacaaagctgggcttggaagggggcgccattgccgattcacagatttctgcctcgtctgtgtatatgggcttcatgggcttgcagcgctggggcccggagctggctcgcctgtaccgcacagggattgtcaatgcatggacagccagcagctatgatagcaaaccctggatccaggtggactttctgcggaagatgcgggtatcaggtgtgatgacacagggtgccagccgtgccgggagggcggaatacctgaagaccttcaaggtggcttacagcctcgatggacgcaggttcgagttcatccaggatgaaagcggaaccggagacaaggagtttatgggtaaccaggacaacaacagcctgaagattaacatgttcaaccccactctggaggcacagtacataaggctgtaccctgtctcgtgccaccgcggctgcaccctccgcttcgagctcctgggctgcgagttgcatggatgctctgagcccctgggcctgaagaataacacgattcctgacagccaaataacagcctccagcagctacaagacgtggaacctgcgtgcctttggctggtacccccacttggggcggctggacaatcagggcaagatcaatgcctggacagctcagagcaacagtgccaaggaatggctgcaggttgacctgggcactcagaaaaaagtgacaggaattatcacccagggggcccgtgactttggccacatccagtatgtggcatcctataaggtagcccacagtgatgatggtgtgcagtggaccgtatatgaggaacaaggaaccagcaaggtcttccagggcaacttggacaacaactcccacaagaagaacatctttgagaaacctttcatggctcgctatgtgcgtgtccttccactgtcctggcataaccgtatcaccctgcgcctggagctgctgggctgttagtgcccagtccttccagcccaagtgacgaggacggccagaggctgaggggcctcctggccctgcctcccaggccctgctgccttctgtggctgacaccttctcaatcctccctcttgattgcactgggactacaggcaggaagggcaagggggtttcagagttgcccctcacccttcccctcaccctgcagcccccacaggcctcctgctagccccttctctcaggcattctgggggagttggacaggtctgagatgaatagagaagaagagtgaagttggggtatgtgggctgctgtaccaaccaccccaagtcctaaactttctccaggggttgactcaagactaaagggaacctctggttgcccacccgtctctgcacaccgcacatccctccatgttccattcctggaaggagaggcccacgtccgcttgctgccccttgggtcaccagatcctgcctcttatctcctgagacccctcttgaccctcgctctggagcctcggttgacaagaggactgtcgggtctggagagatagatgggctctgggtggttggcgagctggctatgggacctctgctggcttgctacccaagttaacaagcagattccaaaatacatttgtgctctccaaaaaaaaaaaa

SEQ ID NO: 3147 - DNA, 395 bp, Rattus norvegicus
  Genbank Accession No. NM_012812
cctcttaaggtcctcagtcggagcatggccagcgcatccaaaggagaccacggaggcgcaggagccaacacttggcgcctcctgacctttgtgctggctctccccagcgtagctctctgctcgcttaactgctggatgcacgctggccaccatgagcgcccagaattcatcccctatcaccacctccgcatccgaaccaagcccttctcctggggggatgggaaccacacgcttttccacaatccccacgtcaatcctttgcccaccggctacgagcagccttgaagactcagcagacgtactctgccacagtctcaaactgacctccataccggctctaagggcccctgaggttccagtggacagttccaagcgcaataaaggtgtgaaacttt

SEQ ID NO: 3148 - DNA, 1223 bp, Rattus norvegicus
  Genbank Accession No. NM_012813
ccggcgttgtgctgaggctgccaccactgaccctgggacaccgaggctgcgatgagcccctgcgggcgggccctacatacatccagaggggccatggccatgctggcgcggaaattcccgcgtacccggctacccgtgggagccagtgccctctgtgtggtggtcctctgttggctctatgtcttccctgtctaccggctgcccaacgagaaggagatcgtgcaaggagtgctggcgcagcgcacagcttggaggaggaaccagacgtcagccaggctcttcaggagacaaatggaagactgctgcaaccccgcccatctctttgcaatgacgaaggtgaactcccccatggggaagagcctgtggtatgacggggagtttctatactcgctcaccatcgacaactccacgtactccctcttcccccaggcaacccccttccagctgccattgaagaaatgtgcggtggtgggaaacggtgggattctgaagatgagtggctgtggccgtcaaatagatgaagcaaattttgtcatgcggtgtaaccttcctcccttgtcaagtgaatacaccagagatgtgggttccaagactcagttggtgacagctaaccccagcataattcgccagagatttgaaaacctgctgtggtccagaaagaagtttgtggacaacatgaagatctataaccacagttacatatacatgcctgccttttctatgaagacgggaacagagccgtctctccgtgtgtactacaccctgaaagacgctggagccaatcaaacagtgctttttgctaaccccaactttcttcgaaacattggaaagttctggaagggtagggggatccatgccaagcgcctgtctacaggactctttttggtgagtgcagccttgggcctttgtgaggaggtgtccatctacggcttctggcccttctccgtgaacatgcaaggggaacctatcagccaccattactatgacaacgtcttgcccttctcaggcttccatgccatgcctgaggagtttcttcaactctggtatcttcataaaatgggtgcactgaggatgcaactggacccatgtgaggagccgtcgccgccacagcccacttcctagggactgcagaagaggaaaagactggatgggggtatttttttgctagatttttttttatgtgactttcaaaaggagctgccaaagtgtgtcatggattggcg

SEQ ID NO: 3149 - DNA, 1504 bp, Rattus norvegicus
  Genbank Accession No. NM_012816
gctgcgtggcgtcagggttctggagctggcaggcctggccccagggccgttctgcgggatgatcctggcggacttcggcgccgaggtggtgctcgtggacagactgggctccgtgaaccaccccagtcacctggcccgaggcaagcgctcgctggcgctggacctgaagcggtctccgggagccgcggtgttgcggcgcatgtgcgcacgcgcggacgtgttgctggagcccttccgttgcggtgtcatggagaaactccagcttgggccagagactctacggcaggacaatccaaagctcatctatgccaggctgagtggatttggccagtcgggaattttctccaaagtagctggccatgacatcaactatgtggctttgtcaggtgtcctgtcaaagattggcaggagcggtgagaacccataccctcccctgaacctcctggccgactttggtggcggtggcctcatgtgcacattgggcattttgctggctctcttcgaacgcacgcggtctggcctagggcaggtcattgatgcgaacatggtggaaggaacggcatacttaagtactttcctgtggaaaactcaggccatgggtctgtgggcacagcctcgagggcaaaacctgttagatggcggggcacctttctacacaacctacaagaccgcagatggggagttcatggctgtaggtgcaatagaaccccagttctacacactgctgcttaaaggacttggacttgagtctgaggaactccccagccagatgagcatagaagattggccagaaatgaagaagaaatttgcagatgtgtttgcaaggaagactaaggcagagtggtgccagatctttgacgggacagatgcatgtgtgaccccagtgctgactcttgaggaggccctccaccaccagcacaacagagaacggggctccttcatcactgatgaggagcagcatgcatgcccccgtcctgcaccccagctttccagaacccctgctgttccttctgccaaaagggacccttctgtgggagagcacactgtagaggtgcttaaagactatggattcagtcaggaagagatccatcagctgcactcggatagaatcattgaaagtaataagctaaaagccaacctctgactcaggttcacagctcaagtgaatctgaaggctgtatctgtactggagaaggatgcccaccactgtccgtatggaaatgtgaatgaacagtaatgaagtaatccaaatattccaatcaagacacaacgaaagactgattacagagaaatgactgtgctctcacactgctcatccgagcctctgattgaggagtatttttgtgtgtgtactgatattaacttgtggcagttttctgcctttcagcttacttggtgaagtgcattcactgattaaaacccttttgtaaatgcaactctgataatatattaaatgaactaatataactttaataaataaagcttttttttccttgaaaaaaaa

SEQ ID NO: 3150 - DNA, 1451 bp, Rattus norvegicus
  Genbank Accession No. NM_012819
ccggccatggctgcgcgcctgctcctccgctcccttcgtgtcctgagcgcccgctcggcgacactcccgccgccctccgcccgatgttctcattctggagcagaagcacgtctagaaactccttctgctaaaaaattaactgatattggaatcagaagaatcttttcctcagagcatgacattttccgggagagtgtaaggaagttttttcaagaagaagtgattccctaccacgaagaatgggagaaagccggagaagtgagtagagagctctgggaaaaagctggcaagcaaggcctgcttggcatcaacattgcagagaaacatggcggcatcggtggggacttgttgtcaacagcagttacttgggaagagcaagcatactcaaattgcacaggccctggtttcagcctccattcagatattgtcatgccctatattgcaaattacggcacaaaagaacagatcgagcagtttatcccccagatgacggcgggcaagtgtattggtgccatagccatgacagagcctggggctggaagtgacttacaaggagtaagaacaaatgccaaaaggtctgggagtgattggattctcaatggaagcaaggtgttcatcactaatggctggttaagtgatctcgtgatcgtagtggccgtcaccaatcgtgaagctcgatcgcccgctcatggcattagcctctttttggtggagaatggaatgaaaggatttattaagggcaagaagctacataagatgggaatgaaagcccaggacacagcagaactattctttgaagatgttcgattgccagctagtgccctacttggggaagagaataaaggcttctactacctcatgcaagagctcccacaggaaaggcttttaattgctgatttggcaatttctgcctgtgagttcatgtttgaagaaaccaggaactacgtgagacaaagaaaggcttttggaaaaacagtcgcacacatccagactgtgcagcacaaactagcagaattgaagacgaacatatgtgttaccagagcttttgtggacagctgcctacagctgcatgaaaccaaacgtctggactccgcctccgcttccatggcgaaatattgggcatctgaattacaaaacactgtagcttatcagtgtgttcaactccatggaggctggggttacatgtgggaatacccgattgcaaaagcctacgtggatgctcgagttcagccgatctacggtggtaccaacgaaatcatgaaagagctgatcgcaagacagatcgtcagtgacagctagacatctgcctacatcctgaaatcctactacatcacagctaatccggattcaaatatacttgagataaagtggaacctggaagggggggggtagtaaagctggttttatgtatggttgttacagagaaagaaataaaagaattataaagattg

SEQ ID NO: 3151 - DNA, 435 bp, Rattus norvegicus
  Genbank Accession No. NM_012824
ggatcatagtggtgggaggtggtgggtactagtgatgccccctatccgcgcgcgtctgcctccagggtgcccctccagccaggatgaggctcttcatcgcacttcctgtcctgatcgtggtcgtagccatggctttggaaggcccagcccctgcccaggcggcccctgacttttccagcgcaatggagagcttaccggataaactaaaagagtttgggaacactttggaagataaggcccgggcagccattgagcatatcaaacagaaggaaattatgatcaagactcggaactggttttcagagacgctcaacaaaatgaaggagaaattaaaaaccacatttgcctgagtgcctggcgagccacctcgcagcagcaaagagggccacgtgacgggccaggtccctcttcaaataccaataaaaacttgtagag

SEQ ID NO: 3152 - DNA, 1250 bp, Rattus norvegicus
  Genbank Accession No. NM_012826
ctcacactacagtagcaatggtgcctgtcctgttgtccctgcctctccttctgggtcctgcagtccttcaggagactgggtcttattctctgatcttcctctacaccgggttgtccaggcccagcaaaggccttccgaggtttcaagccaccgcatttctcaacgatcaggccttcttccactacaacagcaacagtgggaaggcagagcccgtggaaccctggagccatgtggaaggaatggaggactgggagaaggaaagccagcttcagagagccagggaggagatcttcctcgtgaccctgaaagacatcatggactattacgaggacagtacagggtctcacacctttcagggaatgtttggttgtgagatcacaaataacagaagcagtggagcagtctggaggtatgcctacgatggagaagatttcatcgaattcaacaaggaaatcccagcctggatccccttagacccagcagccgcaaacaccaagctgaagtgggaggcagaaaaggtctatgtgcagcgagccaaggcatacctagaggaggagtgtcctacaatgctgaagaagtacctgacctacagtagatctcacctggaccgaacagatcctcccactgtgaaaatcaccagccgtgtggccccaggaagaaacagaatattcagatgtctggcctatgacttctacccacaaagaattagtctgcactggaaccaggccagcaagaagctggcatctgaaccagaaagaggtgtttttcccaatggaaatggcacttacctctcctggatggaggtggaagtccccccacagaacagagacccctttgtctgccacatagaacacaaggggctatcccaatctctctcagtgcagtgggatgagaaaagtaaagtctgaaaacagtgctgtatctcagcctcagaaaggttaccctctctgccggatatgagagagttgaacttcagaagtcactgtcaccagcaagccagcaagtctccaaggaatgggtgtgggcccagaagatttgaataccaagcaccaagttcactctcaaagtcaaatcaatcaccttgccttgtaaaactcctcctcaattaatctgtaagcccttgcaattaccttcacgcccagcacagcacagaaaggcactttaaactctgagatgctacagaagtgtgagttgattttatcatgtatactgccccgacatacttgattcatgggaatgtctccatattc

SEQ ID NO: 3153 - DNA, 4918 bp, Rattus norvegicus
  Genbank Accession No. NM_012833
tgcactttaacatctgctttcccagaggaaaaagtaaaggagaaacagtacaatcatagaagagtcttcgtaacagaagcgcgaggagagcattatggacaagttctgcaactctactttttgggatctctcattactggaaagtccagaggctgacctgcctctttgttttgagcaaactgttctggtgtggattcccttgggctttctttggctcctggctccttggcaactttacagcgtgtacagatccaggaccaagagatcttctataaccaaattctaccttgccaagcaggtgttcgtcgtgtttcttcttattttagcagccatagacctgtctcttgcgctcacagaagatactggacaagccacagttcctcctgtcagatatacgaatccaatcctctacctgtgcacatggctcctggttttggcagtccagcacagcaggcaatggtgtgtacgaaagaactcttggttcctgtctctgttctggatcctctcggtcttatgcggcgtattccagtttcagactctgatacgagcactcctgaaggacagcaagtccaacatggcctactcctacctgttcttcgtctcctacggtttccagattgtcctcctgattcttacagccttttcaggaccaagtgactcaacacaaactccatcagtcacggcttcctttctgagtagcattacatttagttggtatgacaggactgttctgaaaggttacaagcatccactgacactagaagatgtctgggatatcgatgaagggtttaaaacaaggtcagtcaccagcaagtttgaggcggccatgacaaaggacctgcagaaagccaggcaggcttttcagaggcggctgcagaagtcccagcggaaacctgaggccacactacacggactgaacaagaagcagagtcagagccaagacgttctcgtcctggaagaagcgaaaaagaagtctgagaagaccaccaaagactatcccaaatcgtggttgatcaagtctctcttcaaaaccttccacgtagtgatcctgaaatcatttatactgaaattaatacatgaccttttggtgtttctgaatcctcagctgctgaagttgctgatcggtttcgtgaagagctctaactcatacgtgtggtttggctatatctgtgcaatcctaatgtttgctgtgactctcatccaatctttctgccttcagtcttactttcaacattgttttgtgttgggaatgtgcgtacggacaaccgtcatgtcttcgatatataagaaggcattgaccctatctaacttggctaggaagcagtacaccattggagagacggtgaacttgatgtctgtagattcccagaagctaatggatgcgaccaactacatgcagttggtgtggtcaagtgttatacagattactttgtccatcttcttcctgtggagagagttgggaccgtccatcttagcaggtgttggggttatggttctcctaatcccagttaatggagttctggctaccaagatcagaaatattcaggtccaaaatatgaagaataaagacaaacgtttaaaaatcatgaatgagattctcagtggaatcaagatcctgaaatactttgcctgggaaccttcatttcaagagcaagtccagggcattcggaagaaagaactcaagaacttgctgcggttcggccagctgcagagtctgctgatcttcattttacagataactccaatcctggtgtctgtggtcacattttctgtctatgtcctggtggatagcgccaatgttttgaatgcggagaaggcatttacctccatcaccctcttcaatatcctacgcttccctctgtccatgcttcccatggtgacctcatcgatcctccaggccagtgtttctgtggaccggctggagaggtatttgggaggagacgatttagacacatctgccattcgccgcgtcagcaattttgataaagctgtgaagttttcagaggcctcttttacttgggacccggacttggaagccacaatccaagatgtgaacctggacataaagccaggccaactggtggctgtggtgggcactgtaggctctgggaaatcctctttggtatcagccatgctgggagaaatggaaaacgttcacgggcacatcaccatccagggatccacagcctatgtccctcagcagtcctggattcagaatggaaccatcaaagacaacatcctgtttgggtccgaatacaatgaaaagaagtaccagcaagttctcaaagcatgcgctctcctcccagacttggaaatattgcctggaggagacatggctgagatcggagagaaggggataaatctcagtggtggtcagaagcagcgagtcagcctggccagagctgcctatcaagatgctgacatctatattctggacgatcccctgtcggctgtggatgctcatgtgggaaaacacattttcaacaaggttgtgggccccaacggcctgttggctggcaagacgagaatctttgttactcatggtattcacttccttccccaagtggatgagattgtagttctggggaaaggcaccatcttagagaaaggatcctatcgtgacctgttggacaagaagggagtgtttgctaggaactggaagaccttcatgaagcattcagggcctgaaggagaggccacagtcaataatgacagtgaggcggaagacgacgatgatgggctgattcccaccatggaggaaatccctgaggatgcagcttccttggccatgagaagagaaaatagtcttcgccgtacactgagccgcagctctaggtccagcagccgacgtgggaagtccctcaaaaactccttgaagattaaaaatgtgaatgtcttgaaggagaaggaaaaagaagtggaaggacaaaaactaattaagaaagaatttgtggaaaccgggaaggtcaagttctccatctacctgaagtatctacaggcagtagggtggtggtccatacttttcatcatccttttctacggattgaataatgttgcttttatcggctctaacctctggctgagtgcttggaccagtgactctgacaacttgaatgggaccaacaattcgtcttctcatagggacatgagaattggggtctttggagctctgggattagcacaaggtatatgtttgcttatttcaactctgtggagcatatatgcttgcagaaatgcatcaaaagctttgcacgggcagctgttaaccaacatcctccgggcacccatgaggttttttgacacaactcccacaggccggattgtgaacagattttctggtgatatttctactgtggacgacttgctcccccagacacttcgaagctggatgatgtgtttctttggcatcgctggcactcttgtcatgatctgcatggccaccccagtcttcgctatcatcatcattcctctcagcattctttatatttcggtgcaggttttttatgtggctacttcccgccagctgagacggttggattctgtcaccaaatctccgatctattctcacttcagtgagactgtcacaggtttgcccattatccgtgcctttgagcaccagcagcgatttctagcttggaatgagaagcagattgacatcaaccagaaatgtgtcttttcctggattacctccaacaggtggcttgcaattcggctggagctggttggaaacttggtcgtcttctgttccgccttgctgctggttatttatagaaaaaccttaaccggggacgttgtgggctttgttctgtccaacgccctcaatatcacacaaaccttgaactggctagtgaggatgacgtcagaagcagagaccaacattgtggcagttgagcgaataagtgaatacataaatgtagagaatgaggcgccctgggtgactgacaagaggcctccggcagactggcccagacatggtgagatccagtttaacaactatcaagtgcggtatcggccggagctggatctggtactgaaagggatcacttgtaacatcaagagcggagagaaggtcggcgtagtgggcaggactggggctgggaaatcatccctcacaaactgcctcttcagaatcttagagtctgcggggggccagatcatcattgatgggatagatgttgcctccattggactgcacgaccttcgagagaggctgaccatcattccccaggaccccattttgttctcggggagtctgaggatgaatctcgaccctttcaacaaatattcagatgaggaggtttggagggccctggagttggctcacctcagatcctttgtgtctggcctacagcttgggttgttatccgaagtgacagagggtggtgacaacctgagcatagggcagaggcagctcctatgcctgggcagggctgtgcttcgaaaatccaaaatcctggtcctggatgaagccacggctgcagtggatctcgagacggatagcctcattcagacgaccatccgaaaggagttctcccagtgcacggtcatcaccatcgctcacaggctgcacaccatcatggacagtgacaagataatggtcctagacaacgggaagattgtcgagtatggcagtcctgaagaactgctgtccaacagaggttccttctatctgatggccaaggaagccggcattgaaaatgtgaatcacacagagctctagcagctggttccgtggctggcggactataagaacagtttctattatttgctttggtttctgtgactgtgctctaggtgcaaagacacatattttgttcccgttgctcaggctggcctcaaactctaaggctccagcaatctctggtctcagccagagacctgtaaaaatagacacttcaaagattatcatgaataaata

SEQ ID NO: 3154 - DNA, 318 bp, Rattus norvegicus
  Genbank Accession No. NM_012839
atgggtgatgttgaaaaaggcaagaagatttttgttcaaaagtgtgcccagtgccacactgtggaaaaaggaggcaagcataagactggaccaaacctccatggtctgtttgggcggaagacaggccaggctgctggattctcttacacagatgccaacaagaacaaaggtatcacctggggagaggataccctgatggagtatttggaaaatcccaaaaagtacatccctggaacaaaaatgatcttcgctggaattaagaagaagggagaaagggcagacctaatagcttatcttaaaaaggctactaatgaataa

SEQ ID NO: 3155 - DNA, 4801 bp, Rattus norvegicus
  Genbank Accession No. NM_012842
caaaaggagaagccatcagggaaggaatcctatctgcatatttcgtctttagccccatccctcattcccggtggggtttggaactttccatcaattctttccctgtctcatttctctttgagcctttgcctagctgtgcctgtcacagcgagaaatcagtcaccctccgccttccagcactcttaggctctgagaaatttggcatacgggtgtcaggtattaaaacagctaaataaaagatgccctggggctgaaggccagcgtggctggaagttctgggggtcagaagcctgactccgcctgctccaagctctagcaatttaagtcacccgggggttttttgttttggtttggtttggtttttcttgaccttagaaccaccgagaccatgctgttctcgctcaccttcctgtcggtgtttttaaagattactgtactcagtgtcacagcacagcagaccaggaactgtcagtcaggtcctctcgagagaagcgggactaccacgtatgccgccgccggtcctcccaggttcctgattttcttacaaggaaacagcatctttcggattaacacagatggaacaaatcaccagcaattggtggtggatgccggcgtctcagtggtcatggattttcattacaaggaagagagactctattgggtggatttagaaagacaacttttgcaaagagttttctttaatgggtcaggacaagagacagtgtgcaaggtggataagaatgtgtctgggctggccataaactggatagatggggagattctccggacggaccgatggaagggagtcatcacagtaacagatatgaacgggaacaattcccgtgttcttctgagttccttaaaacgtcctgcaaatatattagtggatccaacagagaggttgatattttggtcttcagtggtgactggcaaccttcacagagcagatctcgggggtatggatgtaaaaacactgctggaggcaccagagaggatatcagtgctgattctggatatcctggacaaaaggctcttctgggctcaggacggtagagaaggaagccacggttacattcactcctgtgactataacggtggctccatccatcatatcagacatcaagcacggcacgatttgcttactatggccattttcggtgacaagatcttatactcagcactgaaagagaaggcgatttggatagccgacaaacacactgggaagaatgtggttcgagttaacctcgatccagcctctgtgccgccaagagaactgagagtcgtgcacctacatgcacagcccgggacagagaaccgtgctcaggcctctgactccgaacgatgcaaacagagaagaggacagtgtctctacagtctctctgagcgagaccccaactcagactcgtcggcatgcgctgaaggctatacgttaagccgagaccggaagtactgcgaagatgtcaatgagtgtgccttgcagaatcacggctgtactcttgggtgtgaaaacatccctggatcctattactgcacatgccctacaggctttgttctgcttcctgatgggaaacgatgtcacgaacttgttgcctgtccaggcaacagatcagagtgtagccatgattgcatcctgacatcagatggtcctctgtgcatctgtccagcaggttcagtgctcggaaaagatgggaagacatgcactggttgttccttctccgataatggtggatgcagccagatctgccttcctctcagcctagcatcctgggaatgtgattgctttcctgggtacgacctacaattggaccgaaagagctgtgcagcttccatgggaccgcagccatttttactgtttgcaaattcccaggacatacgacacatgcattttgatggaacagactacaaaactctgctcagccggcagatgggaatggtttttgccttggattatgaccccgtggaaagcaagatatattttgcacagacagccctgaagtggatagagagggctaatctggatggctcccagcgagaaagacggatcacggaaggagtagacacgccagaaggtcttgccgtggactggattggccggagaatctactggacggacagtgggaagtctgtcattgaagggagtgatttgagcgggaagcatcatcaaataatcatcaaagagagcatctcaaggccacgaggaatagctgtgcatccaaaggccaggagactattctggacggacacggggatgtctccgcggattgaaagctcttcccttcaaggttctgaccggacgctgatagccagctctaatctactggaacccagtggaatcgcgattgactacttaacagacactttgtactggtgtgacaccaagctgtctgtgattgaaatggccgatctagatggttccaaacgccgcagacttacccagaacgatgtaggtcacccattctctctagctgtgtttgaggatcacgtgtggttctcggattgggctatcccatcggtaataagggtgaacaagaggactggtcaaaacagggtacgtctccgaggcagcatgctgaagccctcgtcactggttgtggtccacccattggcaaaaccaggtgcagacccctgcttacacaggaatggaggctgtgaacacatctgccaagagagcctgggcacggctcagtgtctgtgtcgggaaggattcgtgaaggccccagatgggaaaatgtgtctcactcggaaggatgatcagatactggccggtgacaatgctgatcttagtaaagaggtggcatcgttggacaactcccctaaggcttatgtaccagacgatgataggacagagtcctccacactagtggctgagatcatggtgtcagggctgaactatgaagatgactgcggccctggtgggtgtggcagccatgcccactgtatttcagagggagaggcagctgtgtgtcagtgtttgaaaggatttgctggcgatggaaacctgtgttctgatatagacgaatgtgagctgggtagctcagactgtcctcccacctcgtccaggtgcatcaacaccgaaggtggctatgtctgccaatgctcagaaggctacgagggagatgggatctactgtctcgacgttgatgagtgccagcaggggtcgcacggctgcagcgagaatgccacctgcaccaacacggagggaggctacaactgcacctgtgcaggctgcccatcagcacctggactgccttgccctgactctacctcaccctctctccttggaaaagatggctgccactgggtccgaaacagtaacacaggatgcccgccgtcgtacgatgggtactgcctcaatggtggcgtgtgcatgtatgttgaatccgtggaccgctacgtgtgcaactgtgtcattggctatattggagaacgatgtcagcaccgagacttacgttggtggaagctgcgccatgctgactacgggcagaggcacgacatcactgtggtgtctgtctgtgtggtggcgctggccctgctgctcctcttagggatgtgggggacttactactacaggactcggaagcagctatcagagagctcaaagaagccttccgaagagtcaagcagcaacgtgagcagtaacgggcctgacagcagcggggctggggtgtcttctggtccccaaccttggtttgtggtcctagaggaacaccaacagcccaagaatgggcgtctgcctgccgctggcacgaacggcgcagtagtagaggctggcctgtcttcctccctgtaactcgggccagtgcacctgacttcctggagacagaagccccgaatatatgagatgggcacagagcaaagctgctggattccaccatcaaatgacaaaggaccccaggaaatggaggggaacccccacttaccctcctacagggaatggcctctagctgtgtgggctgagaagaagctgcattctctccagtcagctaatggatcgagtcaacaaagggcctcagacctgccccagcaaacagagccagttctgtagaaactgggagcagacagaaggtaccgaaagtgaaatagcaaaccaggctgaagggtggtagagcggcagatctggtactcctgtctccacggctaatcactgctcagggtcctgaagataactgcatagctgcatagctgatagccgcgacttctgcttcttgcttcaagcagtcccgttgaagacgatcaaaagagaagtggagaaaaatcatcagaaaccgaagtcaagacggttcacgtgtgtaagctgtgtccttcctacccctggactgttgggctcttttccttgttgtctcagaagaaatgggttaaagcaggcgatcacatgctttgttgattgcacagtagatgatatgatctacatagatcttagctcactctcacggaaaggctggaacattatagatgctgcaagatacactgcaagtgtggcccctgctcataattttgccttctgaattgtgattagtgaaaataattgtaacttagagtccgatttattcagaatcagagcattatttttatactatgaaaatctttgaatgaagatatttaactttaaaaacatttcctaagagacaacagtgtttcttaatcattgtcttttcttcttgcagtctttcccagtgaaaacggtaaattctgctgtttgcatagaatctttaacttatttttaagatatgagattgtaaacaaattgcttgatttatttcaatcaatttattctaattatttaaataaaatcacccctaag

SEQ ID NO: 3156 - DNA, 1242 bp, Rattus norvegicus
  Genbank Accession No. NM_012844
atgtggctggaacttgtcctggcttcccttctgggctttgtcatctactggtttgtctcccgggacaaggaggaaaccttaccactaggagatggatggtgggggccagggtcaaagccatcagccaaagaagatgagagcatccggcccttcaaggtggaaacatcagatgaggagatcaaggacttacaccagaggatagataggttccgggcatccccacctttggagggcagccgcttccactatggcttcaactccaactacatgaagaaagtggtgtcctactggaggaacgagtttgactggaggaagcaggtggagatcctcaaccagtaccctcacttcaagaccaagatcgaagggcttgacatccacttcatccatgtgaagcctccccagctgccctcagggcgcaccccaaagcccttgctgatggtgcatggctggcctggatccttctatgagttttacaagatcatcccactactgactgaccccaagtcccacggtctgagtgacgagcacgtgtttgaagtcatctgtccctcgattcctggctatggctactcagaggcatccagcaagaaaggtttaaattcggtggccactgcgaggattttctacaagctgatgacacggctgggcttccagaaattctacattcaaggcggggactgggggtccctcatctgcaccaacatggcccagatggttcccaaccacgtgaaaggcctgcacttaaatatggctttcatttcgagaagtttttacaccatgactcctctcctgggccaacgcttcgggagattccttggctacacagagaaggatatcgagctcttgtacccctataaggagaaggttttctacagcatcatgagggagagtggctacttacacatccaagccaccaagccagacactgtgggctgtgctctcaatgactctcccgtgggcctggctgcctacatcttagagaagttctccacctggaccaagtcagagtaccgtgaactggaggatggaggcctggagaggatgaaggtctttgtgcccactggcttttcagccttcccttccgagctactgcatgccccagaaaagtgggtgaaggtcaagtaccccaaactcatctcctattcctacatggaacgtgggggccactttgctgcctttgaagagcccaagcttctggcccaggacatccgcaagttcgtgtccctggctgagctgcagtag

SEQ ID NO: 3157 - DNA, 1680 bp, Rattus norvegicus
  Genbank Accession No. NM_012847
gcgggccgcggagggggcggggctccaccaccacctcagctgcggacggaggcgagatggcggccactgagggggtcggggaatctgcgccaggcggtgagccgggacagccagagcagccgccgcccccgcctcctccgccgccagcacagcagccgcaggaagaagagatggcggccgaggccggggaagcagcggcgtcccctatggacgacgggtttctgagcctggactcgcccacctatgtcttgtacagggacagggcagagtgggctgacatagacccagtgccccagaatgatggccccagtccagtggtccagatcatctacagtgaaaagtttagagacgtctatgattacttccgagctgttctgcagcgcgatgaaagaagcgaacgagcctttaagctcactcgagatgctattgagttaaacgcagccaactatacggtgtggcattttcggagagttctcttgaggtcgcttcagaaggatctgcaagaagaaatgaactacatcatcgcaataattgaggaacagcccaaaaactatcaagtttggcaccataggagagtattagtggagtggctgaaagatccttctcaagagctcgagttcatcgccgatatccttaatcaggatgcaaagaattaccatgcctggcagcatcgacagtgggtcattcaggagtttcgactttgggataatgagctgcagtatgtggaccagcttctcaaagaggatgtgagaaataactctgtgtggaaccaaagacacttcgtcatttctaataccactggctacagtgatcgcgctgtgttggagagagaagtccaatatactctggaaatgatcaaattagtgccacacaatgagagtgcgtggaactacttgaaagggattttgcaggaccgtggtctttccagataccctaatctattaaaccagttgcttgatttacaaccaagtcacagctccccctacctaattgcctttcttgtggatatctatgaagacatgctggaaaaccagtgtgacaacaaggaggacattcttaataaagcactagagttatgtgagattctagctaaagaaaaggacactataagaaaggaatattggagatatattggacggtccctccagagtaaacacagcagagaaagtgacataccggcgagtgtatagcagcaagagcggctggaagaagtggacaatgctttctaaggcctcttattcgggagtgtagagcggttagagcggtcatctcatgcctgtgagctaacgttgtccaggtgctgtttctaacaagaactaaggatgactcctgtgtctgacgctgttcagactagctaagagtcgatttcctaaagcaaggtcattggaggggagggtgaagaaaactttcccgtaaaggaactactgcttttgtagtcttcccaacatttaatccaatcctgtagaatcagcatctcctgaaagacatggtgcacggctgtgtgctgggcgtggctaagggcagctgtgtcatgggtttgcagtcatgggaacctcggagcgctgcccgggactgcattgatgattagggctgctggcctcacccacaggatcttgctatcactgtaaccaactaatgccaaaagaaaggttttataataaaatcacattatctacaaac

SEQ ID NO: 3158 - DNA, 1629 bp, Rattus norvegicus
  Genbank Accession No. NM_012850
aaacagcggactacaggcaccactgccatggacagcctgttgtgggctacctgggtcctctgcttgctgaacctgtggggagttgcactgggtcacctccacctagaatgtgacttcatcactcagctgagagacgatgagcttgcatgccttcaggcggcagaggggaccaacaactcgtccatgggatgccctgggacctgggatgggctgctgtgctggcccccaactggctctggccagtgggtctccctcccctgccctgaattcttctctcattttggctcagacccaggggctgtgaaaagggactgcaccatcacgggttggtctgatcccttcccaccatatcccgtggcctgtcctgtgcccttggaactgctaacagaggagaagtcttacttctccacggtgaagatcatctacaccacaggccacagcatctccattgtagccctctgcgtggctattgccatcctggttgctctcaggaggctccactgccccaggaactacatccacacgcagctgtttgctactttcatcctcaaggccagtgctgtgttcctgaaggatgctgctgtcttccagggtgatagcacggaccactgcagcatgtccactattctgtgcaaggtctctgtggccgtctcacattttgccaccatgaccaacttcagctggctgctggcagaagccgtctacctgagctgtctgttggcctccacatctcctaggtccaaaccagctttctggtggctggttctcgctggctggggactccctgtgctatgcactggtacgtgggtgggctgcaaactggcttttgaggacactgcgtgctgggacctagacgacagctccccctactggtggatcatcaaagggcccatagtcctctctgttggggtgaactttgggctgtttctcaatataatttgcatcctgctgaggaagctggggcctgcacaaggcggcttacacacacgggctcagtactggcggctttccaaatcaacacttctccttatcccgctgtttggaattcattacatcatcttcaacttcctgcctgacagtgctggccttggcatccgtctacccctggagctgggactggggtccttccagggttttgttgttgctgtcctctactgcttcctcaatcaagaggtgaggacggagatttcacgcaaatggtatggccatgaccctgaacttctgccagctcggcggacctgcactgagtggaccacacctccccgatcgagagtgaaggtgctcacctctgagtgctaggccagccatcacaaaggccgagccccaaaaccctgcactcaaactgccatgccaccaagggcaacaaggtcctcccttccgttctcattctctgcatctgctttctctaggtccctgtataccaacctccgactttctcagttcctgtatgcccccatctgttctttcttcctatctaggctattgcccaaggcccagggaaaccaataaacttgtacatgagtgatctgcagttgagtcaatgtggctctgaaggggagctcttgtcagcagccattatttgcacttccggtgcattcctcatcccttggctgcagctgcctcattgcc

SEQ ID NO: 3159 - DNA, 1432 bp, Rattus norvegicus
  Genbank Accession No. NM_012851
cctaggacccttcatgctctgagcatcagtaccttttcacatggactccacggtagtgctcattaccggttgctcttctggaattggcctgcacttggctgttcgtctggcttccgaccgttcccagagcttcaaagtttatgccacattgcgggatctgaagtcacagggaccattgttggaggcagccagggctcaaggatgccctcctggctccctggagatactggaattggatgtcagagactcggaatctgtggctgctgcccgggcatgcgtgacggagggtcgagtggatgtactggtctgtaatgctggacgcggcttgttcgggccgctggaagcgcatgagttgaacgctgtgggtgctgtactggatgtgaatgttcttgggaccatccggatgcttcaggcctttctgccagacatgaaaaggcgccactccgggcgtgtgctggtgactgcgagtgtgggaggtttgatggggctgccattccacgaagtgtactgtgccagcaagtttgcgctcgaaggtctgtgcgagagtctggcgatcctgctgccgctctttggagtccacgtgagcctcatcgagtgcggggcagtgcacacagccttccatgaaaagctggagggcggcccgggcggggctctggagcgagcagatgcccagacccgccacctctttgcccactatcagcgtggttatgagcaagccctgagcgaggcgcaggacccagaggaggtgacggagctcttcttgactgcgatgcgagccccgcagcctgcgctgcgctacttctccacaaaccgcttcctgccgctggcccgaatgcgcacagaggaccccagtggcagcagctacgtcgaagccatgcaccgcgaggccttctctgatctgcaggtccaggagggtgccaaggctggggcccaagtttcaggggatccagacacgccccccagagccctcatttgtctccccgagtgtgcaatccctagggtgacagctgaattgggatggtctgcatcagataaaccgggtcagaacaaatcatgttaccagcaaaagatctaagctagaatctctttttattattttagaatgtgttttgttttaagacaaggtttcactatgtagccctgtctgaactgtaactcataaagatccacctgcttctccttctgtgtgcaaccgcacacttctcagaatcatttgaaatagtgcaaacatcttcatgggtcaagataagagggctgtagtcggggttggggatttagctcagtggtagagcgcttgcctaggaagtgcaaggccctgggttcggtccccagctccagggggaaaaaaaacctaaaaaaaaaaagagggctgtagtcaaggttaagggtttttccttccaataaatgtacttattaattattaaaaaaaaaa

SEQ ID NO: 3160 - DNA, 2006 bp, Rattus norvegicus
  Genbank Accession No. NM_012857
gccggcgccgcagctgccgggcctctcgagtcggtggacgcgccctcccgccggcctcgccgcccgcgcaaccgccgtccttcggcctcggctgcgtcgcgccatggcggccccgggcgcccggcggccgctgctcctgttgctgctggcaggccttgcacacagcgccccagcactgttcgaggtgaaagacaacaacggcacagcgtgtataatggccagcttctctgcctcctttctgaccacctatgatgctggacatgtttctaaggtctcgaatatgaccctgccagcctctgcagaagtcctgaagaatagcagctcttgtggtgaaaagaatgcttctgagcccaccctcgcaatcacctttggagaaggatatttactgaaactcaccttcacaaaaaacacaacacgttacagtgtccagcacatgtatttcacatataacctgtcagacacacaattctttcccaatgccagctccaaagggcccgacactgtggattccacaactgacatcaaggcagacatcaacaaaacataccgatgtgtcagcgacatcagggtctacatgaagaatgtgaccattgtgctctgggacgctactatccaggcctacctgccgagtagcaacttcagcaaggaagagacacgctgcccacaggatcaaccttccccaactactgggccacccagcccctcaccaccacttgtgcccacaaaccccagtgtgtccaagtacaatgtgactggtgacaatggaacctgcctgctggcctctatggcactgcaactcaacatcacctacatgaagaaggacaacacgactgtgaccagagcattcaacatcaacccaagtgacaaatatagtgggacttgcggtgcccagttggtgaccctgaaggtggggaacaagagcagagtcctggagctgcagtttgggatgaatgccacttctagcctgtttttcctgcaaggagttcagttgaacatgactcttcctgatgccatagagcccacgttcagcacctccaactattccctgaaagctcttcaggccagtgtcggcaactcatacaagtgcaacagtgaggagcacatctttgtcagcaaggcgctcgccctcaatgtcttcagcgtgcaagtccaggctttcagggtagaaagtgacaggtttgggtctgtggaagagtgtgtacaggacggtaacaacatgctgatccccattgctgtgggcggggccctggcagggctggtcctcatcgtcctcatcgcctacctcatcggcaggaagaggagtcacgcgggctatcagaccatctagcctggtgggcaggtgcgccacagacgcacacgggcctgttctcacatccccaagcttagataggtgtggaagggagggaggcacacttgtggcaaactgttttcaaatctgctttatcaaatgtgaagctcatcttgcaacatttactatgcacaaaggaataactattgaaatgacggtgttaattttgctaactgggttaaatattttgctaactggttaaatgttaatatgttaccaaagtagagctctaaagaggacaagaaggctccacgcatttgacttttaagacttggtgtttggttcttcattcttttactcagatttacgccttacaaagggaatctctggtccagacacttgggcctggcaagggtggctgatggtggttaggctgcacacttgagaagcaaacaggagcagggacgtcctgccacacaggcacgcacagggtcagcctctggacacttggcttgggctgcctggcctggggggctagactctggcatctggctgggcacacccaccagtgtttctgtgctctgccgcctgtgagctaccactttcctaaatagaaaatggcattatggggttggggatttagctcagtggtagagcccttgcctaggaagcgcaaggccctgggttcggtccccagctccggaaaaaaaaaaaagac

SEQ ID NO: 3161 - DNA, 318 bp, Rattus norvegicus
  Genbank Accession No. NM_012876
ctcgttcctttttcctccttgggcgtctgaaggcaagatgggtcaccagcagctctactggagtcacccgcggaagttcggccagggttctcgctcttgccgcgtctgctctaaccgccacggtctgatccgtaaatacgggctgaacatgtgccgacagtgcttccgtcagtacgcgaaggacataggcttcattaagttggactaagcgacctgaatggatgattcgactgtctacccaatgaaaccaactgtctaccctgtgataccaatcatgctagtctttgcgcacacagaataaaaaactgaaggcctcta

SEQ ID NO: 3162 - DNA, 2573 bp, Rattus norvegicus
  Genbank Accession No. NM_012879
actccgcttgctcctcctcctacaatgtataaccaggcagagctgaggacagctactcatccacattcggaacaggacctggattgagacaacaactccgcacacaacatgtcagaagacaagatcaccggaaccttggctttcactgtcttcactgcagtgctgggttccttccagttcggatatgacatcggtgtgatcaatgcacctcaagaggtaataatatcccattatcgacatgttttgggtgttcctctggatgaccgaagagctaccattaactatgacatcaatggcacagacaccccactcatagtcacaccagcacatacgacaccagacgcctgggaagaagagactgaaggatctgctcacatagtcactatgctctggtctctgtctgtgtccagctttgcagtaggcggaatggtcgcctcgttctttggtgggtggcttggggacaaactcggaaggatcaaagccatgttggctgcaaacagcctctcgttgactggagccctcttgatggggtgttccaaatttggaccggcacatgctctcatcattgctggaagaagcgtatcaggactgtactgtgggctaatttcaggactggttccaatgtacattggcgagattgctccaaccacactcaggggtgccctgggcactcttcaccaactggctcttgtcacaggcattcttattagtcagattgctggcctcagcttcattctgggcaatcaggattactggcacatcctacttggcctatctgctgtaccagctctcttgcagtgtctgctactgctcttctgtccagaaagccccagatacctttacctaaatttggaagaggaagtcagggcaaagaaaagcttgaaaagactaaggggcactgaggacatcaccaaagatattaatgagatgaggaaagaaaaggaagaggcgtcgactgagcagaaggtctccgtgatccagctcttcacggatccgaattatcggcagcccattgtggtggcactgatgctacacttggctcagcagttctctggaatcaatgggatattttactattcaaccagcatttttcagacagctggcatcagccagcctgtgtatgcaaccatcggcgttggtgccatcaacatgatcttcacagctgtctctgtgctgcttgtggagaaggcggggcggcggaccctgttcctggccgggatgattggcatgtttttctgtgccgtcttcatgtcgctgggactggtgttgctggataagttcacctggatgagttatgtgagcatgacggccatcttcctcttcgtcagtttctttgagattgggccaggtccaatcccttggttcatggttgctgaatttttcagccaaggaccccgtcccacggctctggcactggctgcctttagcaactgggtctgcaatttcatcatcgccctctgcttccagtacattgcggacttcctcgggccttacgtgttcttcctttttgctggggtggtcctggtcttcaccctgttcacattttttaaagttccagaaaccaaaggaaagtcttttgacgaaattgctgcagaattccggaagaagagtggttcggccccaccacgcaaagccactgtacaaatggaattcctggggtcatcagagactgtgtgaggatgagctgcctaaaatccaggaacagaccagaagggaaccaggtgctccctcttaactcgaatccttcatgagtgtaggactacacccaggaggatcatttattccttttgaagaatttgtacagactccgattagaaacgtcaacatatatcattaccaaagaaagtatttttttaacttagagaatctattttggatggtaaaactcttcagtaaaccagaggctgctctgcttctctacagggaaagcacgttataagcttcctcgcctggttctactgaaattggagagctttcaacatatcactgctcttaaaagcacgtgactaagaaatctgaagctacaactgatatatatatatttaaatataattccattggaattttcttagccacagatctgatgctgaaggacctatggctggcaaggctcacactcaaactgacgtctctgttacccacctcggtttctctcacatgtactagactttgtgttttgttttaaactatttttctgcatttttatagagaactcctgagtatgttaagctatatttgtaatgaaaagcctcttctttacagctaccaaaatcttcatgtagtgagagaaaacgtttcagtttctttgatgtatattgtaaggttaaacgctcgagtttttcctagccattgagtctagattatcagttaatattagcatctaaaccatgttagttactctccatttcagtcctttgtattgtacttttacttgtttttttttttaattgcccatggcacacacttaaaaccatcaggagtcaggcattttgcatattgcctccaaaatctaataaactggaccaatcacagggaaatctggaataaagagctgctctatttgttcatttttt

SEQ ID NO: 3163 - DNA, 1729 bp, Rattus norvegicus
  Genbank Accession No. NM_012880
ggctcacaagcagctggccagttctggggaggcagctcagaggctctttctcaggcctctagctgggtctgtcctgtacttcaccagaggaaaaacgttcttgggagagcttgtcaggtgtggaacctcagccatggtggccttcttgttctgcaacctgctactggtggcctgtggctctgtcacctggaccatgtcagataccggagagtccggtgtcgacttagcagaccggcttgacctggttgagaagataggcgacacgcactccaaagacctggagatctggatggagctaggaaaacaacgggaggcggatgccagggagatgcacgcagtctgcagggtacagccctcagccatgctgcctcccgatcagccacagatcacaggcttggtcctcttccggcagctggggcccagctccagacttgaggcctccttcaatctggagggcttcccagccgagcagaacacctccaaccacgccatccacgtgcatgagttcggggacctgagccagggctgcgagtccaccggaccacactacaacccgctgggtgtgccgcacccacagcacccgggggacttcggcaacttcgtggtgcgcgatggccgcctttggaagcatcgaatgggcctggccacgtcactggccggaccgcactcgatcttgggccgcgctgtggtggtccacgctggcgaggacgacctgggtaaaggtggcaaccaggccagcgtgcagaacggcaacgcaggtcgccggctcgcctgctgcgtggtaggcaccagcaactcggaggcctgggagagccagacaaaggagcgcaagaagcggcggcgggagagcgagtgcaagaccacttaagcatcacccagggccgcctagcctagctgctgcgcgcatagatgcctccacacgcgccctctagacgcctccagtcatcctagaggtctctgggtgtcctagactgacgcttcccagacacctcaatcgcctctgtgcgccccacactcttccacataccccagacacctctgtatggctcagatgccttcaagaacctcctcggccacgtccacgagccccagatgttcccacgtgccctgggcactgttctcggagaccaggacacttttttgtaacctaggaatccttcacacctatgcactccacagaccaactccttcgtgctctaggtccacctcgaactactttatgccccaagacaatcccataagcccctagcatcccctttgaaacagtctttgagtttgctcccagagaattccccgcttacccccagaggtcgaatgtgcgcagataactctccttttactctgaggacatcccagtggaccttctagagaactcccttggggtgttctgaaatatcaccaccccacttccttctgcccccttttgttttctttctgtcccctagcacccgagacttctctcttccctagagacctcgtttgtcttccccttgttcctcctagggctctgggaccaccctgacacacacacacacacacacacacacacacacacacacacacacacacacacatccctaagattccatgttcctgatcacctcctgccgggcccctggttctgttttcatctgtttcccatatggtgcctgcaccccaaggagagcagctcctccgagagtatttgacaacctttatgctgctcattaaaaccacagcaattcaaaaa

SEQ ID NO: 3164 - DNA, 1457 bp, Rattus norvegicus
  Genbank Accession No. NM_012881
gcaagcctcagcatccttggctttgcagtctcctgcggcaagcattctcgaggaagccagccaaggaccaactacaaccatgagactggcagtggtttgcctttgcctgttcggccttgcctcctgtctcccggtgaaagtggctgagtttggcagctcagaggagaaggcgcattacagcaaacactcagatgctgtagccacttggctgaagcctgacccatctcagaagcagaatcttctagccccacagaattctgtgtcctctgaagaaacggatgactttaagcaagaaactcttccaagcaactccaatgaaagccatgaccacatggacgatgatgacgacgacgatgacgacggagaccatgcagagagcgaggattctgtgaactcggatgaatctgacgaatctcaccattccgatgaatctgatgagtccttcactgccagcacacaagcagacgttttgactccaatcgcccccacagtcgatgtccctgacggccgaggtgatagcttggcttacggactgaggtcaaagtccaggagtttccctgtttctgatgaacagtatcccgatgccacagatgaggacctcacctcccgcatgaagagccaggagtccgatgaggctatcaaggtcatcccagttgcccagcgtctgagcgtgccctctgatcaggacagcaacgggaagaccagccatgagtcaagtcagctggatgaaccaagcgtggaaacacacagcctggagcagtccaaggagtataagcagagggccagccacgagagcactgagcagtcggatgcgatcgatagtgccgagaagccggatgcaatcgatagtgcagagcggtcggatgctatcgacagtcaggcgagttccaaagccagcctggaacatcagagccacgagtttcacagccatgaggacaagctagtcctagaccctaagagtaaggaagatgataggtatctgaaattccgcatttctcatgaattagagagttcatcttctgaggtcaattaaagaagaggcaaaaccacagttccttactttgctttaaataaaacaaaaagtaaattccaacaagcaggaatactaactgcttgtttctcagttcagtggatacatgtatgtggagaaagaaatagatagtgttttgggccctgagcttagttcgttgtttcatgcagacaccactgtaacctagaagtttcagcatttcgcttctgttctttctgtgcaagaaatgcaaatggccactgcattttaatgattgctattcttttatgaataaaatgtatgtagaggcaggcaaacttacaggaacagcaaaattaaaagagaaactataatagtctgtgtcactataatcttttggttttataattagtgtatattttgttgtgattatttttgttggtgtgaataaatcttgtatcttgaatgt

SEQ ID NO: 3165 - DNA, 1309 bp, Rattus norvegicus
  Genbank Accession No. NM_012883
gaattccgttgctgtcgctagctctctctcttttttttttacagcttaatatttgtggtgcaatttgaagtgaactgaaccgggtgatttcacttctctcacaggagcatctggacagtacaccacttgtgatggagacttctatgcctgaatactatgacgtttttggtgatttccatggatttttaatggataaacggttcaccaaatattgggaagacgttgaaacattcttggcaaggccagatgaccttctcattgttacttatcctaaatctggcagcacatggattagtgaaattgtggatatgatctataaagaaggtgatgtggaaaaatgcaaggaggatgcactttttaacagaatacctgacctggagtgcagaaatgaagatctaataaacggaataaaacaactaaaagaaaaggaatcgcctagaatagtgaaaactcacctgccagctaagctccttccagcatcattttgggaaaagaattgcaagataatctatctttgccgaaatgccaaagatgtcgtcgtttcttattactactttttcctgatcatgaaaagttatccaaatcctaaatctttttctgaatttgtggagaaatttatggaagggcaagttccgtatggttcctggtatgatcatgtaaaatcttggtgggagaagagtaagaattcacgtgttttgtttatgttctatgaggacatgaaagaggatatccgaagagaagttgtgaagctgatagagttcctggagagagacccatcagcagagctagtagacagaatcattcaacatacatcattccaggagatgaagaacaatccatgcaccaattattcaatgctgccagagaccatgatagatctaaaagtatcgcctttcatgagaaagggaattgtaggagactggaagaaccacttccctgaagccctgagggagagatttgaggagcactaccagcagcaaatgaaggactgccctgtgaaatttagagcagagctctgagacaattccttgtgtctgaaattggagtagtctccaatttatccttcagtttttcttgttttgaattcagtagaagtagaagtcttttgaagactgagggtttaaattcattctggtttttttaatctaacttttatatcaatctagtttctgaatgttttgttggcaaaataacatttttcatatatacatatatatacatatatatatatatatatatatatatatatataacacaagcattgtcctctaatagtgttcaaagatttctaataaaaaaaccggaattc

SEQ ID NO: 3166 - DNA, 3508 bp, Rattus norvegicus
  Genbank Accession No. NM_012887
ggcacgaggctcgctgcgggctccaggcttggccgcacttgctcaccagtggtgcgcccggggcttttgtggcttagccggcctgggctttgtgtccgagttctgctccgtgcctgcggcgcttctcccggtcagggattcccgaggcggcgtgcgcagcccccgggaccagcgagcgatcgagcgagcgcgccggcttgagcggtggcgactgcgaggggccgaggaggagagaaggagggggacgagatgccggagttcctagaggacccttcggtcctgaccaaagacaagttgaagagcgagttggtcgccaacaacgtgacgctcccggccggcgagcagcgcaaggacgtgtacgtgcagctctacctgcagcacctcacggcgcgcaaccggccgccgctcgccgcgggagccaacagcaaagggccgcccgacttctcgagcgacgaggagcgcgagcccaccccagtgcttggctccggggcctccgtgggtcgcggccgcggcgccgtcggcaggaaagccacaaagaaaactgataagcccaggccagaagataaagatgatctggatgtgacagagctctctaacgaagaacttctggaacagcttgtgagatatggagtgaatcctggtcccattgtgggaaccaccaggaagctgtatgagaagaagctgttgaagctgagggaacagggagcagaatcgagatcctctactcctctcccaacagtctcttcctctgcagaaaacacgaggcagaatggaagtaatgactctgacagatacagtgacaatgacgaagactctaaaatagagctcaagcttgagaagagagagccgctaaagggcagagcaaagactccagtaacactcaagcaaaggaggattgagcacaatcagagctattctgaagctggagtaactgagactgaatggacaagtggatcttcaaaaggcggacctctgcaggcattaactagggagtccacgagagggtcgagaagaactccaaggagaagggtggaaccctcacagcattttcgtgtagatggtgcagtaatttcagagagtactcccatagctgagactataaaggcttccagcaacgactccttagtggccaataggttgactggaaatttcaagcatgcatcttctattctgccaatcactgaattctcagacataaccagaagaacaccaaagaaaccattgacaagagctgaagtgggagaaaaaacagaggaaagaagagtagaaagggatattctgaaggaaatgttcccgtatgaagcctctactccaaccggaattagtgctagttgccgcagaccaatcaaaggtgctgccggccggccgctcgagctcagtgacttcaggatggaagaatcgttctcatctaagtacgtcccgaagtacgttcccttggcagacgtcaagtcggaaaagacaaagaagggacgctccgttcccatgtggataaaaatgctgctgtttgctctcgtggcgggttttttgtttttggtctatcaagctatggaaaccaaccaaggaaaccccttcactaattttcttcaagatactaaaatatccaactgaagaaatcatttcggcacatccgactcgatctcctgtttttaataactgtagaaaagcatctgtgtccacttgttggccgaagaactaaattgtgatttcacctcagtaaaggtagcgctgcgttggaaagcagacaggaagcttacctggatctcatttcaatgttttggactttggagatcacactgtgccatatgaataatttttttagctccagaacttttttgtaggctttatttttttaatgtggacatcttatttcacttttggggaaaatgcattgttttgtgtatttgaaaaataaggcaaaacatggtgatgtaatgtgaagctacacattaaatacttggaattcttacagaaaagatttatgacttattctctgctgagtaaaaatgttagaaatgtgaatggcgttcagtaagagaagcggtcacgagttgtgcttccttccatatgcagcggtttgtccgtggaaggtccagcaataagctcttctgggactcctgtcgtgcgtgtggtgtcgctggcgcacctgccacactgctcactagaatattttcatatcatgaaagtgctacgtcattaaagccctgagtacacttagttttccactgggatcttggagagcaacatagatacctgcttagggagcctttagctggctgcgcgcgtctaagagaccgagggctagctagaagctcccgttgggatcctgtgcttgtatttacggcaaagcatctatcccgtccatccagctcatcagactgttctgtaggtaaataagcatgggggtgtttgtttagagttagaaactaaacaccagtcccctccacttcagtccgattccattgtcgtcttttaaccaaaaaaaagttttcctggccagggatttttgttttgctttgttttagatggagttggggtgttgagatttttgtttgttttaggcatgtaattcctgatgtaatttgatttaaaagtataactgacttgcttttaaatcacatatatagtagctaatgcttaatttgtaatttcaaataaggtgggcattatggttctgtgtattcctgaagtgattaacgatatccttatggttgtcttttttagctgaaatttacctcatgtatggcttagatgatgttgcagtcgatttaaattttggtaaaaatcaagtacagcataaacatttttaactaaatcatttaagttgcaattttacagtcattgaccacaaagcacactaaaaatgtaaattatttttaataacatccggaatgtaaagacagttttaatttttacaaaggaggaagctgaatatgaatatctagaccagcacacaactttgacttaatgtttactgtgtttagcttatagatatgtcgtaggcatttgaagtaaacttctgccccagagaccagaacatggaccagaacatgtaggcctggtccgtgaggcgtgtggggagctgacttagatctgaagtgctttcctctcaaagacaagccacaaggggcatgttttactcaactttccctctctacagtgacagccatctttctttgttctcagacacagcttctcatattgctttcagtcatctgtttataattaaaaattgtgagaagccccatttgatgtttaaaaacaggggtgggggttaatctggcttcacatttctataaggtcgctctggatagggaagtgtggtccagtacagtgaaagtcggaccaggtaaaacatgccattttctttttaaaagcgtgtacttggtcttttgtctgtgtctgttttattccactagagtaaatgtgtccttgatgtaaatgcaaagcatttattaattcgtagatgtagactttacaatataattcaataataaagtaattaacctct

SEQ ID NO: 3167 - DNA, 5270 bp, Rattus norvegicus
  Genbank Accession No. NM_012888
gcggccgcgttgacagcgcgcaacgatgaagtagcactggaggtcccttggaaaatgaggccagggtccctgctccagctcactctgctgctcgccctgcccaggagcctctggggcagagggtgtacttctccaccctgcgaatgccaccaggaggacgacttcagagtcacctgcaaggaactccaccaaatccccagcctaccgcccagcacccagactctgaagctcatcgagactcacctgaagaccattcccagtcttgccttttcgagcctgcccaatatttccaggatctatctatccatagatgccactctgcagcgactggagccacattctttctacaatttgagtaaaatgactcacatagaaatccggaacaccagaagcttgacttacatagaccctgatgccttaacagagctccccttgctcaagtttcttggaattttcaatactggacttagaatattccctgacttgaccaaaatttattccacggatgtgttctttatactagaaatcacagacaacccttacatgacgtcagtccctgaaaacgcattccagggactatgcaatgaaaccttgaccctgaaactatacaacaatggatttacttcaatccaaggacatgctttcaatggaacaaagctggatgctgtttacctaaacaagaataaatatctgacagctatagacaaagatgcctttggaggagtatacagtggacccactttgctagacgtgtcttccaccagcgttactgctcttccttccaaaggcctggagcacctcaaagagctgatcgcgaagaacacctggactctcaaaaagctccccctgtccttgagcttcctccacctcactcgggctgacctctcttacccaagtcactgctgtgcttttaagaaccagaagaaaatcaggggaatcctagagtctttgatgtgtaatgagagtagtatccggaacctgcgtcaaagaaagtcagtgaacgtcatgaggggtcccgtctaccaggaatatgaagaaggtctgggtgacaaccatgttgggtacaaacaaaactccaagttccaggagggcccaagcaactctcactattacgtcttctttgaagaacaagaggacgagatcatcggtttcggccaagagctcaaaaatcctcaggaagagactctccaagccttcgacagccactatgactacactgtgtgtggggacaacgaggacatggtgtgtacccccaagtcagacgagtttaacccctgtgaagatatcatgggctacaagttcctgagaatcgtggtatggtttgtcagtccgatggctctcctgggcaacgtctttgtcctgttcgtcctgcttactagccactacaaactgaccgtgccacgcttcctgatgtgcaacctggcctttgcagatttctgcatgggggtttacctgcttctcattgcctccgtagacctgtacacacacactgagtactacaaccacgccattgactggcagacgggccctggatgcaacacggctggtttcttcactgtttttgccagcgagttatcagtgtacacactgacggtcatcaccctggagcgatggtatgccatcaccttcgccatgcgcctggataggaagatccgcctcaggcacgcttataccatcatggcgggggggtgggtttcctgcttccttctcgccttgctcccaatggtgggaataagcagctacgccaaggtcagcatctgcctgccgatggacacagacacccctcttgccctggcgtacatcgcccttgttctcctgctcaacgttgttgcctttgttattgtctgctcctgctatgtgaagatttacatcaccgtccgaaatccccagtacaaccctcgagataaagacaccaagattgccaagaggatggccgtgttgatcttcactgacttcatgtgcatggcgcccatctccttctatgccctgtcagcgcttatgaacaagcctctgatcactgtcactaactccggggtcttgttggttctcttctacccactcaactcctgtgctaacccatttctctatgccattttcaccaaggccttccagagggatgtgttcatcctactcagcaagtttggcctctgcaaacaccaggcccaagcctatcaggcccagagagtctgtcccaacaacaacactggtattcagatccaaaagatcccccaggacacaaggcagagtctccccaatgtgcaagatacctatgaaccgcttggaagctcccacctgactccgaaactacagggacggatctcagaagagtacacgcaaacagccctgtaaaggaagcgtacgctagtcatggtgggacttacaaaaggctggtttctagaacatgcactccagttccaggacacgtgaatgcctaggtccacggggtcagagttcatctctagggagtattgcctccaagaagggagagaagctatcggcgtgactgagtcctaggtgatctaaaagtcgtccaatctctctggaagatttgctcgatgcttgcctgtgatgccgggcaacgcgctccactgataaccagctggactgttcccacagctctctactccattctacggagtgttttatatgaaagattcagcaagtggccagtgttcatttacgcgagcagctccacattagctcccctgaggtaaccaaagaaagtctttgttccttaaaaataaaatgccatacttgggaggtggaggcagggggacccagttcatacttaactacccagaaaattccaagccaacctatgctccaacaatagcactggtattcagatccaaaagatcccccaggacgcaaggtagagtccttctccatctcaagagaccaaaagaaccctgaaacgccaaacataacttgatgtcacataattgcttttattaaactgaaaaaagagaaagtctagttttgagagttctttttttcctttgactctgaaacagttatctcttcaccgggcttgatgagctcgatgtaacccagctgttacacacattggctagagaaactgctaagatttcagcttttgtggctgagcgaactaagaattatcttctcggacaagacatgagccctgggagagatttctaaggagcatatggtgaggacagggcgcacttagtcacctgttgaataagacaactatccccagttaaccgtcagctttgagcaagtccctggacctctaaattctgtagaaatggggagacttgatgccctctcctacttaaaaaaaaccctcagtatatctctccctcaaaagatagtgtctgtgacaaagagaaaaaagcattacttaagtggaatctaattttttttttctaccttgtgaggctgctggctgcttctttttggaaccgggacatgtcaccgaaaacactttttctttatttcattttgatcatgcgtctgagccaatactattgagtggctatacggagccagatcttaattattcatctaattattatattctgtactgctctcaagtccaaaacataacagaacttagagaatctgttactaatacagcctggcttggtagtgtacgcctttaatctcagcactggggaggcagaggctgaatttgaggccagcctggtccaagacagccaggtctacacagagaaaccctgtttcaaagaaaacaaaacaaaatagactaataatggagttaacacgtgactgtgtaggctcacttcaaaacatctttttcttttacttttttttatagctctctgggctcacaccacactaacactgtcaagagagaagtcgtttcacccgacactgccagttccttctatccctgccagtcacatgagacatgtgtgccctgatagtagccttgcttccaacaggaactgtacctacaggtgttccttctaggttgcctgtctccttagctccttaccatattgttacggtgtccccccaagcagatctgccatttgcttctcagtactcatgaaccaaacaggaaagataagggttttgccaccttaagtctgtgaagtagggtttatgggtcacctgacatggctcctatctgactggcctggaactctgtcacagtcacgtaagtgtaggctttcccaggtgctcgcttgtaactactgaaataaataaatgtggtgccctgaggcatccgtttctctcttacgtcacttttggaatgtcacatctggacagataaaatatttcatctcgagtagccgatctaatgctttgaaaaccaagtcctagaagagtgacttcgacaaaattgctagtaaaattcaacttgacagcatgaagtaaagaaacctcctgtagtaagatatatagtatttttttttaatttgtcaatttcttttgaggttaaccttgtatgtgcatgtgttaaaagcaaaaagggaacatctgctgtggcactcaggagagtagccctgcccctccccttggtcatacggtagatctgaccccggatgtgggagttgcaggtgagctggcccggaggacatgaattcagaagagcgggccctgctttgccttctgtgcatgcagtggcatagactagggaaagatgtccttctaccctctcttattacttgtcacctatggcaggcaggagagctgtgcccaaagacatgagagcaggggtatggccctgtccctcactatctgcaacactctggagagcaggccctacaccttgcctgggcagcagggtagagctggccctggttatgggagtcactggtgagccagttctgaaggcaggagaaccagtggactgaccagctcagataccactcagcccagatccagggctttaaattggctcactctaacatctacccatcagtgaactactggagtacatgaagcaggcagtcctacagatccaaaactacacacaggatctccatgatgcacgacaacaacaggatatccaagaagagccctggtgaggttccagcattgatggtggagcagaaggcagagggcttataccagaacaaggactcgctgcaatgaacatttgcaagcaaaagaagtgtggacaaaagggtatactggacactacagcatctgcagtgaggttttgtccctctgttgggacaggaagcatgcgtggaggatggatatgaggggaaaagatgagtggtttggggtacagggtgtaaagttcacaaagaatcaataaaaaattttcg

SEQ ID NO: 3168 - DNA, 2117 bp, Rattus norvegicus
  Genbank Accession No. NM_012891
aattccgcggcggctttggagatgcagtcggcccggatgaccccgagtgtggggcgacaactgctgcggctgggggcccgaagctcgcggtctgctgcgcttcagggacaaccccggcctacctctgcccagcgactttatgccagtgaggccactcaggcagttctggaaaagccagagaccctctcctctgatgcttccaccagagaaaaacctgccagggcggaatctaagtcttttgctgtgggaatgttcaaaggccagcttaccaccgaccaggtgttcccatacccatctgtgctcaatgaaggacagacacaatttctcaaagagctggtgggaccagtggcccggttctttgaagaagtgaatgaccctgccaagaatgactccttggagaaggtggaggaggacactttgcagggactcaaagaactgggggcatttggtctgcaagtacccagcgagctgggtggtttgggcctctctaatacccagtacgctcgcttggcagagattgtgggcatgcatgaccttggtgttagcgttaccctgggagcccatcagagcatcggtttcaaaggcatcttgctctatggcacaaaggcccagaaggaaaaatacctccccagagtggcatccgggcaggctttggcggctttctgcctgactgagccctcgagcgggtccgatgtggcctctatccgaagctcagctgtacctagcccctgtggaaagtattatactctcaacggaagcaagatctggatcagtaatgggggtctggcagacattttcactgtctttgccaaaacgccaattaaagatgcagccacgggggccgtgaaagagaagatcacagctttcgtagtggaacggagctttggaggggttacccatgggctccccgaaaagaagatgggcatcaaggcatctaacacatcagaggtgtactttgatggagtcaaggtgccagcagagaatgtgctaggagaagtgggagatggcttcaaggttgctgtcaacatcctcaacaacggaagatttgggatggctgcaaccctagcaggcaccatgaaagccatcattgccaaggcggttgatcatgctactaaccgtacccagtttggggacaaaattcacaactttggggtgatccaggaaaagctggctcggatggctattctgcagtatgtgactgagtccatggcttacatgctgagtgccaacatggaccagggattcaaagacttccagatagaagctgccatcagcaaaatctttggctcggaggcggcctggaaagtgacagatgagtgcatccagataatggggggcatgggcttcatgaaggaaccaggggtagagcgtgtgctccgagatattcgaatcttccggatctttgaagggacaaatgacattcttcgactgtttgtggctctacaaggctgcatggacaaaggaaaggaactcacgggacttggtaatgccctaaagaatcctcttggaaatgttggcctcctcataggagaagcaagcaaacagctgaggcggcggacagggattggcagtggtctgagtctctcgggaattgtccacccagagttgagtcgcagtggtgaactggcagtgcaggctctggaacaatttgccactgtagtggaggcgaagctgatgaagcacaagaaagggattgtcaatgaacagttcctgctgcagcgactggcagatggagccattgacctctacgccatggtggtggttctctccagagcctcaagatccctgagtgagggctacccgacagcacagcatgagaaaatgctctgtgatagttggtgcattgaggctgcaacacggattcgagaaaacatggccagccttcagtccaaccctcagcagcaggagctctttcgtaacttcagaagtatctccaaggccatggtggagaatggtggcctggtcaccagtaacccccttagagtctgaagactcctaatcaggccctagcacagtcgtgtgccttcttctatgccaaacacaggcccccttcatgggggcactggagtacttactgccttaaggacaataaattttctaccaaaaaaaaaaaaaaa

SEQ ID NO: 3169 - DNA, 1123 bp, Rattus norvegicus
  Genbank Accession No. NM_012895
gggattagagtcaagatggcagctgcggacgagccgaagcccaagaagctcaaggtggaagcgccagaagcgctgagtgaaaatgtgctgtttggaatggggaatcctcttcttgacatctctgctgtggtagacaaagatttccttgataagtattctctgaaaccaaacgaccagatcttggccgaagacaagcacaaggaattgtttgatgaacttgtaaaaaaattcaaagttgaatatcatgccggtgggtccacgcagaattcaatgaaagtggctcagtggatgattcaggagccacacagagcagcaacgttcttcggatgcattgggatagataagttcggggagatcctgaagagcaaagccgcagatgcacacgtggacgcccattactatgagcagaacgagcagcccacaggaacgtgcgctgcatgcatcaccggtggcaaccggtctcttgttgctaaccttgctgccgccaattgttataagaaagaaaagcaccttgatctggagaacaactggatgttggtagagaaagccagagtttactacatagctggcttctttctcaccgtctccccagagtcagtgttgaaagtggctcgctatgctgccgagaacaacaggaccttcactcttaacctgtccgcaccgttacttagccagttcttcaaggaagccttgatggaagtcatgccttatgttgacatcctctttggaaatgagacggaggctgccacttttgctagagagcaaggctttgagactaaagacattaaagaaatagccagaaagacgcaggctcttccaaaggtgaactcgaagaggcagaggaccgtgatcttcacccaagggagagatgacactatagtagctacaggaaatgatgtcactgctttccctgtcttggatcaaaaccaggaagagatcgttgacaccaatggagctggagatgcatttgtaggagggtttctgtctcagctggtctccaacaagcctctgactgaatgcatccgggccgggcactatgcagcgagcgtcatcattaggcgaactggctgtacttttcctgagaagccaaacttccactgacggaagaaaagcaactcaggca

SEQ ID NO: 3170 - DNA, 1490 bp, Rattus norvegicus
  Genbank Accession No. NM_012898
tctagctctccaagctgattatctgggctgcccctgacatttgtccatctcccagggcctctctggagcagccatgaagtccctggtcctgctcctttgttttgctcagctctggagctgccaatcagctccacaaggtgcagggctgggttttcgagaattggcttgtgatgacccggaaacagagcatgtagctttgatagccgtgcactacctcaataaacatcttcttcagggattcaggcagatcttgaatcagattgacaaagtcaaggtgtggtctcggcggcccttcggacaggtgtatgagttggaaattgacacgctggagacaacctgccacgctctggacccaacccccttagcaaattgttctgtgaggcaacaggccgagcatgcggtggagggagactgtgacttccacatcctgaaacaagatggccagttcagggtgctacacgcccagtgtcattccacaccagactctgcagaggacgttcggaagttttgcccacgatgcccaatcctgatccggttcaatgacaccaacgtggtccacactgtcaaaactgccctggctgccttcaatgcacagaataatggaacctattttaaactggtggagatttcccgagctcaaaatgtgcctttcccggtgtctactctcgtggagtttgtgatagctgcgactgactgtactggtcaggaggtcacagatccagccaaatgcaacctgctggcagaaaagcaatatggcttctgcaaggcgactctcatccacagacttggtggggaagaggtttcagtggcctgcaagttattccagacacagccccagccagccaatgccaaccctgcaggtcctgcacccacagtgggccaagctgcgcctgtagccccaccagctggcccacctgaatccgtggtggtaggacccgtggcagttcctctaggacttccagaccaccgaacccaccatgacctacggcatgccttctctcctgtggcttctgtggagtcggcctcaggagaagttcttcactcacctaaggtgggccagcctggtgacgctggtgctgctggcccagtggcccccctgtgcccagggagagtcagatacttcaagatctaggcttgactcagggaagtaaggttttggcaggcaggacatagccaccactgaagtagagggcttgtccactgaccaagcaagtaccacatcatagcttgaattcaggtctcttcattccccagagaaaaggggcagagaggtgatggttaaatttgttgaaagccagcagcagcaacactagcacttgtggggtgacagactactgtcatttgtttctttgccttctcactgacctcatacaaagcagttgcaagcgcgactgtgaaaggtgctctcaccaaacttcaatctacccataaataaaagtacccgaaggagctttcttaaacaagaaggttctgagccgagtgtggttgtg

SEQ ID NO: 3171 - DNA, 1116 bp, Rattus norvegicus
  Genbank Accession No. NM_012899
gcctagactccgtcttagcagactgctgtgttccgccggcccccaccatgcaccaccagtccgttctgcacagtggctactttcacccactgcttcgggcctggcagaccaccccctccaccgtcagtgccaccaacctcatctatcccatctttgtcacggatgttcctgatgatgtccagcccattgccagcctcccgggagtggccaggtatggcgtaaaccagctagaggagatgctgagacctctggtggaagccggccttcgctgtgtcctgatctttggcgtccccagcagagttcccaaggatgaacagggctctgcagctgactcagaggactccccaactattgaggctgtccgtctgctgaggaagaccttccctaccctcctagtggcctgtgatgtctgcctgtgcccctacacctcccatggccactgtggcctcctgagtgaaaatggagccttcctagcagaggaaagccgacaacggttggcagaggtggcactggcctatgccaaggcaggttgtcaggttgtagctccatcagacatgatggatggacgagttgaagccatcaaggctgccctgctaaaacatggacttggcaacagggtctctgtgatgagctatagtgccaaatttgcctcctgtttctatggtcctttccgggatgcagctcagtcaagcccagctttcggagaccgacgctgttatcagctgcctcctggagcccgtggcctggccctccgagcagtggcccgggacattcaagagggagctgacatactcatggtaaagccgggattaccctacctggatatggtgcaggaggtgaaggacaagcaccccgagctccccctcgcagtataccaggtgtccggagagtttgccatgttgtggcacggagccaaggctggggcctttgatctcaggactgctgtactggagtccatgacggccttccgcagagccggtgctgacattatcatcacctactttgcaccccagctgttgaagtggctgaaggaagagtgaaggaaagtgaaggacttggtcttgacagagctccctgggccttacagaagggaaaaagtaaaggcgctgttagaac

SEQ ID NO: 3172 - DNA, 1162 bp, Rattus norvegicus
  Genbank Accession No. NM_012901
gaattccggactgcagagccatgcagggtctcggggccctgttcttgttgctgactgcctgcctcactttgaaggctgacaatgtgccaacactgccagatatccaggttcaggagaacttcaatgaggcccggatctatggaaaatggttcaacctggcggtgggctccacctgcccgtggctgaggcggattaagaacaagatgagcgtgagcacactggtgctgcaggagggggcgacagaagccgagatcagcgtgaccagtactcaatggcggaaaggtgtctgcgaggagatctccggggtgtatcagaagacagacattgacggaaagttcctttaccacaaatccaaatggaatgcaaccttggaatcttatgtggtccacaccaactatgacgaatatgccattttccttaccaagaagttcagccaccgccacggacccaccatcactgccaagctctatggccgggaaccacagctgagggacagccttctgcaggagttcagggaggtggccctgagtgtgggcatccctgagaactccattgtttttatggccgacagaggagaatgtgtccctggggatcgggaggtagagtccacttcatttgcaagagcccggcgggcagtgctgccccaagagaatgaagggtcagggagtgagccactcataactgggaccctcaagaaagaagactcctgccagctgaactactcagaaggtccctgcctggggatgcagcagaagtattactacaatggcgcctccatggcctgcgagaccttccagtatggcggctgcctaggcaatggtaacaacttcgcctccgagaaggaatgcctgcagacgtgccggaccatagcggcctgcaatctccccatagtccaaggcccctgccgagcctttgcagaactctgggcatttgatgcagcgcaagggaagtgcatccaattcatctatgggggctgcaaaggcaacggcaacaagttctactctgagaaggagtgcaaggagtactgtggagtccctggtgatgggtacgaggagctaacacgcagttgaaggagccggtctgcaagccagagggtagccacggtccgtcactgagcagtccagcttagatgatctggacccaataaaacaaggcggaattc

SEQ ID NO: 3173 - DNA, 1402 bp, Rattus norvegicus
  Genbank Accession No. NM_012904
cgagcaaagcttctcttcagttccctggaagacaaggcaatacaaagatactttattaaaaatggcaatggtatcagaattcctcaagcaggcctgctatattgaaaagcaagagcaggaatatgttcaagctgtaaaatcctacaaaggtggtcctggatcagcagtgagcccctacccttccttcaatccgtcctcggatgttgctgccttgcacaaagctatcatggttaaaggtgtggatgaggcaaccatcattgacatccttaccaagagaaccaatgctcagcgccagcagatcaaggcagcatacttacaggagactgggaagcccctggatgaaaccttgaaaaaagcccttacgggccacctggaggaggttgttttggctatgctcaagaccccagctcagtttgatgcagatgaactccgtgctgccatgaagggacttggaacagatgaagacactctcattgagattttgacaacaagatctaaccagcaaatcagagagattactagagtctacagagaagagctgaaaagagatctggccaaagacatcacttcggacacatctggagactttcgtaatgccttgcttgctctcgccaagggtgatcgctgtgaggatatgagtgtgaatcaagatttggctgatacagatgccagggctttgtatgaagctggagaaaggagaaaggggacagacgtgaatgtgttcaatacaattttgaccacaagaagctatcctcatcttcggaaagtgtttcagaattatagaaagtacagtcaacatgacatgaacaaagccctggatctggaactgaagggtgacattgagaagtgcctcacaaccattgtgaagtgtgccaccagcactccagctttctttgctgagaaactgtatgaagccatgaagggtgctggaactcgccataagacattgatcaggattatggtctcccgttcggaaattgacatgaatgaaatcaaagtattttaccagaagaagtacggaatccctctctgccaagccatcctggatgaaaccaaaggagactatgaaaaaatcctggtggctctgtgtggaggaaactaaacatcccaactgctctgtaagattccgaggagaacatctcttagccgttgttttcttcctattgcaaggcttaagtaggaaagttgctttgtcagtaagtctaattaccttctttgaataatgtagcctataaatatgttttagatcattcatctgtacaatagagaaatacttgttttgttaattatgtttatcccaaattataaatccctgtaagcaagtcactttggtaccattcctgagaaagaagtttacatagaataaaataaaacaattttataagacaaaaaaaaaaaaaaa

SEQ ID NO: 3174 - DNA, 1758 bp, Rattus norvegicus
  Genbank Accession No. NM_012911
tttttttttttttgcctattaaaaggtttatttcttccctatgctcagaaacgaagatatggccttgctggtccctcccctgaaatctcatcttcaaggattgggaggcagaaggggacctggcagcgggtgagaaggctgcgagcgagccgcgaacccggcgggtggagggcggcgacggcgcgcgcaccatgggtgaaaaacccgggaccagggtcttcaagaagtcgagccctaactgcaagctcaccgtgtacttgggcaagcgtgactttgtggatcacttggacaaagtggatcctgtcgatggtgtggtgcttgtggatcctgactacttgaaggaccggaaagtgtttgtgaccctcacctgtgccttccgctatggccgagaagacctggatgtactgggcctgtctttccgcaaagatctgttcatcgccacctaccaggccttcccccccatgcccaacccacctcggccccccacccgcctacaggaccgactgctgaagaagttgggccagcatgcccaccccttttttttcacaataccccagaatttgccttgctccgtcacactgcagccaggaccggaggacacagggaaggcctgtggagtagactttgagattcgagccttctgtgccaaatctatagaagaaaaaagccacaaaaggaactccgtgcggcttatcatcagaaaggtacagtttgctcctgagacacccggcccccagccatcagctgaaaccacacgccacttcctcatgtctgaccggaggtccctgcacctagaggcttccctggacaaagagctgtactaccatggggaacccctcaatgtcaacgtccacgtcaccaacaattctgccaagaccgtcaagaagatcagagtgtctgtgagacagtatgccgacatttgcctcttcagcaccgcgcagtacaagtgtcctgtggctcagcttgaacaagatgaccaggtgtctcccagttccacattctgcaaggtgtacaccataaccccgctgctcagtgacaaccgagagaagcgtggccttgcccttgatgggcaactcaagcacgaagacaccaacctggcttccagcaccattgtgaaggagggagccaacaaggaggtgctgggaatcctagtatcctacagggtcaaggtgaagctggtggtgtctcgaggcggggatgtctccgtggagctacctttcgtcctaatgcaccccaagccccacgaccacatcacccttccccgaccccagtcagccccccgggaaatagacatccctgtggataccaacctcattgaattcgataccaactatgccacagacgacgacatcgtgtttgaggactttgcgaggcttcggctgaaggggatgaaggatgacgactgtgatgaccagttctgctaggaagaggggctgggagaggtaggggtgggcaggactgaggtccactgcccttgcgggtaggagggtcccagcctctcctccttccccgttcgtccacccgagatacacactggacccatcactcgttgaaagtgggcattaatcttttgacttcagctctgccaccccagccctgctccctagggtggcaagctgtgtacacacctaaagttttgggaagggaagggaacactgaaagcaaggagtgaatgtagagaaaaggagtagaaaggacacccatgtttggcctcataccaacccacccccagtcaccacttctgcctcccccgaattc

SEQ ID NO: 3175 - DNA, 1893 bp, Rattus norvegicus
  Genbank Accession No. NM_012912
tgtctcactcagcgagacgcgcggtgcacggtgcttccccggcggacgaccgaccaacccgcgctccggcagagtccttggcgctcgcctgccggcgggacagacagcccgcctctagccgctctctggaccctggccgccccgagcgaagactggagcaaaatgatgcttcaacatccaggccaggtctctgcctcagaagtcagcgcgaccgccatcgtcccctgcctctcacctcctgggtcactggtgtttgaggattttgctaacctgacaccttttgtcaaggaagagctgagattcgccatccagaacaagcacctttgccatcggatgtcctctgcgctggagtcagtcaccatcaacaacagacctctggagatgtcagtcaccaagtctgaggtggcccctgaagaagatgagagaaaaaggaggcggcgggaaagaaacaaaattgctgctgccaagtgtcgaaacaagaaaaaagagaagacagagtgcctgcagaaggagtcagagaaactggagagtgtgaatgccgaactgaaggcccagatcgaggagctgaagaatgagaagcagcatctgatttacatgctcaacctgcaccggcccacgtgtatcgtccgggctcagaacgggcggacgccggaagacgagaggaacctttttatccaacagataaaagaaggaacattgcagagctaagcagaggtggcatgggggcaattggggagtccttactgaatcctccttttccaccccaaaccctgaagccattggaaaactggcttcctgtgcacttctagaatctcagcagccacgagctgttgggtcaggagggcctgcggtgactactgcgttgtcccactctgtccccgagtgaaccgtggagcaggcaggagcatcctttgtctcaccggctccaggatttaggccttaccatcccggccattctcagatgacctagctggccccaggctggggtcccatgcaaagcaggatcgcactaatgggatgcaggcagaagtgtctaccttgacaggtggggtggaccacgtcctccactgcggctgacaacatccctcctagggaagatggagtgagaacattcatcattgaagttgtccaatggccagggtatgctttctagaaactatgctgttctgtcctagactgactgtgcatagggcattcatttctgagcctggtgttgtgctatttagatgtttgtcttgcacaacattggcgtgatttttttccgggagtttcatcagacctgatttccgagagtttgggggtctgccactgtggacaatatcccccaaaagtgtttgggtggccatgtaaactggctgatgaccagctgtgctactctgtgctgaccgaggactgatgcctccttcccctgtacccactgctgaggaagaacccgggcacagcagctgtccttggctacaaactgttacaatgtcacagaacgaaggcacaaagtcccgctttcaaagggcgtaggactccacactcagtgacagggcaggaagagccaaggattctccgttttcccttccttcccaccaaaaaccacagcccgtggagactggtatttgaagccaggagtggggcaaggaaggtgtctgcactgtgggatgttaactgcgcttttgtcttgaagctattttgagatgcggtccagagtatttcagctgggaggtccctcccactggccaccagggctctggctactgttaaaattctgatgtttctgtgaaatcctcagtgttcaatccagactcagtagtatattacagttttctgtaagagagaacgttacttatttatcccagtattcctagcctgtcaacgtaataaaatatcagaatgagacctggt

SEQ ID NO: 3176 - DNA, 1818 bp, Rattus norvegicus
  Genbank Accession No. NM_012913
ctcctaacggagagttgttcccggccgtgcggtcctccgtcgccgtcgctgggctgcgccgccgctgtcgccaggacgcgccgccgagcccctcgtcgcctctagccccgcggcctccgttcacctcaacttccactcgcccatcatgacgaagactgagaagaaatccttccaccagagcctggccgagtggaagctgttcatctacaacccgaccagcggagagtttctggggcgcacctccaagagctggggtctcatcttgctcttctacctagttttttatgggttcttggctgcactcttcacattcaccatgtgggtcatgctccagactctgaatgacgaggttccgaagtaccgagaccagattcctagtccaggacttatggttttccccaaaccaccgactgccttggattatacatacagcatgtctgacccacatacttataaaaagtttgttgaagacctgaagaatttcctaaagccatattctgtggaagaacagaagaatctcacagattgccctggtggagcactttttcatcaggagggtccagactatagtgcgtgtcagttcccagtttccttgcttcaagaatgtagtggtgtgaatgattctaattttggctactccaaaggacaaccttgtgttcttgtgaagatgaacagaataatcgagttagtcccagatggagctccatatattacatgtataacaaaggaagaaaacatagcaaatatagtaacttatcctgatgatggacttatagacttaaagtattttccatattatgggaaaaaacggcacgttggatatcgacagcccctagttgccgtccaggtcatatttggggccgatgctaccaagaaagaagtaacaattgagtgccaaattgatggaaccaggaacctaaaaaacaagaatgaacgtgacaagttcttgggacgagtttcatttaaagtcatagcacatgcctaggagtaggctgtctgcacagagtaaatgttgtgttgtctccattctgtatcagctggacctgccattctaggatatgaggccacctgggaggaggaagtggtatgggacacacttgggtgacatcataacatgcttccagatcatagtgttcagtgtcctctgaagtaactgcctgctgcctctgctgcccttgaacccatgtacggtcgccagacagggaccagtgagctcccaatcccaaacatgcagagtgggggtctcgtcgtcttctgtgtgtaattgccaaatgtctaaagcttcatgtgctgtgctgtgtaaatattttatggatttaacactggtaactgtcatattttgatgccaagaaagttttagggaaaaaatggtaccttgccaacatcaagtgactttagctgaagaaatgtgtgagaagttctgtatgtgatgaaggagaaagggaaataaagtggatctgaaagtactgaccctggttctgcgtacgtgtgagtgagtgcctgtcgtatgctctagtggtttttacatgctgaactagactatagctgactgtactgagaggacagactttctgttgtaatacatatttaaaatactatcggggtgactgagtgtggaatcaagcttccacactcaggtgtcgtagacacatggaagaaacagtgttttaattaggtgaatgagtaccgatgtttttgctttgttttgttttttgaatgaaatgaaattcccaagacataaattgtatagtttttcaaaatgtcttaagtgcttttatttagtagactatggaccctaataaaaaaaatgtgaaatac

SEQ ID NO: 3177 - DNA, 833 bp, Rattus norvegicus
  Genbank Accession No. NM_012915
gaattccaaaatatgtaaggctttcaatttattacagatcacccaagaacataatgatatacatgtagtcagaaaacacgatgtagaaatcatagtgagttgtccagacatggtcagtagattattctttctggcatgctccagtgtcaacactcaataaagagcactaaaatccttccatacaattaagtatcagcgatgtaccatattgcagaaaggggtggctgagcaacagtttgttgatactataagacttccatgctcaacagtcgtagcgttgcactcagcacagctctggtttccatatacaaattttccatctcgagtggttactacaacccaggcacaaatctcatcaggataagtctgacatttctgtcttccaacatgacaaaatcctgtagaatcgaagctagtacgctcggtgtctggggtatgagggtcctgcaaacccgaggcttcggctcggactcgtcggagagcatggattcgggcgctggctccatccgagaagctggtggggccttcgggaaacgagagaaggctgaagaggatcggtacttccgagagaagactagagagcagctggctgccttgaagaagcaccatgaagatgagattgaccaccattcgaaggagatagagcgtctgcaaaaacagatcgaacggcataagaagaagattaaatacctaaagaatagtgagcattgagtgcacacagtcagtctctcacagagtggccagtatcattccccacttctatagagattgttttgaatgattgatgtttgacctgtgtgctactaacagataataaattatcaccggaattc

SEQ ID NO: 3178 - DNA, 3169 bp, Rattus norvegicus
  Genbank Accession No. NM_012923
ccgcacgctgaaccggaggaactgcgcctagtcggggcgctgagggaccctccaccgggacgccggcccctccccgggcctctgctcacttgcccccctgcgagcccgtccccctagtcggcctctcggatcggggacgtggggcgagctgagagcaggcccggggtgggtggtcactgtggagaagacgtggctgtcaagatgatagaagtactgacaactgactctcagaaactgctacaccagctgaacaccctgttggaacaggagtccagatgtcagccaaaggtctgtggcctgaaactgattgagtctgcacatgataatggcctcaggatgactgcaagactccgggactttgaagtcaaagatctactgagtctaactcagttctttggcttcgacacagaaacattttcccttgctgtgaatttactggacagattcttgtctaaaatgaaggtacaggcgaagcatctcggctgtgtcggactgagctgcttttatttggctgtgaaatcgattgaagaggaaaggaacgtcccgctggcaactgatttgatccggataagtcagtataggttcacagtttcagacctgatgagaatggaaaagattgtgttggagaaagtgtgctggaaagtcaaagctactactgccttccaatttctgcagctctattactccctcattcgggagaccttgccatttgaaaggagaaacgatctgaattttgaaagactagaagcccaactgaaggcgtgccactgcaggatcatattttctaaggcaaagccttctgtgctggcgctggcaatcatcgctttggagatccaagcactgaagtatgtggagttaacagaaggagtagaatgtattcagaaacattccaagataagtggccgagatctgaccttctggcaagagcttgtttccaagtgtttaactgaatattcatcaaacaagtgttccaagccgaacggtcagaagttaaaatggatcgtgtctgggcgcactgcacgacaactgaagcacagttattacaggataacccacctcccaacaattcccgaaaccatgggttagttggcaaatctggttgttatcctctgtgtacagaacatttcccagtgagatcgtttttgtgctataacttaaggattgaaatactaccttcaatataaagaatacaggatgaaaacagtaaaggaaacgtgagtttgttggtctagacagagaatactgggaggcattcactgtgtaccgcagtctgaagagaaatgagtatcaaacctctagacacatgctcatactgctgtcaaaggactagcgtagaaaagagagtcctccaaaccggaagtttaaatgtagttactaaaatagcacttcttataacttacatatccccccactgtggcttatttaaagttacagaagtccaagcagaacgacaaaagatgtgacccatatatgaacacattttaatctgttcattgattaggagagtgaatatgaacttgcatgatgcccatgttaggtttctggaaactgccggggtatcttaattctctagtattctccctctgtggcagttgggctaatacaaagtaactatacgcatgagaatataaaatcagtctctgatacatacacatttttaccatcaaaatttcttaatcatagcaaagacttacctttttatgattaggaattttttttttaatgtatggcagcacatgcctttaatcccaacactagggaggcagaggcaggtggatctctttgagttcgaagccaggctggtctttacagtgagttccaggacagctggagagctacagaatggagagacgctgtctcaaaaacactcaaaacaaacaaacaaaccataccagtttgtaggcagacttctgttgggttgggtttgtactgtttgcctatgcagtgggattacagcagcagcaacaaaaactgtccctgaagtctttctctgccactgtgacctgagtttcctatggtacgcgatttactctaggaaacctcagcccctcaccacgttagctgttggcaaatggcctcacagttgcggaaagtcccaattctaggcttgggaaagcaatgcttagatttgaattggcccatgaagcattcaaatcaaggctaaagacataaatgtgaaataaaactgtgaaccttcattttaacattgatctcacttcccagatttaatcaatatatacttaggtggtattaaaaatggtaaactgcctaatttaaatctcaaaatttaaactatgaggtttacatcaaagccaacatttcacaaatgtactttttaaggtattaaaagaggtatttaagcagtaaatggtttcttggcacccataaccaagtaatagttaagttagaggtgggacttttttattgctatgagaattacatttaaacttttgggtgttttataaaaagcagatttcacaagttttgaaaattgtgacctttactgaaatttgttacctttaatatttcttctagaggataggtatttataaaagaaaaattcgtcagaattgctgcctcaatctagtcccatttgagaaaatttgtttctactgtctcaataactggatgaaatatcactctgaaaacttgcctattgcactaaagctagtttaggcttgataaaacactccaggaggtttttaccacagactgtttctattaaaactgctgcttctcatgtacaattttgttttaaaaggaaccgagtacatctgcaaaacctaagtcttaagggacgtcaggaggtaccttcagaattataggatcaccatggtagtggggattctccatgctggccttgaatgtttgatcttcactgctgaaatgtgggtagctcctcagcgccctgtagagcctgagtctacctagaatagctgtaaccattttgacaagtaatggataagaaaattatccattgagaagctaaaaacaaaacaaaacaaaaccaaagaacgggtgtattttattcttaacctttgtaaaccatcactgagaacacttcagttcttcctaacagctgttatgcttcgatttgaaaaaaatactgagtggataaccaactaccatcatgctttgggtacacctttcaataaaattactgaaatgc

SEQ ID NO: 3179 - DNA, 2296 bp, Rattus norvegicus; identical to SEQ ID NO: 2932
  Genbank Accession No. NM_012930

SEQ ID NO: 3180 - DNA, 3335 bp, Rattus norvegicus
  Genbank Accession No. NM_012931
gtacgcgggtagcacggcctctggccgtggagcaccatgaagtacctggtgagtgtgggcgcggggccggccaggcgggcgggcggtctggaggacgtttcctgggggccccgagtgtcccgccggccgcagagttaccgggcagctcggcacgtaaacgagtccctccctcggtccgcctttcgagtccccgcagctcacggagctagcgtgacgccctccgcagcccttgggtccgggttgcctgagactcagcccgaggcggtatgcagagggactgagaaaccgagatttgctgagggctgcaaaccggcggcgagccgcgacaagaacgtgctggccaaagccctctatgacaacgtagctgagtctccggatgaactctccttccgaaagggtgacatcatgacagtgctcgagcgggacactcagggcctggatggctggtggctctgctcactgcatgggcgccagggcattgtgcctggtaaccgcctcaagattctggttggcatgtatgacaagaagccagcagcacctggaccaggcccacctgccaccccaccccagccccagcccagccttccccagggcgtccatactccagtgcctccagcttcccagtacagtcccatgctccccactgcataccaaccccaacctgacaatgtgtacctggtacccactcccagcaagactcagcaaggtctctaccaagcccctgggcccaacccacagttccagtcacccccagccaaacaaacatccacattctcaaagcaaacacctcatcactcatttcccagccctgccacagacctttaccaggtgcctccagggcctggaagtccagcccaggacatttaccaggtgccaccttccgctggcacagggcatgacatctaccaagtccctccatctttggacacccgcagctgggagggaacgaagccaccggcaaaggtggtggtacctactcgagtgggacagggctatgtgtacgaggcctcccaggcagaacaggatgagtacgacaccccgcgccacctgctagctccaggttcccaggacatctatgatgtgccccctgttcgaggactgcttcccaaccagtatggccaggaggtatatgacaccccgcctatggcagtcaaaggccccaatggccgagacccgttgttggatgtgtatgacgtgccccctagtgtggagaaaggcctgccgccgtccaaccatcattcggtgtatgatgttcctccttctgtgagcaaggatgtgcctgatggcccactgctgcgtgaggaaacatatgatgtaccccctgccttcgccaaacccaagccttttgatccgacccgacatccattaatcctcgctgcacctcctccggactccccaccagctgaggatgtgtatgatgtgccaccccctgctcctgacctctatgatgtgccccctggtttgcggcggcctggccctggaacactgtatgacgtgcctcgagagcgggtgctccctcctgaggtggctgatgggagtgtaattgatgatggtgtgtatgctgtgcccccaccagccgagcgagaggcgccaacagatggcaagcgcctgtcggcctctagcacgggcagcacacgcagcagccaatcggcgtcttccttggaggtagtggtgccaggtcgggagcccctggagctggaagttgctgtggagaccctggctcggctacagcagggtgtgagcaccaccgtagcccaccttctggacctggtgggcagtgccagtggccccgggggctggcgtagtacctctgagccccaggagcctcccgtgcaggacctgaaagctgcagtggccgcagttcatggggcagtacatgagctcctggagtttgcccgcagtgcagtgagcagtgccactcacacttctgaccgcactttgcacgccaagcttagccggcagctacagaagatggaggatgtgtaccagacactggtggtccatggtcaggtccttgacagtggccggggaggtccaggattcactctggacgacctggaccgcctggtggcctgctcacgggctgtgcccgaggatgccaagcagctggcctcctttttgcatggtaatgcctcgctgcttttcagacggaccaaagcccctggccccgggcctgagggcagcagctccctgcacctcaaccccaccgataaagccagcagcatccagtcacgccctctaccctcacctccaaagttcacctcccaggactctccggatggccagtatgagaacagtgaagggggttggatggaggactatgactacgttcatctgcaggggaaggaggaatttgagaagacccagaaggaactgctggaaaagggcaacatcgtgcgacagggaaaaggccaactggagctgcagcagctgaaacagtttgagcgactggagcaggaggtgtctcgtcccatagaccatgacctggccaactggacaccagcccagccccttgtgccggggcggacagggggactggggccttcagaccgacagctgctgctcttctacttggagcagtgtgaggccaacctgaccacactgacagatgcggtggacgccttcttcaccgcagtggccaccaaccagccacccaagatctttgtggcacacagcaagtttgtcattcttagtgcacacaagcttgtgttcattggggacacactgtcacggcaggcaaaggcagctgatgtgcgaagcaaagtgacccactacagcaatctgctgtgtgacctcctgcgtggcatcgtggccaccaccaaggccgctgccctgcagtacccatccccatctgctgcccaggacatggtagacagggtcaaggagctaggccacagcactcagcagttccgccgtgtcctgggccagctggctgccgcctgaaagcagaagactgggctgtgaggctggggagtgggtagcggtggtgtgagctacccaggcgctcgtcttgaagtggagatcctgcaggtttggggacaggtaaccccagctctgctttgggcctggtgccctcaactgtccagggatttgtacatatttatatcaaggcaggatgcagaatgcctcctcggagaggctgaggagccccgtcagagtggaccatgggctgggatcaccagggttggggcacatgggctccagtccacagggctccctgggacaggaagtacagtgtggtgtacacctctgcaccaagaaaacctaaagaactatttttcactattgatttttttccaatcatttgactaatagtctacatttaataaaatttt

SEQ ID NO: 3181 - DNA, 4964 bp, Rattus norvegicus
  Genbank Accession No. NM_012940
gttgcagacacctctgcgacgccagcttgaaagccgccggcgggctgggatttagctccactttatcaactcccaacccctcacccatctcaaccgcaactccaactctgtgagaaagtcctgactttgcggagccccaggtgcactggagctcagcaaacttgagacacttcccccctgtcctccatcctaatctaagtttaggttctgactgagccaagagtgggtgctaaagcagcgggcctcaggtgtctaggactccgggtccttggggactctcaggttgaagtcttgcagagtctgggcagaggctccagagcttctcccagaccccactgctctacaccgctggaaccgcgcttcatcgcagcatggccaccagccttagtgcagacagtccacagcagctgagctcgctgtctacccaacagaccattcttctgctactcgtttcggtcctggccatcgtgcacttaggccagtggctgctgcgccagtggcgacggaaaccgtggtcctcgcccccgggtccctttccttggccattgatcggaaacgcggcgtctgttggccgggcatcgcacttgtacttcgctcgccttgcgaggcgctatggcgacgtttttcagatccgtctgggcagctgtcccgtggtggtgctgaatggcgagagtgccatccatcaggctctggtgcagcagggcggcgtctttgcggaccggcctcccttcgcctctttccgtgtggtgtctggtggccgcagcctggcgttcggccactactcagagcgctggaaggagcggcgacgtgcagcctatggcacgatgcgtgccttctccacccgccacccgcgcagccgcggtctcctcgagggccacgcgctgggagaggctcgagagttggtggcagtgttggtgcggcgctgcgccggtggcgcctgcctcgatccgacgcagccgatcatagtggcggtggctaatgtcatgagcgctgtatgcttcggctgtcggtacaaccacgacgatgccgagttcctggagctgctcagccacaacgaggagttcgggcgcaccgtgggcgcgggcagcctggtggacgtgatgccctggctgcagctttttcccaacccggtgcgcaccatcttccgcgagttcgagcagatcaaccgcaacttcagcaacttcgtcctggacaagttcctgaggcaccgagaaagcctcgtgcccggggctgctcctcgagacatgatggacgccttcatcctctccgccgaaaagaaggcgactggggaccctggtgacagtccctccgggctggatttggaggatgtgcctgccactattacagacatctttggagccagccaggacaccctttccaccgcgctgctgtggctgctcatcctctttaccagatacccggatgtgcaggcccgcgtgcaggccgagttggaccaggttgtggggagggaccgcctgccctgcatgagtgaccaacccaacttaccatacgtcatggcttttctttatgaatccatgcgattcaccagctttttgcctgtcacccttccacatgccaccactgccaacacctttgttttaggctactacatccccaaaaacacggtagtttttgttaaccagtggtctgtgaatcatgacccagcaaagtggtctaacccagaggactttgatccggcccgcttcctggacaaggacggcttcattaacaaggcactagccagcagcgtgatgatattttcagtgggcaaacgacggtgcatcggcgaggagttgtctaagacgcttctgtttctcttcatctccatcctcgctcatcagtgcaatttcaaggctaaccaaaacgagccctcaaacatgagtttcagttacggcctgagcattaagcccaagtcgtttaaaatccatgtgtctctcagagagtccatgaagctccttgatagtgctgtcgagaagctgcaagctgaggaagcttgccagtgagagagggagaggccggaggtaactgaaatgttcaaagaaaaccatctcattaactggagaggaaaacacagattttattttctccagcttcattttggcctcagttctcaagaatgagcggaaaccaagtggcctgaaggtgaggcgggcttaccaattcatggctcctcaccggccagcagctggagatcctgaagtattttgaaattgaagagtaatagggtccaaggaatttgcatactgttcccccctcacccccattaaacacatgcacacaaatcagcatgtgtgtacagctatccaacaaaatatttcagtaactctgcctttttgggtcgatttgaaagggaacttctattgcagaaattggccccataggaaaccacagtaagcagaggcttaggatatatatatatatatatatatattcaagattcaaagaagtgatttaagtgtaaaatataaagagcagaaatttaccaagagacaaatgagcactcccttgtggccctggacgaggttttctttctgcctgtagatgtgcctcccactctagaacggaccataaagccgttttgctccccctcaatttatggctagtttaataaccacagtaggttttagagattagtgaatccaaaggtaaattgtttgaaaggcaaaaggattttgtaagttaaaactgtatgtcattcagctgttcaaacgaagcattccagttatgagggagaaaaaggtttgccagtctaacgtaagctttcaactttgggatcgtaacaaactgatctgagtaataagtcggataaagtaaaaaataaaaaagcctcatgtcaccaaatagcattcaataaattttgcataattattcacaagcatcatatgaatattaactatttgacaggaaagcacttgaataatacatttcttatgtcatcttgcaaaccaaaaagtataatcagttgggtgaaatttgcccaaatccaggaaacgatcctgacaaaatcgatctgattaatatcagggaagcaagtaacaggacgatcctttcctttcttatttacagcccctacacgagacaaatctcaaaactaaaccagcaaaaccatgctctgatctggtaattgtagttacaacgcacttttcttttggaattgacccctttcggttgcgttaagattccaaactcttggctggctctgattttaaattagtttaaaatccaccttgattattttgtttcggttgaagctggagaaagtatggttattatctcacagaaggtgagacacctaacctttatctaaggacaaatgtcaaaggcaacaatcaatcaaacaaacaaacaaagccatgagtgctctgggtgttcttattagacgccctctgacaagaaactcagtaccactggtagttggtagtttctttttatgtgctattactatggttgttgtaggtgttttttaaattgagtattaaggtctgcggttttgtgtttttttttaagtcagaatctgaagattgtcttgggaggttgtttagcgactgcttggggagacagcagagacggctaaaattggctcttatttaggatggcagactgagcagccgccttcctggtagctgagagaggagaaatatatgtatttggattgtgtaaacaatccgaaacctgttaagaagggttggatgagtggaaaagtagggacagggcgcgtggggggtttcccatttctgttttcactgcaatttagacggaacaaaagaagcccacggcactcagagagcttatggttggctctgtttcattaggcttcttggaattttcctatcaaaattgcaaaggaaggagtgtgtgatattcttgtgtgcagaggccagaagctgacagacagagagtgcatgagcaggagagaaatgtttaaatggtccccattcactccaaattagtctcttgacctgtaacatttgaggcatgatgtttagaaaaaaaggagtttcaagggtcaggtcttaccttcaagtgtctcttaagactggctggagaccaagccctcaccctctctctcccccatccacatctattttgtagttggagattgaattataaaaaatataatgtaatccttatttaaatttctcacaacagaaccccttgaatgtgaaacacaggttgtgtcagtattttcgaggccttgatttcaactacaaaaattaactctgtaaacatttttaagtttttcagacattttaaaagcatgcacctcagtaaggtcgggacagtgatttgagcctccatggcctctttactatgagaaatttgtaagagtgaaaagtcttcatgaaccaatctggactcctcattaagccaaccagacccagatgttttgtgaacgtaggggtcatgttcgtctgatgctttcagcaaaggggaaagaagggggctactttgtatatatttagacccagtgaaaggaaggaggatacaagtcaggaaagagtaacaattgtcatattcggaagctaatagattactggcttagttggaaagcctgccttattctgctacagagggatttcttttgctggtcaccatcttcatcagagtatccacctcctgtcagggcaggcaaaaagtatgtttttattaaatgtctcccttgcacagtaaagcttggactatgtcagaacgttgcttttttttttaaaacaaaaaatatgcctcaggtgtgttttatgaattactcaaaagagttcatgccccagaacttagcctgtacctgtgaaatattatcatgccccttatgtattcacaccagggctgtgctagattaaatagagatcatcaccatggtatgctaattactgtttttagcagtgacacagttgtgtgacagaaggtgtatgttaccaggtgattataacccagaaataattccctatttaacctctaaaaaaaaaaaa

SEQ ID NO: 3182 - DNA, 2260 bp, Rattus norvegicus
  Genbank Accession No. NM_012941
cggaggccggggccgcctcccgacgcccacctactagcttctccagctccatctttcccgagaagcggcagggacctcggcctccagcttaccgggcggatcgaagcagcggtcgggatggtactgctgggcttgctgcagtcaggcggctcggtgctcgggcaggcgatggagcaggtgacaggaggcaacctgctttccacgctgctcatcgcctgcgccttcacgcttagccttgtctacctgttccgcctcgcagtgggccacatggtccagctgcccgctggagcgaaaagtccgccatatatttactctccaattccgttccttggccacgcgatagcatttgggaaaagtccaattgagttcctggaaaatgcatatgagaagtacggacctgtgtttagctttaccatggtgggcaagactttcacttaccttttggggagtgacgcagccgccctgctcttcaacagtaagaacgaagacctgaatgcggaagaggtctacggtcggctgacaacgcccgtgtttgggaagggagttgcatacgacgtgccaaatgcagttttcctggaacagaagaaaatactaaaaagcggccttaacatagcccacttcaagcagtatgtttctatcattgaaaaagaagcgaaggagtactttaaaagttggggagaaagcggagaaagaaatgtgtttgaagcgctgtctgagctcataattttaacagctagccattgcttacatggaaaggaaattagaagtcagctcaacgagaaggtggctcagctgtacgcagacctggatggaggctttagccatgccgcctggctgttgccaggctggctgcccctgccgagtttcaggcgcagggacagagcccatcgagagatcaagaatattttctacaaggccatccagaaacgtaggctgtcaaaagaaccagccgaggacattcttcaaactttactggattctacatacaaggatgggcgtcctctgacggacgacgagatcgcagggatgctcatcggactgctgctggccggacagcacacatcctccaccaccagtgcctggatgggcttctttctggccagagataaaccacttcaagacaaatgctacttagaacagaaaacggtgtgcggggaggatctgcctcccttaacttatgagcagttgaaggatctgaatttacttgatagatgcataaaagaaacactaagactgaggcctcctataatgaccatgatgagaatggccaagacccctcagactgtggctgggtacaccattcctccaggacatcaggtgtgtgtttctccaactgtcaatcaaagactgaaagactcctgggtagaacgcttggacttcaatcctgaccgctacctacaggacaacccagcgtcgggagagaagtttgcctatgtgccgtttggagccgggcgccatcgttgtattggagaaaattttgcctatgttcaaattaagacaatttggtccactatgcttcgtttatatgaatttgacctcatcaatggatattttcccagtgtgaattatacaacaatgattcataccccagaaaacccagtaatccgttacaaacgaagatcaaaatgaagaaaggaacaaggagccagtgtggagacgggactgcaagctgcagcttggcagagaatgaagctttgacacagctttcatactgtactgttttttaagtgtgtggttctgaaagccagtttgattttaatgttttattaactcggtgatttttgtcagacctaatggcatttgaaacagttataatagttctgataggatttcagggaagccaagtttatgttagaaatcgtttaggggagcctcggtattcagagatgatacagaatatagcatccaggtaactaacttcagaagcacacgttgccgtagggagattccggcttggaactagtttgggaagttttaagcctggtcagatgctacagaggcaatgggtcattggtgtggttgggccacttctgtgcgtaaagatgtgagagggtgaaggataagttttctgcgaagctctagatggtgtgagtgccctttgtagtgttaactgagagcaccactccagcgagatggcagcaatcttggaccttatcttgataaccttatttcctaaaaataataaatactaaagagtacttatgttattggttccagaaaaatccaaaatcaaatccttgtggaatttttaattttaatt

SEQ ID NO: 3183 - DNA, 1225 bp, Rattus norvegicus
  Genbank Accession No. NM_012963
gtctggctcccgctctcacagccattgcagtacattgagctccatagagacagcgccggggcaagcgagagccggacgggcactgggcgactctgtgcctcgcggaggaaaatcaactaaacatgggcaaaggagatcctaagaagccgagaggcaaaatgtcctcatatgcattctttgtgcaaacctgccgggaggagcacaagaagaagcacccggatgcttctgtcaacttctcagagttctccaagaagtgctcagagaggtggaagaccatgtctgctaaagaaaaggggaaatttgaagatatggcaaaggctgacaaggctcgttatgaaagagaaatgaaaacctacatcccccccaaaggggagaccaaaaagaagttcaaggaccccaatgcccccaagaggcctccttcggccttcttcttgttctgttctgagtaccgcccaaaaatcaaaggcgagcatcctggcttatccattggtgatgttgcgaagaaactaggagagatgtggaacaacactgctgcggatgacaagcagccctatgaaaagaaggccgccaagctgaaggagaagtatgagaaggatattgctgcctacagagctaaaggaaaacctgatgcagcgaaaaagggggtggtcaaggctgagaagagcaagaaaaagaaggaagaggaagacgacgaggaggatgaagaggatgaggaagaggaggaagaagaggaagacgaagatgaagaagaagatgatgatgatgaataagttggttctacgcatgtttttttttcttgtctataaagcatttaacccccctgtacacaactcactccttttaaagaaaaaaattgaaatgtaaggctgtgtaagatttgtttttaaactgtacagtgtctttttttgtatagttaacacactaccgaatgtgtctttagctagccctgtcctggtggtattttcaatagccactaaccttgcctggtacagtctgggggttgtaaattggcatggaaattaaagcaggttcttgttggtgcacagcacaaattagttatatatggggacagtagttttggttttttggttttctttttttttttgtgtttttgttttttttcctttttgtttttttttccatcttcagttgtctctgatgcagattatacgaaggtaattgttgttctgttaactgaataccactctgtaattgcaaaaaaatg

SEQ ID NO: 3184 - DNA, 680 bp, Rattus norvegicus
  Genbank Accession No. NM_012966
gaggggcttgttctttcacctcagcggccgacctggaaaagcctagaaagtgctccccttttcttccgcctccggctacccgcatcggccgcctgcgcggagtcctggccaccaatcggcgcgcgcgctggagtggccgccttctctcacgctaaggggctgagtgcgcctgcgcgctgcgctgtcttttcacgtgtcctgagccggcccacgggagtctccttgcagcaggagtccgagtgcagagtccggagctgcggcggcgtaagtcatggctggacaagcttttaggaagtttcttccgctatttgacagagtattggttgaaaggagtgccgctgaaactgtgaccaaaggtggcattatgcttccagaaaagtctcaaggaaaagtattgcaagcaacggtcgtggctgtgggatcaggcgggaaaggaaagggtggagagattcagcctgtcagtgtgaaagttggagataaagttcttctcccagaacacggaggcaccaaagtagtactagacgacaaggattacttcttatttagagatggcgacattcttggaaagtatgtcgactgaaatcactgttgaaatggtgtcacatgaagctgcccattccactgatattctgaactatttcatcatgtaaataatttccatgcctcccttttataataaa

SEQ ID NO: 3185 - DNA, 2602 bp, Rattus norvegicus
  Genbank Accession No. NM_012967
ctgctgcctgcactttgccctggtcctccaatggcttcaacccgtgccaggcccatgctgcctctgctcctggtcctggtcgccgttgtgatccccgggcctgtcggtgctcaggtatccatccatcccacagaagccttcctgcctcggggtggatccgtgcaggtgaactgctcttcctcttgcgaagacgagaacctcggcctggggttggagactaactggatgaaagacgaactatcgagtggacacaactggaagctcttcaagctgagcgacattggggaagacagcagaccactgtgctttgagaactgtggcaccacgcagtcctcggcttctgccaccatcactgtgtattcgttcccagagcgagtggagctggatcctctgcccgcctggcagcaggtgggcaagaacctcatcctgcgctgcctggtggaaggcggagcaccgcggacacagctctcagtagtgctgctccgtgggaatgagacactgagccgccaggcagtggatggggaccccaaggagatcacattcacggtgctggccagcagaggcgaccacggagccaatttctcatgcttcacagaactggacctcaggccacaagggctgtcactgttcaagaatgtctccgaggtcaggcagctccggactttcgatcttccgactagggtcctgaagctcgacacccctgacctcctggaggtgggcacccagcagaagttcttgtgttccctggaaggcctgtttcctgcctctgaagctcagatatacctggagatgggaggccagatgctgaccctggagagcacaaacagcagagattttgtgtcagccactgcctcagtggaggtgactgagaagttggacagaaccctgcagctgcgctgtgttttggagctggcggaccagaccctggagatggagaagaccttgagaatctacaacttttcagctcccatcctgaccctgagccagccggaggtctcagaaggggaccaagtaactgtgaagtgtgaagcccacggtggggcacaggtggtgcttctgaacagtacttcccccaggccacccacctcacagggtacttcccccaggccacccacctcacagatccaattcacactgaatgccagcccggaggatcacaaacgacgcttcttttgctctgcggccttggaggtggatgggaagtccctgtttaaaaaccagaccttggaactccatgtgctatatggtcctcacctggacaagaaggactgcttggggaactggacctggcaagaggggtctcagcagactcttacatgccagccccaggggaatccagcccctaatctgacctgcagccggaaagcagatggtgtcccgctgcctatcgggatggtgaagtctgtcaaacgggagatgaatggtacctacaagtgccgtgcctttagctcccgtgggagtatcaccagggacgtgcacctgacagtgctgtaccatgatcagaatacctgggtcataattgttggtgtgttggtactgatcattgcgggcttcgtgatcgtggcgtccatttacacctattaccgccagaggaagatcaggatatacaagttacagaaggctcaggaggaggccctaaaactcaaggtacaagccccgcctccctgagcccactggacaggacacctgcctgggccccgctgctcttgaacagatcaatggacagcatttacccctcacccacctcctctggctgtcacaggacaggacagtggcctggggatgcatacttgtagcctcaggcctaagaggactcggaggggcaagactgtgaactcgtgacctggacacacctacagcctggtgggcctgcagccaagaaaggctgacttccttctctattacccctgctgaggggccccctaccttaggaaggtgtgatatccggtagacacaagcaagagaagaaaaggaacaccatgcttcctctgacatgggaaagctgggacactgtccccaactcttgttgatgtatttattaattcagagttctgacagttatttattgagtaccctgtacagacactagaggagtgagcaggttaacatgtaagttattgcctagaccctggtgaaggggcacaacagagtctggggaaagatcatacgggtttgggcttctccacaggtcagggtgctttcctcaaaagagctgatttctttcacgagtcatataaatactatgtggacgagcagtggccctctgctcgtagacctctctgggacccctgcctcctcccacagcctggagtctcccagcaccagcatgggtgaccacctccccacctacatacattcctacctttgttcccaatgtcaaccaccatgcctaaatatggacgctcacctttagcagctcaacaatggagtctcatgcccgtgaaattatggtcaatccctgcatgcctccacccggctccacctcaaagagaatgcctgggagaaaatgttccaaccacttagaagggtcctgcaagctgttgtgggagggtaggcacccctcccagcgcagaagcctttcctttgaatcaataaagtttta

SEQ ID NO: 3186 - DNA, 872 bp, Rattus norvegicus
  Genbank Accession No. NM_012976
ggaagagagcgttggttctcccaagacagaagagatgtcttccttcagcacccagactccatacccgaacctagctgtacctttcttcaccagcatcccaaatgggctttacccatccaagtccatcgtcatatcaggcgtggtcttgtcagatgctaagaggttccagatcaaccttcgctgtgggggtgacattgctttccacctgaacccccgttttgatgagaatgctgtggtccgaaacactcagatcaacaactcctgggggcccgaagagcgaagcctgcctgggagtatgcccttcagtcgtggccagagattctcagtgtggatcttatgtgaaggtcactgcttcaaggtggccgtggacggtcagcatatttgtgaatacagccaccgcctgatgaacttgccggatatcaacactctagaggtggctggtgatatccagctaacacacgtggagacctaggaaggtctctggcctagggatgaaggctgaggaaccctacctgagtcttgtcacctcttccctgtctcagccctgcctccccaaatcctgtcatcaaagagagcctcattggcaggagttccaggaaggtgacattcccaattcacaccctccacaaagggggagtcctgggctgtgggacacatggctgtgagcccacagtgtcagccattgctcccaagctagtcatcttctgagggaagtgacctccctgggtttgcccctttctctgaccctttcccttcacccctccaggagggccaccttgatgtcatcccactggcctccaactgacccagaatgtccacattaacttttccccaatctttcccaatgcccataaaataaagaatatcaacgc

SEQ ID NO: 3187 - DNA, 553 bp, Rattus norvegicus
  Genbank Accession No. NM_012985
tgaattcgtgggttacccctagccccgcctgagaggtgggagccaagtgctttcttgggtgacacaggagcagcttctacgttcgattgagcgggcctgggaaaggttcccagaaggccgcgcgctggagtctctgagcgcagtcatggcgggcttggtgaagaagactactggcctggtgggattggccgtttgcgacactccacacgagaggctaacaatattgtatacaaagattcttgatcttctgaagcactttcctaaacatgcagcctacagaaagtacacagaacagatcaccagtgagaagctggagttggtcaaattggaaccagatgttaaaaaattagaaaacttgcttcagggtggtgaagtagaagaggtgattcttcaggctgaaaaagaactaagtctggcaagaaaaatgttgcagtggaagccctgggagccactggtggaggagccccctgctaaccagtggaagtggccaatataatccccgtgtctgatgatggatgtggatctaatgtgcaattaaatgttctgtgatgcc

SEQ ID NO: 3188 - DNA, 3368 bp, Rattus norvegicus
  Genbank Accession No. NM_012988
cgaccgacctgcagttgagccgagttggaaatgtgaacgcaagaagcaggcttgatttttttttcctccccccctctcctagctctctcctcctctctctccctctcgcacccacactcacgcacacctccagcccgcacacagacgtgcacgcaccccccgccgcccggcagttatgtattctccgctctgtctcacccaggatgagtttcatcctttcattgaagcacttctgccccatgtccgcgccttcgcctacacatggttcaacctgcaggcccgaaagcggaaatacttcaaaaagcatgagaagcgcatgtcgaaagaagaggagagggctgtgaaggatgaactgctaagtgagaagcctgaggtcaagcaaaagtgggcttcccgacttctggccaagttacggaaagatatccgacccgagtaccgagaggattttgttcttacagttacagggaaaaaacctccatgctgtgttctttccaacccagaccagaaaggcaagatgcggagaattgactgcctccgccaggcagataaagtatggaggttggacctcgtcatggtgatcttgttcaaaggtattccgctggaaagtactgatggtgaacgccttgtgaagtccccacagtgctcgaatccagggctctgtgtccagccccatcacataggggtttctgtaaaggaactcgatttatatttggcatactttgtacatgcagcagattcaagtcaatctgaaagtcccagccaaccaagtgatgctgacattaaggaccagccagaaaatggacatttgggcttccaggacagcttcgtcacatcaggtgttttcagtgtgactgagctagtaagagtgtcacaaacaccaatagctgcaggaaccggccccaatttttctctctctgatttggaaagttcctcatactacagcatgagtccaggagcaatgaggaggtctctacccagcacatcctctaccagctctaccaagcgcctcaagtctgtggaggacgaaatggacagtcctggtgaagaaccattttacacaggccaagggcgctccccagggagtggcagccagtccagcggatggcatgaagtagagccaggcatgccatctccaaccactctgaagaagtctgagaagtctggtttcagcagcccctccccttcgcagacctcctccctcggaacagcattcacacagcatcaccgacctgtcataacaggaccgagagcaagcccacatgcgacgccatcgactctccactttccaacgtcacctatcatccagcagcctgggccttatttctcacacccagccatccgttaccaccctcaggagacgctgaaggagtttgtccaacttgtctgccccgatgctggtcagcaagctggacaggtggggttcctcaatcccaatggaagcagtcaaggcaaggtgcacaacccattcctccccaccccaatgttgccgccgccaccgccaccaccgatggccaggcctgtgcctctgcccatgccagacaccaagcctccaaccacatcaacagaaggcggtgcagcctcccccacctcaccgacctactcgacacccagcacctcccccgcaaaccgattcgtcagtgttggaccacgggatccaagctttgtaaatatccctcaacagacacagtcctggtacctgggataaaagttgcagcgtcccaccatcctccagacagaccacctgaccccttctcaactctgtaacatggacgcaacctcaacccggcgcagttacaacttcactgtcagtggaaggggagagacaccaactcgaatcaacttgtacatggaaacagcgaacgtcgtggtcaaacagcaaaggcccataacttttcgggattcttttttttttttaatactttagggactgtcgaattctctaaatatggtgctggaaatgcgttgggctgtgtgacatttgaagtgttccagtggtggtgtgagcagtaggtgaagcggctggtaggggatgagccttgctcacgaacttcctgttgtaacacttttgagcctggccttttcacagtatttcaagaatttgcccgcgcaggtgtgtgaccctcccggagcacttggagacacctggagaatgaaatctttcgtagtagctaagatctgtgatctgtaacttacaggacactcaagggcaatgtttttggggttttcttttttttctgtaacatattagaaaaagcaatgcagttaagttatctttcttttagtttggtttggttcagcagtcagcagttaaatacataacacaaccctcaaggacagtgaacccactcatgttgcagagcaatccaaaaagacagcaaagactactactactactctcagttcggttgtttgtttttttttttttttttttgtttttttattaagttttgaaatgctgcacttacatttaaaaaaaacattttcaacaatttcaacaatgacacaaaagttcacatggaaatggggaagatggtctgttttgacagaaactgacaggaatcaaaacaatcgaattttgaattgagtgaagtgcaatttcattggatagctaagtatctttgtaagatagagattgttgaaaattctatttttgtttttcaagtcctcccaccccaggactctaaattattggggttaaaaaaaaacagccttgcaagaaaaaggggagctatttttgctttttatgttttttattgttaaacttgtatccctttaaaaaaaaaaaccgaaggaaaatttaaaaaaaaagcaaaaaaaaaaaatacaaatctaatggtgcttttacctccaatatgttaactacattaaatgctaattaattattttctgttatcaaagcacataactcaaatgaaatcatggtatctgttaattttataagctagaaatcactataatgaattatgccaattctggaaaattttacacatgtatggcaacaccagatctatcggttttcaaacgcctcgtcgtaaccagacattgtccagaagtttcaaagacccttcgcaaaccctgaatcggctacgggaaatatatcagatcgataaggacataactgtgtgagccattcagatcaaagtacttgttaggaaaataaacaaacaaacaaaaacaaaatgttcacacacacacacaccccaaatgtcttgtatcttatgtttaaggaaaaagaaaagacaaaacggcacgagggtctgaccaccatgacaacctacagcaacaaggaccaaagctgagagaggcgtctcattcactcgtgaccttctggtggcaccgagcaggctgctctcttgcacagatggttg

SEQ ID NO: 3189 - DNA, 1232 bp, Rattus norvegicus
  Genbank Accession No. NM_012992
gttttccgtccggcttctctcacactcaagtgcgcgcctccacctcatggaagactcgatggacatggacatgagccctcttaggcctcagaactaccttttcggttgtgaactaaaggctgacaaagattatcactttaaagtggataatgatgaaaatgagcaccagttatcattaagaacggtcagtttaggagcaggggcaaaagatgagttgcacatcgtagaggcagaagcaatgaactatgaaggcagcccaattaaagtaacactggcaactttgaaaatgtctgtacaaccaacagtttcccttgggggcttcgaaattacaccacctgtggtcttgaggttgaagtgtggttctgggcctgtgcacataagtggacagcacctagtagctgtagaggaagatgcagagtcagaagatgaagatgaggaagatgtaaaactcttaggcatgtctggaaagagatctgctcccggaggtggtaacaaagtcccacagaaaaaagtaaaacttgatgaagatgatgatgaggatgatgaagatgatgaggatgatgaagatgatgatgatgatgattttgatgaagaggaaactgaagaaaaggttccagtgaagaaatctgtacgagataccccagccaaaaatgcacaaaaatcaaaccaaaatgggaaagatttaaaaccatcaacaccaaggtcaaagggtcaagagtccttcaaaaaacaggaaaaaactcccaaaacacccaaaggacctagctctgtagaagacattaaggcaaaaatgcaagcaagtatagaaaaaggtggttctcttcccaaagtggaagccaagttcattaattatgtgaagaattgtttccggatgactgaccaggaggctattcaagatctctggcagtggaggaagtctctttaagaaaatggtttaaacagtttgaaataattctgtcttcatttctgtaatagttgctatctggctgtcctttttataatgcaaagtgagaactttccctactgtgtttgataaatgttgtccaggttcaattgccaagaatgtgttgtctaaaatgcctgtttagttttcaaggatggaactccgccctttacttggttttaagtatgtatggaatgttatgataggacatagtagtagtggtggtcagatgtggaaatggtagggagacaaatatacatgtgaaataaactcagtattttaataaagt

SEQ ID NO: 3190 - DNA, 3581 bp, Rattus norvegicus
  Genbank Accession No. NM_012993
tgaggagtaggaggaggaggtgggcctggggagcgggatgtccagcgctacgacttgctggtgaatgctgaggagagtcgcggttgctgcagtctttgccaccgggaggaagttgcggtgtgaggccgggcgggacgtcacggctgtgggacgaatcgaagcacggggtctgtgcgaagaatcagcgaaaccgtttcctacgctgaccatgcctggcagaaacaaggcgaagtccacctgcagttgcccggacctgcagcctaatggacaggacttgggcgagagcggccgggttgctcgtctaggagcggatgaatctgaggaggagggacggtctctcagtaatgtcggggaccctgagatcatcaagtctcccagcgatcccaagcagtaccgatacatcaaattacagaatggcttgcaggctcttttgatttcagatctaagtaatgtggagggtaaaacaggaaatgcaacagatgaagaggaagaggaagaagaggaagaggaggagggggaagaggaagaggaagaggaagaagacgatgacgatgatgatgatgaagactctggagctgagatacaggatgatgatgaggaaggctttgacgatgaagaggaatttgatgatgatgaacatgatgatgatgatcttgataatgaggaaaatgaactggaagaactggaagagcgggtggaagccagaaagaaaaccactgagaaacagtctgcagcggctctgtgtgttggagttgggagctttgctgatccagatgacctgcctgggctggcacactttttggagcacatggtattcatgggtagtttgaaatacccagatgagaatggatttgatgccttcctcaagaaacatggaggtagtgataatgcctcaaccgattgtgaacgcacagtctttcagtttgatgtccagagaaagtatttcaaggaagccctggatagatgggcccagttcttcatccatccactgatgatcagagatgcaattgaccgagaggtggaagctgtggacagtgagtatcagcttgcaagaccttctgatgcaaacagaaaagaaatgttgtttggaagtcttgctagacctggacatcctatggggaagtttttttggggaaatgctgagacactcaagcatgaaccaaagaagaataatattgatacacatgccagactgagagagttctggatgcgttactactctgctcattacatgaccttagtagtccagtccaaagaaaccttggacactttggaaaagtgggtgacggagatcttctctcagataccaaacaatgggctacctaaaccaaactttagccatttaacggatccttttgacacaccagcatttaacaaactttatagagttgttccaatcagaaaaatccatgctctgaccatcacgtgggcccttcctccgcagcagcaacactacagggtgaagccacttcattatatctcctggcttgtggggcatgaaggcaaaggcagcatcctttcttaccttagaaaaaagtgctgggctcttgcgttgtttggtggaaatggtgagacaggttttgagcaaaattctacctactcagtgttcagcatttctatcactctgactgatgaggggtatgagcatttttatgaggttgctcacactgtctttcagtatttaaaaatgctgcagaaactaggtccggagaaaagagtttttgaagagattcagaaaattgaggataatgaatttcattaccaagaacagacagatccagttgagtacgtggagaacatgtgtgagaacatgcagctgtacccacgtcaggactttctcactggagatcagcttctgtttgagtacaagccagaagtcattgccgaggcccttaatcagctagttcctcaaaaggcaaatctcgtgcttctgtctggtgctaacgagggaagatgtgacctcaaggagaagtggtttgggactcagtacagcatagaagatattgaaaactcttggactgaactgtggaagagcaattttgacttaaattcagaccttcatctaccagctgaaaacaaatacatagccacggactttacattgaaggcttttgattgccctgaaactgaataccctgctaaaattgtgaataccccacaaggttgcctgtggtataagaaagacaacaaattcaaaatccccaaagcctatatacgatttcatctgatctcacctttgatacagaaatctgcagcaaatgttgtcctcttcgacatcttcgtcaacattcttactcacaaccttgctgagccagcctatgaagccgatgtggcccagctggagtataaactggtagccggagagcacggtttaatcatccgagtgaagggattcaaccacaaactacctctgctcttccagctcatcattgactacctgactgagttcagctccacgcccgctgtcttcaccatgataactgagcagctgaagaagacctacttcaacatcctcatcaagcctgagactctggccaaagatgtgcggcttttaattctggaatattcccgctggtctatgattgacaagtaccgagctttgatggatggcctttcccttgagtctctgctaaactttgtcaaggattttaaatcccaactctttgttgagggcctggtgcaagggaatgtcaccagcacggaatcgatggatttcctaagatacgttgttgacaagctgaacttcgtgcccctggagcgggagatgcccgtgcagttccaggtggtggagctgccgagcggccaccacctgtgcaaagtcagagccctgaataagggggacgccaactctgaagtcactgtgtactaccagtcaggtacaaggagtctgagagaatacacgctcatggagctgcttgtgatgcacatggaggagccctgctttgacttccttcgaaccaagcagacccttgggtaccacgtctacccgacctgtaggaacacatctggcattctaggattttctgtaactgttgggactcaggcaaccaaatacaactctgaaactgttgacaagaagatagaagaatttctttccagctttgaggagaagattgagaacctcacagaggatgcattcaatactcaggtcacagctctgatcaagttgaaagagtgtgaggacacccacctcggggaggaggtggacaggaactggaatgaagtggtgacacagcagtatctctttgaccgccttgcccatgagattgaagcgctgaagtctttctcaaagtcagacctggtcagttggttcaaggctcacagaggacctgggagtaaaatgctcagcgttcatgttgttggatatgggaagtatgaactggaagaggacggcgctcccgtttgtgaggatccgaattctcgtgaagggatgcagctaatctacctgccaccctctcctctcctggcagagtccaccacccccattactgacatcagggccttcacagcgacgctcagcctcttcccctaccataagatagtcaaataaactgcagtctcactggcctgaagcaacttgt

SEQ ID NO: 3191 - DNA, 2460 bp, Rattus norvegicus
  Genbank Accession No. NM_012998
ccccggcgccaacctagctgccccgcccgctgccgacgtccgacatgctgagccgtgctttgctgtgcctggccctggcctgggcggctagggtgggcgccgacgctctggaggaggaggacaacgtcctggtgctgaagaagagcaacttcgcagagccggcggcgcacaactacctgctggtggagttctatgccccatggtgtggccactgcaaagcactggccccagagtatgccaaagctgctgcaaaactgaaggcagaaggctctgagatccgactagcaaaggtggacgccacagaagagtctgacctggcccagcagtatggtgtccgtggctaccccacaatcaagttcttcaagaatggagacacagcctccccaaaggaatatacagctggcagggaagctgacgacattgtgaactggctgaagaaacgcacaggcccagcagccacaaccctgtctgacactgcagctgcagagtccttggtggactcaagcgaagtgacggtcatcggcttcttcaaggacgcagggtcagactccgccaagcagttcttgctggcagcagaggctgttgatgacataccttttggaatcacttccaatagcgatgtgttttccaagtaccagctggacaaggatggggtggtcctctttaagaagtttgatgaaggccgcaacaattttgaaggtgagatcaccaaggagaagctattagacttcatcaagcacaaccagctgcctttggtcatcgagttcactgaacagacagctccaaagattttcggaggtgaaatcaagacacatattctgctgttcctgcccaagagtgtgtctgactacgatggcaaattgagcaactttaagaaagcggccgagggctttaagggcaagatcctgttcatcttcatcgatagtgaccacactgacaaccagcgcatacttgagttctttggcctgaagaaggaggaatgtccagctgtgcggcttattaccctggaggaagagatgaccaagtacaaaccggagtcagacgagctgacagctgagaagatcacacaattttgccaccacttcctggagggcaagatcaagccccacctgatgagccaggaactgcctgaagactgggacaagcagccagtgaaagtgctagttgggaaaaactttgaggaggttgcttttgatgagaaaaagaacgtgtttgttgaattctatgctccctggtgtggtcactgcaagcagctagccccgatttgggataaactgggagagacatacaaagaccatgagaatatcgtcatcgctaagatggactcaacagccaatgaggtggaagctgtgaaggtgcacagctttcccacactcaagttcttcccagcaagtgcagacagaacggtcattgattacaacggtgagcggacactagatggttttaagaaattcttggagagcggtggccaggatggagcgggggacaatgacgacctcgacctagaagaagctttagagccagatatggaagaagacgacgatcagaaagccgtgaaggatgaactgtagtgcagaagccagatctgggcgcctgaacccaaaacctcggtgggccatgtcccagcagcccacatctccggagcctgagcctcaccccaggagggagcgccatcagaacccagggaatctttctgaagccacactcatctgacacacgtacacttaaacctgtctcttctttttttgcttttcaattttggaaagggatctctgtccaggccagcccatcttgaagggctacgttttgttttaattggtggtgtacttttttgtacgtggattttgtcccaagtgcttgctaccatatttggggatttcacactggtaatgtctttcctgttagagaggtttatgctatcacttcagatttcgtctgtgagatgtttcatcttcctgacatgtctccatgtcgaggtacttgttccaccacgcagacctccctgagaccccttcctgccctgcgcaggaggcgatggttctgggtcgtatgctctctctctctccaccttgtactagtgttgccatgacagcatggcttttgtagtttgcatttaacctggggatttctgcatcctgtcagagggtgggtccccacgtgtggaaaagagacagtggtggcttgctgccaggctcaggccaggcctggacagctctcactcttcttaagccagaactaccgaccagccggccggctgtgggcacattactctggctgctggatcctcttccagcatggcatgtggcctgtgtgaggcagaaccgggacccttgattcccagactgggagtcagctaaggacactggggctgaatgaaatgcccattctcaaggtctatttctaaaccataatgttggaattgaacacattggctaaataaagttgaaattttactaccat

SEQ ID NO: 3192 - DNA, 4153 bp, Rattus norvegicus
  Genbank Accession No. NM_012999
tcgggcgccgcgcgagcctgccgctgccatgcctccgcgcgcgccgccagcgcccgggccccggccgccgccccgggccgccggccggcacgggctctcgccgctggcgccgcgcccctggcgttggctgcttctgctcgctctgcccgccgtctgctccgcgctgccgccgccgcgccccgtctacaccaaccactgggcagtgcaagtgctgggcggccccggcgcggcggaccgcgtggctgcggctcacggctacctcaacttgggccagattggaaatctggacgattactatcatttttaccacagcaagaccttcaagagatcaaccttgagtagcaggggcccccacaccttcctcagaatggacccacaggtaaaatggctccagcaacaggaagtgaaacgcagggtcaagagacaggcgcgaagcgactctctttatttcaatgatcccatttggtccaacatgtggtatatgcattgtgctgataagaacagtcgctgtcggtcagagatgaacgtccaggcggcatggaagcgcggctacacaggaaagaacgtggttgtcaccatcctcgatgacggcatagaaaggaatcacccagacctggcccccaactacgattcctatgcaagctacgatgtcaacggaaacgattatgacccatcaccgagatatgatgccagcaacgagaacaaacatggtactcgctgtgcgggagaagtcgctgcttcagccaacaactcctactgcatcgtgggcatagcatataatgcaaagataggaggcatccggatgctggacggtgacgtgaccgacgtggttgaggccaagtctctgggcatcagacccaactacattgacatttacagcgctagttgggggccagatgatgatgggaagaccgtggatgggcccggccgtctggctaaacaggctttcgagtatggcattaaaaagggccgccaaggtctgggctccatttttgtctgggcctctgggaatggtgggagagaaggggaccactgctcctgtgatggctacaccaacagcatctacaccatctctgtgagcagcaccactgagaacggccacaaaccctggtacctggaggaatgtgcttccaccttggctaccacctacagcagcggggccttctatgaacggaagatcgtcaccacggacctgcgtcagcgctgcaccgacggccacactgggacatctgtctcagctcccatggtggctggcatcattgccctggctctagaagcaaacaaccagttgacctggagggacgtgcagcacctgttagtaaagacgtcacggccggctcatctgaaggcgagtgactggaaagtcaacggagctgggcataaagttagccatctctatggatttggcttggtggatgctgaagcgctcgtcctagaggcaaggaagtggacggcagtgccatcccagcacatgtgcgtggccaccgcagacaaaaggcccaggagcatccccgtagtgcaggtgctgcggaccacagccctgaccaatgcctgtgcagaccactctgaccagcgtgtggtgtacctggagcatgtggtagtccgaatctctatctcacatccacgacggggtgacctccagatccacctgatttctccctctggaaccaagtctcaacttttggcaaagagattgctggatttttccaatgaggggttcacgaactgggagttcatgactgtccactgctggggagaaaaggctgaaggtgaatggaccctggaagtccaggatataccatcgcaggtccgcaacccagagaaacaaggaaagttgaaagaatggagcctcattttatatggcactgcagagcacccataccgcaccttcagctcccaccagtctcgctcacggatgctggagctttcagtcccggaacaggagcctctcaaggctgagggaccaccaccgcaggcagagactccagaagaagaggaagagtacacaggtgtgtgccatccagagtgtggtgataaaggctgcgatggtcccagtgcagaccagtgcttgaactgcgtccacttcagcctgggaaactccaagacaaacaggaagtgtgtgagcgagtgccccttgggctactttggggacacagcagcaagacgctgccgtcgatgccataagggatgtgagacatgcacgggcaggagcccaacacagtgcctgtcttgtcgccgtgggttctatcaccaccaggaaacgaacacatgtgtgaccctgtgtcctgccggactttatgctgatgaaagtcagagactctgcctcaggtgccacccgagctgtcagaagtgtgtggatgaacctgagaagtcgactgtgtgcaaggagggattcagcctcgcacggggcagctgcattccggactgtgaaccaggtacctacttcgattctgagctcatcagatgtggggaatgccatcacacctgccggacctgcgtggggcccagcagagaagaatgtattcactgtgcaaaaagcttccacttccaagactggaaatgtgtgccggcctgtggtgagggcttctacccggaggagatgcctggcttaccccacaaagtgtgtcgaagatgtgatgaaaactgcctgagctgcgagggctccagcaggaactgcagcagatgtaaagctggcttcacgcagctggggacctcctgcatcaccaaccacacgtgcagtaacgccgatgagaccttctgcgagatggtaaagtccaaccggctctgtgaacggaagctcttcatccagttttgttgccgcacctgcctcctggctgggtagggcgggcgccagctgccacagagggcagggtcctcctgtctgcccttttgcccagctaccttcctacagatggccagccatagcccattccttggggtggccctgagtctgacagctgtgccctcccccccccagagctgggtcccactgcagcatctctgagcacctgaactaggtggaggtggcccttaaggataaggctaaatcggcaaaaatccccctgaactctgcttgctggctgcagtctaaagctggactcgaaataggaacagagtgaattatgagactcatgcctgcagcttgggagtggcttctgggaccctagtttactgaaacttcaagaccaaagcagaaaaagagagatgcctggcatcccatcaagtcctcctcccacacattcgtgtgaccgtgacagatctcaccgagttggctggcaggaccccatgctgtcctcacctataatgaagggcctcgcttcctccccatgcatcactggccaccaaacagcctgagggatggtttgatgagactgtaaataaaataggtttcagggcataagatgtatgaccactggggatagaacctatgtctacacagctccttccgaaactacagccccctgactggaaggtccggcaccagactgaagtaggtctactcatcctctcctcagcattctcctctgagtgagctgagctgtccaagtgactgttcaacctgtgtcccagggcctcctgggcctgagccaccagtcatctacagatacagagcctgtggaggagggtccaaaggagctacttaaggctagccgaaagacctctaatggccaagcagttcctccttatgcaaagccagccccaaatcactaatcgccagccctccatggcacacaactgcttctcaagtgcatttggcctccacactcaggactctgttctcgggtggacactgctctggcccagtatagtacaagcctacgttgatagagctggattgatttttctgccaagcctgtgtgggcattttataagctacgtgttctaatttttaccgatgttaattattttgacaaatatttcatatattttcattgaaatgcgcagatctgcttggtccagttccctttaacgtgggaataacatttgccttaaatttttccaacctcgtctctctccatatggtcctgctctcctctctgaatataatgtgttttgtcttgtcacctgtaagtggcaaggactcagctgttgtctgttgaatccacaacttcaaataagaaatcagtgaagcaaatctaatgttaaccctgag

SEQ ID NO: 3193 - DNA, 3770 bp, Rattus norvegicus
  Genbank Accession No. NM_013000
gcgggcggctccagcgggcgggcggacggactccagagccgcttcccacgcgtcgggagcggaccgagcggacccggctggccgcgcatcgccctcgcccggggccatgaagtagctgcggccgccagccctgccatcccgcggcccggccactgcccgctgccctggtcctgcgcggacatggccggacgcgcccgcagcggtctgctactgctgctgctggggctgctcgccctgcagagcagctgcctggccttcagaagcccactttctgtctttaagaggtttaaagaaactaccagatcattttccaatgaatgccttggtaccattggaccagtcacccctcttgatgcatcagattttgcgctggatattcgcatgcctggggttacacctaaagagtctgacacatacttctgcatgtccatgcgtctgcctgtggatgaggaagccttcgtgattgacttcaagcctcgtgccagcatggatactgtccaccatatgctgctgtttggatgcaatatgccctcgtccactggaagttactggttttgtgatgaaggaacctgtacagataaagccaatattctatatgcctgggcaaggaatgctccccccacccggctcccgaaaggtgttggattcagagttggaggagaaactggaagcaaatacttcgtccttcaagttcactatggcgatatcagtgcttttcgagataatcacaaagactgctctggcgtgtccgtacatctcacacgtgtgccccagcctttaattgcgggcatgtaccttatgatgtctgttgacactgtcataccaccaggagagaaagtagtgaatgctgacatttcgtgccaatacaaaatgtatccaatgcatgtgtttgcctacagagtccacactcaccatttaggtaaggtggtgagcggatacagagtaagaaacggacagtggacactgattggacgccagaacccccagctgccacaggctttctaccctgtggaacaccccgttgatgttacttttggtgatatactggcagccagatgtgtgttcactggtgaagggaggacagaggccacccatatcggcggcacttctagtgacgaaatgtgtaacctgtacatcatgtattacatggaagccaaatatgcactttccttcatgacctgtacaaagaacgtggctccagatatgttcagaactatcccagcagaggccaatatcccaattcctgtcaaaccggacatggttatgatgcacgggcatcacaaagaagcagaaaacaaagaaaagagtgctttaatgcagcagccaaaacagggagaggaagaagtattagagcagggtgatttctattcactgctttccaagctgctaggagaaagggaagatgttcatgtgcacaagtataatcctacagaaaagacagaatctgggtcagacctggtagctgagattgcaaacgtggtccagaaaaaggaccttggtcggtctgacgccagagaaggtgcagagcatgaggaatggggtaatgctatcctagtcagagacaggatccacagattccaccagctagagtcaactctgaggccagctgagagcagagctttctcgttccagcagcctggcgaaggcccttgggaaccagaaccctcaggagatttccatgtggaagaagaactggactggcctggagtgtacttgttaccaggccaggtttctggggtggccctggattctaagaataacctagtgattttccacagaggtgaccatgtttgggatggaaactcttttgacagcaagtttgtttaccagcaaagaggtcttgggccaattgaagaagacaccatcctggtcattgacccaaataatgctgaaatcctccagtccagtggcaagaacctgttttatttaccacacggcttgagcatagatacagatggaaattattgggtcacagatgtggctctccaccaggtgttcaaattggacccgcatagcaaagaaggccctctcttaattctgggaaggagcatgcaacctgggagtgaccaaaatcatttctgccagcccaccgatgtggctgtggagcccagtactggagctgtcttcgtgtcagacggttactgtaacagtcggattgtgcagttttcaccaagcggaaagttcgtcacccagtggggagaagagtcctctggaagcagtcctaggccaggccagttcagtgttcctcacagtttggcccttgtgcctcatttggaccagttgtgtgtggcagacagggaaaatggccgaatccaatgcttcaaaactgacaccaaagaatttgtgagagagattaagcacgcatcatttggaaggaatgtctttgccatttcatatataccaggtttcctctttgccgtaaacgggaagccttactttggagaccaagagcccgtgcaaggatttgtgatgaacttttccagtggggaaattatagacgtcttcaagccagtacgcaagcacttcgacatgcctcatgatattgtggcttctgaagatgggactgtgtacattggagacgcacacacaaacaccgtgtggaagttcaccctgactgaaaaaatggagcatcggtcagttaaaaaggctggcattgaagtccaggaaatcaaagaagccgaggcagttgttgaacccaaagtggagaacaaacccacctcctcagaattgcagaagatgcaagagaaacagaaactgagcacagagcccggctcgggagtgtccgtggttctcattacaacccttctggttattcctgtgctggtcctgctggccattgtcatgtttattcggtggaaaaaatcaagggcctttggagatcatgaccgcaagctcgagtcaagttctggaagagtcctgggaagattccgaggaaagggaagcggcggcttaaatctgggaaatttctttgcaagtcgaaaaggctacagcagaaaagggtttgaccgagtgagcacagaggggagtgaccaagagaaagatgaggacgacggaactgagtctgaagaggagtactcggccccgctgcccaagcctgcaccttcctcctgagcctccagccttcgcccgggtagctggactgaggtttaccaggatgcccagactccttcccctttagcgcgtgtaaagttctgtgcatttgattgtaaactgtactcgtcagtgtgggactgtacacaccttatttacttcatttggctccgttggcttctgttctctaggtgaggagttccccaccagttcactccagtgccattgtctttatatgaacttagcgtagagaagccgccctcctcttccaaggtagcgctccaacccccgagggaagtttagctcattcacatttggagacgttttagttggtggatgtaaatagccctattctctgcttgaacacagtattctcccagtccacacccatcgccagtgtctttctttggtgcctttcctgttcagcattctcagcctgtggcagtgaagagaaccaacctgccacacgacgaaaagctgctaaatctccttctatttttttaaaatcactaacattatattgcaatgagagaaattttaaaaagtctctatttaaattctttttttaaatttctcctcagttggtgtgtttccgggatgtcttatttttagatggttacactgttagaacactatttttcagaatctgaatgtaatttgtgtaataaagtgttttcaga

SEQ ID NO: 3194 - DNA, 893 bp, Rattus norvegicus
  Genbank Accession No. NM_013003
tccccgctgagttcatcaccagggacaggtgacctgagctgcccctggagcccagctcccatttccttctggttctggccgatctcttcgttatgagctggctgctgggttacgtggaccccacagagcccagctttgtggcggctgtgctcaccattgtgttcaatccactcttctggaatgtggtagcaaggtgggagcagagaactcgcaagctgagcagagccttcgggtccccttacctagcctgctattccctgggcagcatcatcctgcttctgaacatcctccgctcccactgcttcacacaggccatgatgagccagcccaagatggagggcctggatagccacaccatctacttcctgggccttgcactcctgggctggggactcgtgtttgtgctctccagcttctatgcactggggttcactgggacctttctaggtgactactttgggatcctcaaggagtccagagtgaccacatttcccttcagcgtgctggacaaccccatgtactggggaagtacagccaactacctaggctgggcacttatgcacgccagccctacaggcctgctgttgacggtgctggtggcactcgtctacgtggttgctctcctgtttgaagagcccttcactgcggagatctaccggcggaaagccaccaggttgcacaaaaggagctgacagggccatgagggacctttggaaagccggattgcctcccggctgacccaagcaacaacccttctcggggagagcagcgctggccattgtacctgtgccttggaaaccagtcatgggggtgctcaggcattatgtcatgtgactgctgagacccccatccccaccaatccctgacacactaataaaggctttgtgacctcc

SEQ ID NO: 3195 - DNA, 1687 bp, Rattus norvegicus
  Genbank Accession No. NM_013011
cccagagactgccgagccgggtccgtgtgccgccacccactccggacacagaatatccagttatggataaaaatgagctggtgcagaaggccaagctggccgagcaggcagagcgatacgatgacatggcagcctgcatgaagtctgtcactgagcaaggagccgagctgtctaacgaggagaggaaccttctctctgttgcttataaaaacgttgtaggagcccgtaggtcatcttggagggtcgtctcgagtattgagcagaagacggaaggtgctgagaaaaagcagcagatggctcgagaatacagagagaagatcgagatggagctgagggacatctgcaacgacgtactgtctcttttggaaaagttcttgatccccaatgcttcgcagccagaaagcaaagtcttctatttgaaaatgaagggtgactactaccgctacttggctgaggttgctgctggtgatgacaagaaaggaattgtggaccagtcacagcaagcataccaagaagcatttgaaatcagcaaaaaggagatgcagccgacacaccccatcagactgggtctggccctcaacttctctgtgttctactatgagatcctgaactccccagagaaagcctgctctcttgcaaaaacagcttttgatgaagccattgctgaacttgatacattaagtgaagagtcgtacaaagacagcacgctaataatgcagttactgagagacaacttgacattgtggacatcggatacccaaggagacgaagcagaagcgggagaaggaggggaaaattaaccggccttccaacctttgtctgcctcattctaaaatttacacagtagaccatttgtcatccatgctgtcccacagatagtttttttgtttacgatttatgacaggtttatgttacttctatttgaatttctatatttcccatgtggttttatgttttaatattaggggagtagagccagttaactttagggagttactcgttttcatcttgaggtggccaatatgggatgtggaatttttacatgagttacacatgtttggcatagttagtacttttggtccattgtggcttcagaagggccagtgttcaaactgcttccatgtctaagcaaagaaaactgcctacatattggtgtgtgctggcggggaataaacaggataatgggtccagtcatgagtgtagtctgtgtgggtactgtaaggcttggagcacttgtgaggctgggacacgaacaccctgtggatgcacgctaagaccgtgtgtctgcgtgcacacccttgaccacagctccagaagttgtctgtagacaaagttgtgacccaatttactctgataagggcagaaacggttcacattccattatttgtaaagttacctgctgtttgctttcattatttttgctacacattttatttgtatttaaatgttttaggcaatctaagaacaaatgtaaaagtaaagatgcagtacaaacgagttgcttggtgttcccggctccatgcggatcaagcacagcggtaaacaaaatcccatgtatttaactttttttttttaagttttttgttttgttttgtttttgcttttgtgattttttttctctttttgatacttgcctaacatgcatgtgctgtaaaaatagttaacagggaaataacttgagatgacg

SEQ ID NO: 3196 - DNA, 2175 bp, Rattus norvegicus
  Genbank Accession No. NM_013013
attgcagcctgcggagtgaagcgcgccatgtatgctctcgctctcctcgccagccttctggtcaccgctctgaccagccctgtccaggacccgaagatatgctctgggggctcagcagtagtgtgcagagatgtgaagacggcggtggactgtagggctgtgaagcactgccagcagatggtctggagcaagcccacagcaaaatcccttccttgtgacatatgcaaaacggttgtcaccgaagctgggaacttgctgaaagataatgctactgaggaggagatcctccattacctggagaagacctgtgcgtggattcatgactccagcctgtcagcctcttgcaaggaggtggttgactcttacctgcctgtcatcctggacatgattaagggggagatgagcaaccccggggaagtgtgctctgcgctcaacctctgccagtcccttcaggagtacttggccgagcaaaaccagagacagctggagtccaacaagatcccggaggtggacctggcccgcgtggttgcccccttcatgtccaacatccctctcctgctgtaccctcaggatcggcctcgcagccagccgcagcccaaggctaacgaggacgtctgccaggactgtatgaagttggtgactgacatccagactgctgtgaggaccaactccagctttgtccagggcttggtggaccacgtcaaggaggattgtgaccgcctcgggccaggcgtgtctgacatatgcaagaactatgttgaccagtattctgaggtcgccgtccagatgatgatgcacatgcaacccaaggaaatctgtgtgatggttggcttctgtgatgaggtcaagagagtgccaatgaggactctggtccccgccactgaggccatcaagaatatcctccctgccctggagctgacggacccctatgagcaggatgtgatccaggcccaaaatgtgattttctgccaagtttgtcagcttgtgatgcgcaagttgtctgaactgattatcaacaatgccactgaggaacttctaattaaaggtttgagtaaagcctgctccctgctccctgctcctgcttcaaccaagtgccaggaagtgctggtaacatttggcccctccctgttggacgtcctcatgcatgaggtgaacccgaactttctgtgcggtgtgatcagcctctgttctgccaacccgaatttggtggggacccttgaacaacctgcagcagccattgtatctgcactgcccaaagagcctgcaccgccaaaacagcctgaagagcccaagcagtctgcattgcgcgcccatgtgcctcctcagaagaacggggggttctgtgaggtgtgcaagaagctggtcatctatttggaacataacctggagaaaaacagcaccaaggaggagatcctggctgcacttgagaagggctgcagcttcctgccagacccttaccagaagcagtgtgatgaatttgtggctgagtatgagcccttactgctggaaatccttgtggaggtgatggatccttcctttgtgtgctcgaaaattggagtctgcccttctgcctataagctgctgctgggaaccgagaagtgtgtctggggcccaggctactggtgtcagaacagtgagactgctgcccgatgcaatgctgtcgatcattgcaaacgccatgtgtggaactagctttccagcttgcagaagtcgcctacttgtgggtctagggtaatgaacacatagatctatttgacttaataagtaggagcccccttttgtcttcccccatctcctgtcccttactatagcatttctgtcacgtaagaggcgctgacagcacttccgtgtcccatttctgctccaaggatgaggacacttgggcttcagctccccggctgcccttttcacccacctgctggaggggggtggtgagccagagggcaggagcatgtgctcagccctctcggtgtgtagggatcatggccatctcctagcgtcagggaactgcgcaacttcctgtgctaccaaggagtttaatttggatgcttagaagcacagagtgatcaggcctttagagtgtgggatggccattgccacagcacagagacttgagaagcacctgctgcaggtggcttgctgtgacgttgccgtccctggtcagccttcattctg

SEQ ID NO: 3197 - DNA, 3709 bp, Rattus norvegicus
  Genbank Accession No. NM_013016
cgcgctcaccgccgatctcccatccttgctctgcagccgcggcccatggagcccgccggcccggcccctggccgcctagggccgctgctgttctgcctgctgctctccgcgtcctgtttctgtgcaggagccagcgggaaagaactgaaggtgactcaggctgacaaatcagtgtctgttgctgctggagattcggccactctgaactgcactgtgtcctccctgacgcctgtgggacccattaagtggttcaaaggagaagggcaaaatcggagcccgatctacagtttcataggaggagaacactttcctcgaattacaaatgtttcagatgctactaagagaaacaatatggactttagcatctgtatcagtaatgtcacccctgaagatgctggcacctactactgtgtgaagttccagaaaggaatagtagagcctgacacagaaattaaatctggagggggaacaacgctctatgtactcgccaaaccttcttcaccggaagtatcgggcccagactccaggggctctcctggacagacagtgaacttcacctgcaagtcttacggcttctctccccggaatatcaccctgaagtggctcaaagatgggaaagaactctcccatttggagaccaccatctccagtaaaagcaatgtctcctacaacatctccagcacagtcagcgtgaaactaagccccgaggacattcattctcgggtcatctgcgaggtagcccacgtcaccttggaaggacgcccgcttaatgggaccgctaacttttctaacatcatccgagtttcacccaccttgaagatcacccaacagcccctgacgcccgcgagccaggtgaacctcacctgccaggtgcagaagttctaccccaaggctctccagctgaactggctggagaatggaaacttatcacggacggacaagcccgagcatttcacagacaacagggatgggacctataattacacaagcctgttcctggtgaactcatctgctcacagagaggatgtggtattcacgtgccaggtggagcatgacagtcagccagcgatcaccgaaaaccataccgtgcgggcatttgcccactcgagtagtggaggcagcatggaaaccatccctgataataatgcttactacaactggaacgtcttcatcggtgtgggtgtggcgtgtgctttgctagtagtcctgctgatggctgccctctacctcctccgaatcaaacagaagaaagccaagggctcaacttcttccacacggttgcacgagcccgagaagaatgccagggaaataacccagatccaggacacaaatgacatcaacgacatcacatacgcagacctgaatctgcccaaagagaagaagcccgccccccgggtccccgagcccaacaaccacacagaatatgcaagcattgagacaggcaaactgcctaggccagaggataccctcacctatgctgacctggacatggtccacctcaaccgggcacagccaacccccaagcctgagccatccttctcagagtatgccagtgtccaagtccagaggaagtgaatggggctgtggttggctctaggccccatccccacaagttttcttgtcctacatggagtggccatgatgaggacaaccagccagccagccctgtctccagaaggccaggtggcacaggtcctaggaccaggggtaagggtggcttctgtcttccctccgtggctctccaacacctcttggacacccatgtccccttcttctggagctgggtgttgcagaaccagagggggaactggagaaagctgcctagaatccaagaagcgttgtgcctcagcccatcacactgggtctggatcctggtcttggcaacccccaggttgcttccttgatgctccagcgcctggtcttctgtgtggagaagagttcaccatctccatccaacttgagcttcggggccagactccctttagatcagaccgccccatgtgtggaagaactacaccaggagtcaacaagttttcacatgtgtgaagaactacaccaggagtcaacaagtttacgccaacagtgctagcctccccacctcccaggctgacgagccctgaggagaaggaaccctcttccccctagaccagcagagactccctgggcatgttcagtgtggccccacccttccagtcccagctcgcttcctccagctagcactaactcaacagcattgctctgtggacgcctgtaaattattgagaaatgtgaactgtgcagtcttgaagctaaggtgttagaaaatttgatttgtgctgtttagttgttgttgggtttcttttcttttcttttttttcttcctttttctttcttctttttttcttttcccccttaaaacaacagcagcagcatcttggctctttgtcatgtgttgaatggttgggtcttgtgaagtctgaggtctaacagtttattgtcccggaaggattttcttatagcagaaacagattttttttccaattcccagcaccctgaggaccaagaaggatccctctgttgtcattttcagcactcagcgtcactgggatgagccaggctctgtccccacagctggcccttggcctccatggctactgtggtaagtgcagccttgtctaatccagtgctgacgttggccattcctcattgaggagagaaggtcagtgacaaactcacaagcactgcagaggcatacggagagaagggacgctcggccagcacccggtattccagcgctctgaggtaatcagtgcaaggagtctgttattaccatcagacctcagcaggatcatactggaacagaacctgatcatacctgtgacaacacagctgtcagccagggcaaaccaccccactgtcccagagtctgggcagaggctctgacccccacccttcaaactggatgtcggggcctggctgggcccaatggcaagcagatgttgcaaccctagctatctggtcttaacatgcagctcagtaagttgaggcgctaatgtccccccatgccgggggattcctggttccggctcttcaagtaagaagctgattcaacctgcctgtttctgtaggtgtgacagggatgtcaggaaaacagccaggactcatctctatagggctggtgacctgatacttcccataaaggcatccaggagttagctgacccaatagtcagagttgacctcactggcctagcaaaccgtaacttgtctttggcccagccatggtcttgggctgtcttctaattccaaagggttggtaggtaaagatccatcctcttcccctctgccaagagacatcacgtgtgtacacacacacatgcgcgcgcgcgcacacacacacacacacacacacacacacacacacacacacacacgggtgtataggtgagttaaaaggatgtcctcgctgacatcctaattttgtcttaagtttttttggagggagaaaggaaagaggcagggaagatacgtagctctagctttagtcaggcagcctggggggatccccaagcctatgtatggaaccctggtacgaaagcgccctgtgaggagtgggatttcagttttatctgtagaccagatgagaaggagaaaggccccattttgtacatagttgcaacttaaaatttttggcttgcaaaatatttttgtaataaagatttctgggtaac

SEQ ID NO: 3198 - DNA, 2410 bp, Rattus norvegicus
  Genbank Accession No. NM_013026
gcgggctagaggagacagagcctggcgctgaggaaggaatctggcagtcgagagctgactccagccgacggaacctgcagcccttgctccggacagcagcgcgccgggcaggagtccgggatagcgaagcgcagagcaatcagcagagcctgcccggagctccgtgcaaccggcaactccgacccacatagcccgccgagctcccgccgccggtccgggcagcatgagacgtgcggcgctctggctttggctctgcgcgctggcgctgcgcctgcagcctgccctcccgcaaattgtcaccgcaaatgtgcctcctgaagaccaagatggctctggggacgactcagacaacttctctggctcaggcacaggtgctttgccagatatgactttgtcacggcagacaccttccacttggaaggatgtgtggctcctgacagctacacccacagctccagaacccaccagcagggataccgaggccaccctcacctctatcctgccggctggagagaagcctgaggagggagagcccgtggcccacgtggaagcagagcctgacttcactgctcgggacaaggagaaggaggccaccaccaggcctagggagaccacacagctcccagtcacccaacaggcctcaacagcagccagagccaccacggcccaggcatctgtcacgtctcatccccacggggatgtgcaacctggcctccacgagaccttggctcccacagcacccggccaacctgaccatcagcctccaagtgtggaggatggaggcacttctgtcatcaaagaggttgtggaggatgaaactaccaatcagcttcctgcaggagagggctctggagaacaagacttcacctttgaaacatctggggagaacacagctgtggctggcgtcgagcctgaccttcggaatcagtccccagtggatgaaggagccacaggtgcttctcagggccttttggacaggaaggaagtgctgggaggtgtcattgctggaggcctggtgggcctcatctttgctgtgtgcctggtggctttcatgctataccggatgaagaagaaggacgaaggcagttactccttggaggagcccaaacaagccaatggcggtgcctaccagaaacccaccaagcaggaagagttctacgcctgatggggaaatagttctccccccacaacccctgccactcactaggctcccatttgcctcttctgtgaaaaacttcaagccctggcctccctaccgctgtgccgtctcctctgcacccagacccttctgcccgagcggtctcagggtgtgctgggaattccttctcctctgacttctgctagaagcttgggtgcagagggtttcttgcattttgtctttctaccacagccacgcctgttgtccactcttctgacttggcttctccaaatgggaggagactcagctctggacagaaagggaacccaactgctttggacctagatggcctattgtgactggaggatcctgaggacaggagaggggcttcaacagacacgccatagcacttacccatagagaccattagggttggctgtgctgtggtagggaaggagtccagggctccttggaattcacttctcattgtggggaggtctactttagacaacttggttttgcacatgtttcctctaatttttctgttttagagccccagcagaccttacttctggggtaaggcaagtcagttgactggtgtccccacctcgcttccctaatctacattcgggagaccgcatcggggttaaataagacttttcattttcgtttttgtttttaacctagaagaaccaaatccggacaccaaaacgtaggcttagtttgtgtgttgtctctgagtttgtcgctcatgcgtgcaacagggtatggactatctgtttggtgccccatttttggtggcccataagtaggctggctagcccaggatgccatggagtagccacctcttgaccagtcatgcctgtgtgcatagactcagggccatggcctttgtgacattggaagagcctgtgtgagaacttcctcctagattagtctagggatggaggggaggagactgtacagtttgggaggaggggtgacaagggtgtccaagactctcccacctttggtactaactctggtcaccctttctcctggaagttgacaagacacatcttgagtatggctggcactggctcctccatcaagaaccaagttcaccttcagctcctgtggccctgttcccaggctggagtcagaaatgtttcccaaagagtgagagtcttttgcttttggcaaaacgctacttaatccaatgggttctgtacagtagattttgcagatgtaataaactttaatataaaggagtcctatgaaaaaaaaaaaaaa

SEQ ID NO: 3199 - DNA, 664 bp, Rattus norvegicus
  Genbank Accession No. NM_013027
tgctgctagttggtcgggtcctcgctttgtgcggggatgcgacgtgcagcaatggcgctagccgttcgagtcgtgtattgtggagcttgaggctataagcccaagtatctccagctcaaggagaagctagaacatgagttccccggatgcctggacatctgtggcgaggggactccccaggtcaccgggttctttgaagtgacggtagccgggaagttggttcactccaagaagagaggtgatggctacgtggatacagagagcaagttccggaaactggtgactgccatcaaagccgccttggctcagtgccagtgagccctagaggcagggtcctgaaggctcctggccggcctttcttggcagccgcttcatgacaggaaggactgaaatgtctcaaagacctgtggtctttcttcgatgttctgcggccaccaagtcaggccagagatggattctgtgtgtgggtgccttcccagaatctacctgtgcacgcaccccgccctgccctcccgccctcttcctcacctctctctgaattcccccatgtttcctaccttccctcctgctttggtttcccgtctccccctcaagactgcaagaagacgggcagccgtgtcgccaggtgttcctggttgaataaaggttggccaaggcaacctga

SEQ ID NO: 3200 - DNA, 2440 bp, Rattus norvegicus
  Genbank Accession No. NM_013030
agcagtcgagctggagctgagccatagtcaaggactcattgtgggtgcccatcatgatgtcctacagcgagagattggggggaccggctgtctccccacttccagtccgtgggagacacatggtgcatggggcagcctttgcttatgtccccagcccacaagtcctgcacaggattcctgggacaaccacctatgccatctccagtctgagcccggtagccctcacagagcacagctgtccctatggggaggtcctggaatgtcatgacccgctccctgccaagctggcccaggaagaggagcaaaagccagagcccaggctgtcccagaagcttgcccaggttggcacaaagctcctgaaggtgccgttgatgctaggcttcctttacctctttgtctgctccctggacgtgctcagctctgccttccaactggccggagggaaagtggctggggacatcttcaaggacaatgccatcctgtccaacccagtggcagggctggtggtgggaatcctggtgacagttctggtgcagagctccagcacctcgacatccatcattgtcagcatggtctcctctggcttgttggaggtgagctccgccattccgataatcatgggctccaacatcgggacctctgtcaccaacaccattgtggccctgatgcaggcgggggacaggactgacttcaggcgggcttttgcaggggcaacagtgcatgactgctttaactggctgtctgttctggtcctgctgcccctggaggctgccacgggctacctgcaccacgtcaccgggcttgtggttgcctccttcaacatccgtggtggccgtgatgcccctgaccttctcaaggttatcacagagcccttcacaaagcttatcatccagctggacaagtctgtgattaccagcattgccgtgggggatgagtccctgaggaatcacagtctcattcggatttggtgtcaaccagagacaaaagaggcttccacttctatgtccagggtagaggccattggcagccttgcaaacaccaccatggagaaatgcaaccatatcttcgtggatactgggctgcccgacctggccgtggggctcattctgctggcgggctccctggtggtcctgtgcacttgtcttatcctcctcgtcaagatgctcaactctctgctgaagggccaagtggccaatgtcatccagaaggtcatcaacacagacttcccagcccccttcacttgggtcacaggctactttgccatggtggtgggcgccagcatgacgtttgttgtccagagcagttccgtgttcacctcagccatcactccgctcattggcctgggtgtgatcagtattgagcgggcctaccctctcaccctgggctccaacattggtaccaccactacagccatcctggcagcactggccagccccagggagaagctctccagctcctttcagattgccctctgccacttcttcttcaacatctcgggcatcctcctgtggtacccgctgccctgcacacgtctgcccatccgcatggccaaggcactgggcaaacgcactgccaagtaccgctggtttgccgtcctctacctcctcgtgtgcttcctgctcctgccctcactggtgtttggcatttctatggcaggctggcaggctatggtcggtgtgggcacaccctttggggccctgctcgccttcgtggtgcttgttaacgtcctgcagagtcgaagtcccgggcacctccccaagtggctgcagacatgggacttcctaccccgctggatgcactctctgcagcccctggatggccttatcacaagagccaccttgtgctatgccaggcccgagccccgttcaccccaacttccccccagagtcttcctggaggagcttcctcctgccacgccctctccccgcctggcactgcccgctcaccacaatgccacccggctctaggctgcaggtccagactattgcctggaggcgagggacgggatttttacagagcccacagtagaaaggcacagcatgtttgtgagtgtgtgtgcatgcatgtagatgcatgtcacttgaggtacatgattttgtgccacccttgggtacctgtccctactcagggccacagcggggtgggctttttttgcaattaagaagcagtgtgcacaaattacatgctaggtcctgagcctttgtggccatcaggacaggagtatgcgagtgcatggtgtgggtacaggggatgcagatgcatgaggagcccccaaaattttctgggaagagtcggctatgccctctcaccttctcactacccttgtcccaacaggagaggcagaagagcagctggccttctgtatacatgagcctttcctctgccaattctgctaactgtgcatagaaaaagttttaaaagttgcatctgtcctgatcat

SEQ ID NO: 3201 - DNA, 6628 bp, Rattus norvegicus
  Genbank Accession No. NM_013040
agcagctggcctcccaccaccctaaaaataatccactcgccgctgtctgctgacccgggaggaaaacttgtcatcccatggagtgtgtgagctcctcggcttgctccagagagatccccaaccgctttgaggagtcagtgactgagttctgtggacttgtttgaaatttacatcttcagactgtgcgcaggcggttggaaggtagatcaagtgcaccagtagggggactaagttcctgagccaaagtcaaggctaatcaactaagaagaaatgagcctttccttctgtggtaacaacatctcctcctacaacatctaccatggtgttctccaaaacccctgctttgtggacgcactcaacctggtccctcacgtcttcctgctgtttatcacctttccgatcctgttcattggatgggggagccaaagctcaaaagtgcaaattcatcacaacacatggcttcattttcctggacacaacctgagatggattctgacgtttgcactcctgtttgtgcatgtctgcgagatagcagaaggcattgtttcagactcgcaacgggcgtccaggcatctccaccttttcatgccggctgtgatgggatttgtcgccaccaccacatccattgtgtattaccacaacattgaaacatcaaacttccctaaattacttttagctttattcctgtactgggtcatggccttcattacaaagacaataaagttggtcaaatactggcagttggggtggggaatgtcagacctgcgcttctgcatcacgggagtgatggtcatcttgaatggactgctgatggctgtggagatcaatgtcatccgggtccgaagatatgttttcttcatgaatcctcagaaagtgaagcctccagaggacctccaggacctgggcgtgaggttcctccagccgtttgtgaatttgctgtccaaagctacttactggtggatgaacacgcttatcatatcagctcacaggaaacctattgatctgaaggcgatcggaaagttgccgatagcaatgagggcggtgacgaattatgtttgcttgaaggaggcctacgaagagcagaagaaaaaggctgcggatcatccgaatcggactccctccatatggctggccatgtacagggcttttgggagaccgatcctgctgagcagcacgttccgctacttggctgacttgctgggctttgccggccctctttgtatttccggaatcgtccagcgtgtgaatgaaccgaagaataacacgacgagattttcagagacactctcatcaaaggagtttctggaaaatgcccatgtgctggctgtcctgctcttcctggccctcatcctgcaaagaacatttttgcaggcttcgtactatgtgaccatagagaccggcatcaacctgcgtggggctctgctggctatgatctacaacaaaatccttcgactgtctacttctaacctatccatgggcgagatgaccctgggacagatcaacaacttggttgccatagaaaccaatcagctcatgtggttcttgttcctgtgtcccaatctgtgggccatgcccgttcagatcataatgggggtgatcctgctctataatctgcttgggtcaagcgcactggtaggcgcggcggtcatcgtgctcctcgcaccgattcagtacttcatcgccacgaagctggcggaggctcagaagagcactctggattattccaccgagaggctgaagaagacaaacgagatactgaaaggcatcaagctccttaagctgtatgcctgggagcacattttctgcaagagcgtggaagagactagaatgaaggagctctccagcctcaaaaccttcgcgctctacacgtcgctttccatcttcatgaacgcagccattcccatcgcagccgttcttgcaacatttgtgacccatgcctatgccagtggcaacaacctgaaacccgcagaggcctttgcctctctgtctctcttccacatcctcgtcacaccgctcttcctgctgtccacggtggtcagattcgcagtgaaagccatcatcagcgttcagaagctgaatgagtttctcttgagcgatgagattggcgaggacagctggaggactggggaggggacgctgccttttgagtcctgtaagaagcacaccggagtgcaatcaaaaccgataaacaggaagcagcctggaaggtaccacctggacaactacgagcaggcgcggcgtcttcggcctgctgagactgaagatgttgccataaaggtgacgaacggatacttctcatggggcagtggtttagccacattatccaatattgacattcgaattccaacaggtcagctaaccatgattgtgggtcaggtgggttgtggcaaatcgtctctcctccttgccatccttggtgagatgcagaccctggaaggaaaagtttactggaacaatgtaaatgaatctgagccttcttttgaagcaacccgaagcagaagcaggtactctgtggcttatgctgcccagaagccttggctcctcaatgctacggtcgaggaaaacatcacttttggaagttctttcaacagacagaggtacaaggctgtcaccgatgcctgctctctgcagccagacattgatttgttaccctttggagaccaaactgaaattggagagaggggtatcaacctgagtgggggtcagaggcagagaatctgcgtggcccgggcactctaccagaacaccaatattgtcttcttggacgatccattctccgctctggacatccacctgagcgaccacttgatgcaggaagggatcctgaagtttctccaggacgacaagaggacggtcgtccttgtgactcacaaactacagtacctgacgcacgcggactggatcatagccatgaaggatgggagtgtgttaagggaagggactttgaaagacatccagaccaaagacgtggagctctatgaacactggaaaaccctcatgaatcggcaagatcaggaattagaaaaggacatggaagccgaccaaacaacgctggagaggaagactctccgaagagctatgtactcaagggaggccaaagcacagatggaggatgaagatgaagaggaggaggaggaggaagatgaggacgacaacatgtcaactgtaatgaggctcaggacgaagatgccctggaagacctgttggtggtacctcacttcaggagggtttttcctgctcttcctcatgatcttctctaagcttttgaagcactctgtgatcgtggccatcgactactggctagctacgtggacctccgagtacagtataaacgacccagggaaagctgaccagaccttctatgtggctgggttcagcatcctctgtggagcgggcattttcctttgcctcgtcacctccctcactgtagaatggatgggtctcaccgccgccaagaacctccaccacaatctcctcaataagataattctgggcccaataaggttctttgataccacgcccctgggactgatcctcaatcggttttctgctgataccaacatcatcgaccaacatatccctccgaccttggagtcgctgacccgctctaccctgctctgcctgtcggctattgggatgatctcctatgctacacccgtgtttctcatcgctcttgcgcccctgggcgtcgccttttatttcatccagaaatacttccgggttgcctctaaggatctccaggaactcgatgacagcacccagctccccctgctttgtcacttctcagaaacagctgaagggcttaccactatccgggccttcaggcatgaaaccagattcaagcaacgcatgctggagctgacagacacaaacaacattgcctacttatttctctccgcagccaacagatggctggaggtcaggacggactacctgggagcttgcattgttctgacggcctccattgcatccatcagtggctcttccaactctggactagtgggcttgggccttctgtatgccctcacgataaccaattacctgaattgggttgtaaggaacttggccgacctcgaagtccagatgggcgcagtgaagaaagtgaacagtttcttaactatggagtctgagaactatgaaggcaccatggatccttctcaagtcccagagcattggccacaggaaggtgagatcaagattcacgatctatgcgtcagatatgaaaataacctgaagcccgttctgaaacatgtcaaggcttacatcaagcctgggcagaaggtgggcatctgtggtcgcaccggtagtgggaagtcctctctatctctggctttcttcagaatggtcgacatatttgatggaaagatagtcattgatggaatagacatttccaagctgcccttgcacacgctccgctctagactgtccatcattctccaggacccaatcctgttcagcggctctatcagatttaacttggatcctgaatgcaagtgcacagacgacaggctctgggaggctctggaaattgctcagttgaagaatatggtcaaatctctgccaggaggcctagacgccactgtcaccgaaggtggtgagaacttcagcgttggacagagacagctgttctgcctggccagggcctttgttcgaaagagcagcatactcattatggatgaggccacggcctccatcgacatggccacggaaaacattttgcagaaagtagtcatgacagcctttgcggatcgcacggttgtaaccatagctcatcgggttcacaccattctgactgctgacctggtcattgtgatgaagagaggaaacattttggaatacgacaccccggaaagcctcttggcccaggaggatggagtgttcgcctcgttcgttcgtgcggacatgtgacaggattacatcacaacagcacctgtgtctcgatgcctaccgtcgcccaccagagggttcccccaactttgcctcggaagggtggcgccggaaacttcgacagacttctgtatggaaagtagagatttctgtttcctgttttggtctgagggacactccctgtaggttcatcgtgggtgttgtactgtgatcaggccacactggaaaggtagcctatgctaaaacatgccagcgaccttaaggggtaaatctgtcgatgtctgtcaagcactggagctgaaatgaggcgtctgcgctaccacactctcattaggaagactagcactgccctgctgttgatgaagaaaattcattttctaacaaaatactcacgttcatgatccataggagagtcttttctgtgcatttaacattgttgatatttccttttaacttttccccttttaactcatttcctgtcaccacgaagctatcatatttagtacctctataaagccgacccctcacaagagaaagatcatgaaaagagattgaatatttgaaaatattatttgtttccatttgcctccatccaataaggaggaagttcaagttagcttcagtccttcagcaatgggccacctaaactaagctttctagagtttaattctttatcagccaaacaatggctctgaaccctgaaatgctatattatctagggcccaaaagaatatagatgaatggccttatctgtcacacacacacacacacacacacacacacacacacacacacacacacacatatacatacacatcttcatgccatatcttggctgtatgctaatcttggcatgtgcacattcctcgaaggtaccagatatcccctaccctacatctctgtgggaagatagaaatagttctcactctgaatttacacaggtagcaagtgtttattttcacttgggcaaatttcagtggcagacattgatgtcacacatgtggccattggtcctgttctaatttatagagtgtaccagaagtctatatgatattagtgtcacatttcatttaavtgcccattaataaagccaaactgactgaagttcacttccctgttatccagcttccacagtttctgtaacctttaaccatcagatataagcagctgctcaattccatatgagggtctccacagaaaatagatgtccatcgcccaccgttcctgtagtcatatggcgttgtttattctgtgtcaagacttatagttcttgtgcatcgagatatttcaaggtgcctttatggatatagaacgtaatgtaagaaaaacgttcatagagatatacagaaacggcccaggttacttagcctaaatagtcaccttttcttccatatcaaaaacttcattagaaaaaaataatagtattatttgcagaaagctagtaggtcacagctattagcaatgagttcaaccgcaaaagtacttcataagagaatcgactaatctactaaaatattgctggtgctgcagaaggttctgctggggctgatacccatgacgtttgttgtcagtcagtgtctccttctctcctagaaatggcattcatctacagaagtagctccctgctgctgtagcccactacgccatcctgtgcaaaagtgactttcgtttcctcgaaacttttacttacttgatttgcaaaaaacaaacaaaaaacaaacaaacaaacaaaaaaaaaaaa

SEQ ID NO: 3202 - DNA, 1666 bp, Rattus norvegicus
  Genbank Accession No. NM_013043
cggcagccgagtcggattgagctgctgcagacgccaggccactccagccagcactgccgttttcacgccccggctgcagacagctaggaggctttatctagtttgaaccaggctgctggagctcgctccttccctctctttttttccacgaggctgtttttttatttggctgcaattgcatgaaatcccaatggtgtagaccagtggcgatggatctaggagtttaccaactgagacatttttcaatttctttcttgtcgtctttgctgggaactgaaaacgcttccgtgagacttgacaatagctctggtgcaagtgtggtagctatcgacaacaaaatagagcaagctatggatctggtgaaaagccatttgatgtatgcagttagagaggaagtggaggttctgaaggagcagatcaaagaactaatagagaaaaactcccaactggagcaggagaacaatctgttgaagacactggccagtccggagcagctcgcccagtttcaggcccagctgcagactggctcccctccggctaccacgcagccacaggggaccacacagccccctgcacagccagcgtcccagggctcaggatcaaccgcatagcctgctatgccccaacagaactggctgctgctgtctgaactgaacagaccgaagagatgtgctagtgagaagccgcctccagtcacccatttcattgctgtctgcgaaagagacgtgagactcacacatgctgttctcgctttctccccagtattaagcactcatatgcttttggcttgaagaaatatactagttgagtgaattaaaggttaaacagagagtgagcatggatgtaccctgtgcaacgtggcagatgtctgaggaatggtttgattgacgctgaggaggagctctgtgccttttcaaccctccccagccgcccactctactcccaagctctggggctcgcctgcatggggctcagaaggtgggctgctcctggattttgtgttctcctctccttcccttcaaagaatttgagaggccagaaacgagactgcaaagggggggatgcagtccttttacaaaaccgacaactgtcaccaaagcttataaaacaggacagtactgtccctcttttctgaaacatcagaagacacaaaactgttagtgacacaacggtgacaggtagctgggacctaggctatcttattatgaaggttgttttgcttgttgtatatttgtgtatgtagtgtaacgaatttgtacaatagaggaccgtaactactgttaggttgtacagattgaagtttagatgttccattggctgtctgaaaaggtgtggattgtccttcctagagagatctacttaaaaactgcttcgtgacaaaaaccacacctgaagaaattttaagaatttggcacagttagtcactttgtgtcacccggaatctagctgctgagtcttgcaaagtaaaccccctgttgactgatgtcagttgagctagtgaatgaatagatggagaaacgtcagtcagttgctgaggaagtggatttcccagtaggggtttctgcagctcacctgtatagtcctgcgcatgttccccacacagaacccactgtatttacctgttctacttgtcacctttcaataaagcatatcaaatgttgatacc

SEQ ID NO: 3203 - DNA, 2182 bp, Rattus norvegicus
  Genbank Accession No. NM_013048
gcggcgttattcccatgacccgccgggcagcttccgggaaaccaaagtctttgggttccggggggggcgggcatggcagagatgcggccggggccagtggttggaaaacagctcaacgagcagcccgaccactcgcccctggtccagccgggcctggccgaactgaggcgccgggcgcaggaggagggcgtcccagagaccccgcagccgctcacagacgctttcttgttgcgattcctgcgtgcccgggatttcgacctggacctggcctggcgcttaatgaaaaactattacaaatggcgagcagaatgtccagaactaagtgcagatctacaccctagaagtatccttggacttctgaaggctggctaccatggagttctgaggtccagggatccgactggcagtagagttctcatttaccgaatttcctattgggacccaaaagtttttacagcctatgatgtatttcgtgtaagtctgatcacatcagagctcattgtacaggaggtggaaactcaacggaatggagtcaaggctatatttgacctggaaggctggcagatttctcatgcttttcaaattaccccatctgtagccaagaagattgctgctgtagttacagattcctttccattgaaagttcgtgggatccatttgataaatgagccggtcattttccatgctgtcttttccatgattaaaccatttctgactgaaaagattaagggtcggattcatctgcatgggaacaattataaatcaagcctacttcagcacttcccagacattcttcctctggaatatggtggtaacgagtcctccatggaggatatttgtcaggagtggacaaattttataatgaagtctgaagattatctcagcagcatttctgagaccatccaatgagaagttgtttcctgtgaatgacttcatctaaaattcaaggatgggattctatctggttactaaactcaagaccaaaccttctaaacgaattgatccttatctgatctttaaacacgcaacatggatatttggaggatgttttaatttcaacaatgctctgttccttttaaattaattaaatgttaggaaagaaggatatttctggttttcccttgaagagcaaacatagcttcatctaaagtagttgttccagtgtttctttgcatggttcaggaaattttatattaaacaaaactttatgatcccattgtttaatattagattgatggttatctactggaaagaaatactgtacgcatcaactgatggtgaaacaatattaatgctcagctgagattggtagataaccataaatcaggttgcagtctgaatacagattaattagttcatctcaggtaaatccgactttagcatatgcacaatagaagccttcaatgtcagtctacacactataatattgcaatcaatgaaatcactatggttgataaaggtgattcagaacttaagaaaaatttctgggcacagtagatggtttctcatactgtcttgtattttcaaataagtaaagaatataattatggcttctggttatagacagggaagtagatgtatatgttttttacatagacttgaaaatttaagagaactacataaatgaaaggaggtgtttacattttaaaccatcagcagtgatacctagtatttttcagattattcataaataatttgattttattctgatataattgactattacctcagaatattctgtttagtttaaacagtcggcagctgggatgtgcagtctctaccatagtgcagttcatttctaagactttcattcattgagaaaggtgtgatctgatcctgtattcagcccagccttcaatttggcacataggtttatacttgatgtttctaattaattttattttaaactggaactaatacaaggcaaagaacttaatgaatttatgttcaaatagttagacttctacattaatttcataagagtatctttgtacgaggatatttttcattgtacaagggtgtttttctttataagaaaataagtctaatcagataagctgatactcatgattctctgtacatatacttctgacaaaactgaaaggtgcagatagatgttctttagagaactgtttaattttgatttagcaactagacgttaactttactatttaattttact

SEQ ID NO: 3204 - DNA, 1017 bp, Rattus norvegicus
  Genbank Accession No. NM_013049
gaacacagacaaggatgtatgtgtgggttcagcagcccacagcatttctgctcctgggactctcacttggagttacagtgaagctcaactgtgttaaagatacctaccccagtggtcacaagtgctgtcgtgagtgccagccaggccatggtatggtgagccgctgtgatcacaccagggacactgtatgtcatccatgtgagcctggcttctacaatgaggctgtcaattacgacacctgcaagcagtgtacacagtgcaaccaccgaagtggaagtgaactcaagcagaactgcacacctactgaggatactgtctgccagtgtagaccaggcacccaaccccggcaagacagcagccacaagcttggagttgactgtgttccctgcccccctggccacttttctccaggcagcaaccaagcctgcaagccctggaccaattgtaccttatctggaaagcagatccgccacccagccagtaacagcttggacacagtctgtgaagacagaagcctcctggccacactgctctgggagacccagcgcactacattcaggccaaccactgtcccgtccaccacagtctggcccaggacttctcagttgccctctacacccaccttggtggctcctgagggccctgcatttgctgttatcctaggcctaggcctgggcttgctggctcccttgactgtcctgctagccttgtacctgctccgaaaggcttggagatcgcccaacactcccaaaccttgttggggaaacagcttcaggacccctatccaggaggagcagaccgacacacactttactctagccaagatctgagcaataccacaggagtggattttatggggcacagacagcccatatcctgatgcctgcctgccagggccctccacaccgttctaggcgctgggctggctgtgcactctcccatgtatgctgtgcatactacctgcctggtggcactcctaataaacatgctcgcagctgtgagtctgtcactggccct

SEQ ID NO: 3205 - DNA, 1689 bp, Rattus norvegicus
  Genbank Accession No. NM_013052
tgcagccagctagcgagaaggcgcgagcggcggcgcagccagcagcctcccgccagccggcgagccagtgcgcgtgcgcggcggcggcctcggcggcgaccgggaagcggacgggcgggcgaggcgagcgaggcaggcggtgcgggcgtgcgaggcgaggccgatcgcgagcgacatgggggaccgagagcagctgctgcagcgggcgcgactggcggagcaggcggagcgctacgacgacatggcctccgccatgaaggcggtgacagagctgaatgaacctctatctaatgaagatagaaatctcctctctgtggcctacaagaatgtagttggtgccaggcgatcttcttggagggttattagtagcattgagcagaaaaccatggcagatgggaatgagaagaagctggagaaagtcaaagcctatcgggagaagattgagaaggagctggagacagtttgcaatgatgtcttggctctgctcgacaagttccttatcaagaactgcaatgattttcagtacgagagcaaggtgttctacctgaaaatgaagggcgattactaccgctacctggcagaggtggcttctggggagaagaaaaacagtgtggttgaagcttctgaggcagcgtataaggaagccttcgaaatcagcaaagagcacatgcagccaacacaccccatccggcttggcctggccctcaatttttctgtgttctactatgagatccagaatgcaccagagcaggcctgcctcttagccaaacaagccttcgatgatgctatagctgagctggacacattaaacgaggattcctataaggactccactctcatcatgcagttgctgcgagacaacctcaccctctggacgagcgaccagcaggatgaagaagccggagaaggcaactgaagacccatcaggtccctggcccttcctttacccaccacccccattatcactgattcttccttgccacaatcactatatctagtgctaaacctatctgtattggcagcacagctattcagatctgccctcctgtcccttggaagcagtttcagataaaccttcatgggcatttgctggactgatggttgctttgagccacagagcgctccctttttgaattgtgcagagaagtgtgttctgaacgaggcattttattatgtctgttgatctgtagcaaatccatgtgatggtaattgagtgtagaaaggagaattagccaacacaggctatggctgctatttaaaacaagctgatagtgtgttgttaagcagtacatctcgtgcatgcaaaaatgaatttgaccctctcaccccttctttcagctaatggaaactgacacacgacaacttgttccttcaccatcagctttataaactgtttctcgtgagctttcaggcccctgctgtgcctctttaaattatgatgtgcgcacaccttcttttcaatgcaatgcatcagaggtttttgatatgtgtaacttttttttttggttgtgattaagaatcatggatttattttttgtaactctttggctattgttcttgtgtaccctgacagcatcatgtgtgtcaacctgtgtcaatcatgatgggtggttatgaaatgccagattgctaaaataaatgttttggacttaaaaagagtaaataaatgctgctttggggatattaaaa

SEQ ID NO: 3206 - DNA, 2099 bp, Rattus norvegicus
  Genbank Accession No. NM_013053
agatcaaagtggtgggactcgcgtcgcggccgcggagactagaaggaggactccggatccggctcggcgctcgccctcgctcgccatggagaagaccgagctgatccagaaggccaagctggccgagcaggccgagcgctacgacgacatggccacctgcatgaaagccgtgacggagcagggcgccgagctgtccaacgaggagcgcaacctgctatctgtggcctacaagaacgtggtcgggggccgcaggtccgcctggagggtcatctcgagcattgagcagaagaccgatacctcggacaagaagttgcagctgatcaaggactatcgggagaaagtggagtctgagctgaggtccatctgcaccacggtcctggaattgttggataagtatttaatagccaatgcaactaatccagagagtaaggtcttctatctgaaaatgaagggagattatttccggtatcttgctgaagtcgcttgtggtgatgatcgaaaacaaacgatagaaaattcccaaggagcctaccaagaggcatttgatataagcaagaaagagatgcaacctacacatccgatccgcctggggctggctcttaacttttctgtattttactatgagatccttaataatcccgagcttgcctgcacactggctaaaacggcttttgatgaagccatcgccgagcttgatacactgaatgaagactcctacaaagacagcaccctcatcatgcagttgcttagagacaacttaacattatggacatcagacagtgcaggagaagaatgtgatgcagctgagggggctgagaactaaaggcatccaggacaccaacctccttcccctcaagaaaacctttttacatctccattccttattccacttggatttcctctagcaaggaagcccattcatgtgtatggggtcaactgtttatagtcttttcacactgcagctttgggaaaactccatcccttggtttgtgttgtctccaccttcctggtgtgcagttactgctgtagaaaagtatcaatagcttcatttcatataaacacgagtaacttccagacacttgtgtagaggactgacagcacatttggtatttaagtaatctgaaccagttctgcaagtgactgtgttttgtattactgtgaagatatggaaatggtagtgcattacaatttaaagtgattgtaataataacgtcttgatttctacattccttttctgaactttcttgggggtttcctttcagaagcaacttttccatgctcttactacaaattcctttttagtaggaatccagaagtgttagattgaatgggaaagcgcttaatgcatccgggcttgggggtcacagattgaaatgtctcctgtgtcacattctggaggttacatctgtctgtgacaacagggcgtttccttatgcattcttcatttgctgctgtttaagttgacaacttccttcccaataaaaattcacttacacctcctgccttcgtagctctggtattcactttaccttgtgacagaagtagcatgttgctgccagaatacaagcattgctttgggcaaattaaaatgcatgtcctttcttaatacactaggaaggagaaataaagtacacaagtccaagtctaaactttagtacttttccatgcagatttgtgcacatgtgagggggtatccagtttgtccagtgattgttctttagagagttggaccactatattgtgtgtttgctaatcattgactgtagtcccaaaaaagccttgtgaaaatgttatgccctatgtaacagcagagtaacataaaataaaactacattttataaaaccatttattatggctttgtaacagttgcatacccatattttaagaacagacaaatttactactttttgaagtttgttgctatttctctttatgtaacatataatggtgatatccatatttctgcattgtggtacacttgtctagggtgcctggcactgtaaaattggactatatttctccagatagcctcatgggttgtcttcctcagatgtaatgataactggttaggtgtcatgtgtaataaagtgaacatttg

SEQ ID NO: 3207 - DNA, 3754 bp, Rattus norvegicus
  Genbank Accession No. NM_013055
ttggaaggagcgggagttcaagtcgagtgggaacggggcttagagtagtgggtggggggccaaaagctggggctgacacccgtgcacctgagctccactcgagcatcgccggtgacagctctccaggtccagtggagggcaacggggggaggaggggaggaggaggaggaggcgggagcagcatccggagccgagctgcagcagcgccgccttttgtgctgcggccgcggagcccccgagggccttggatcccctggaactggagttataggggttgtgagcatcatgtggatgctgggaatggaaccccagtcatctcgaagaacacccaggctggcctgaaactcactgtgaagccagagatgaccttggacttctgagcctctcacctccattcctgagtgctgggactgctgggcccgctactcagcacacctggctccagaggccatggcctgcctccatgaaacccgaacaccctccccttcctttggaggctttgtgtctactctaagtgaggcctccatgcgaaagctggatccagacacttcagactgcacccctgagaaggacctgacacctacccaatgtgtacttcgagatgttgtgcctctcggtgggcagggtggaggagggcccagcccctccccaggtggagagcctcctccagagccttttgccaatagtgtcctgcagctacatgagcaggatacaggtgggccagggggagccaccgggtcacctgagagtcgagcatctagggttcgagctgatgaggtacgtctgcagtgccagagtggcagtggcttccttgaaggtctttttggctgcctgcgccctgtctggacaatgattggcaaagcctactccacagagcacaagcaacagcaggaagacctttgggaagtcccctttgaggaaatcctggacctgcagtgggtaggctcaggggctcagggtgccgttttcctgggacgctttcatggggaggaggtagctgtgaagaaggttcgagacctcaaggagaccgacatcaagcatcttcgaaaactgaagcaccccaacatcatcactttcaagggtgtttgcacacaggccccgtgctactgcatcctcatggagttctgtgcccaaggacagctgtatgaggtgctcagggcgggccgccccgttaccccctccttgctggttgactggtccatgggcatcgctggaggcatgaattacctacacctgcacaaaatcatccacagagacctgaagtcacccaacatgctaatcacatacgacgatgtggtgaagatctcagactttggcacttccaaggagctgagtgacaagagcaccaagatgtcctttgcagggacagtagcctggatggctcctgaagtgatcagaaatgaacctgtgtctgagaaggttgacatctggtcctttggggtggtgctttgggaattactgactggagagattccctacaaagatgtagactcctcagccatcatctggggtgtgggaagcaacagtcttcacctgcctgtaccctctagctgcccagacggctttaaaattctgcttcgccagtgctggaacagaaaacctcggaaccgcccatcattccgacagatcttgctgcacctggacatcgcctcggctgatgtgctctctacaccccaggagacttactttaaatcccaggcagagtggcgggaagaagtaaaactgcactttgaaaagattaagtcagaagggacctgtctgcaccgcctagaagaggaactggtgatgcggagaagggaggagctcagacatgccctggacatcagggagcactatgagcgcaagttggagagagctaacaacttgtacatggaactgaatgccctcatgttgcaactagaactcaaagagagggaattgctcaggcgagagcaagctttagaaaggaggtgtcctggtctactgaagtcacacacgtcccgaagcctcctacatggaaacacgatggagaagctcatcaagaaaaggaatgtgccacagaaactgtcaccccatagcaaaaggccagatattctcaagacagagtctttgctacctaaactagatgcagccctaagtggggtggggcttcctggttgtcctaaggcccccccttcacctgggaggagtcgtcgtggcaagacccgtcaccgaaaggccagcgccaagggcagctgtggagacctgcctgggcttcgtgcagctttgccaccccatgagcctggaggactaggaagcccaggaggcctaggagtgggccctacagcttgggatgcctccccccctgctctccgtggactccaccatgaccttctacttcggaagatgtcttcatcatccccagacctgttatcagcagcactgggagcccgaggccgaggggcaacagggggagctcgggatcctggctcaccacctccaccccagggtgatactcctccaagtgagggatcagctcctggttccaccagcccagattcacctgggggagctaaaggggaaccacctccaccagtagggcctggagaaggtgtggggctgctgggaactggaagggaagggactacaggccggggaggaagccgggctgggtaccagcacttgacccccgctgcgctgctgtacagggctgctgtgactcgtagtcagaaacgtggtatctcatctgaagaggaagaaggagaggtcgacagtgaagtagagctacccccaagtcaaaggtggcctcagggcccgaacatgcgtcagtcactatctacgttcagctcagagaacccatcagatgtggaggaaggtacagctagtgagccttccccaagtggcacaccggaagttggcagcaccaacactgatgagcgaccagatgaacggtctgatgacatgtgctcacagggttcagaaatcccactggacctacctacttcagaggtggtccctgaacgtgaaaccagctccttgcccatgcaacaccaggatgaccagggccccaatcctgaggactcagactgtgacagcactgaattggacaactccaacagcattgatgccttgccgcccccagcctcccttcctccatgaaagacactcttattccttgtacatagagaaatatttatataaataatatatatgcgccacataatcaacagatagacggggctttcttagccgtaagtcaggcttcagagtgaacgacgcccctgaccaattaagttctagggacactggcagctgtggaaatgactccaagtactaccctagagctgtaaggaaaggacaccggtcccttcttgcttcaccccattccttatgttgaacaagcaagtaggcatagaaaagccaggcttgtctctacactgtctgtccctaaacatggggggcaggaagaggattcacttaaaactgcacttttattttccgtttactgtttacacattttgcacttgggaggagggaaactaaggctgggtcctaggtcctccctctgaggtttctcaggtggcaatgtaactcatttctttgttcctgtttctctgccaaagccctggctttgggcccagaggcaagttagaagattaatagcatgtgatggctcaggctgaagaactgggtgctggttaagtccccgctgttatctggtgcctggtaggggtggggactgtcatattgtaacccctgtgaacaaccctgaaatataaccactccatgcaggccc

SEQ ID NO: 3208 - DNA, 2415 bp, Rattus norvegicus
  Genbank Accession No. NM_013059
cacggcgctccttagggccaccgctcggcgcgccgggacagaccctccccactcctgcctgcaggatcggaacgtcaattaacggctgacactgccccccacctcttcccacccatctgggctccagcgaggaacggatctcggggtacaccatgatcttgccatttttagtactggccatcggaccctgccttaccaactcatttgtgccagagaaagagaaagaccccagttactggcgacagcaagcccaagagaccttgaaaaatgccctgaaactccaaaaactcaacaccaacgtggccaagaacatcatcatgttcctgggagatggtatgggcgtctccacagtgacagctgcccgcatccttaagggccagctacaccacaacacgggcgaggagacacggctggagatggacaagttcccctttgtggctctctccaagacgtacaacaccaacgctcaggtccccgacagcgcgggcactgccactgcctacttgtgtggcgtgaaggccaacgagggcaccgtgggagtgagcgcggccactgagcgcacgcgatgcaacaccactcaggggaacgaggtcacgtccatcctgcgctgggccaaggatgctgggaagtccgtgggcatcgtgaccaccactcgggtgaaccacgccactcccagtgcagcctatgcgcactcggccgatcgggactggtactcggacaatgagatgcgcccagaggctctgagccagggctgcaaggacatcgcctatcagctaatgcacaacatcaaggacatcgatgtgatcatgggtggtggccggaagtacatgtaccccaagaacagaactgatgtggaatatgaactggatgagaaggccaggggcaccagactggatggcctggacctcatcagcatttggaagagcttcaaacctagacacaagcactcccactatgtctggaaccgcactgaactgctggcccttgacccctccagggtggactacctcttaggtctctttgagcccggggacatgcagtatgagttgaatcggaacaacctgactgacccttccctctcggagatggtggaggtggccctccggatcctgacaaagaatcccaaaggcttcttcttgctagtggaaggaggcaggattgaccacgggcaccatgaaggcaaggccaagcaggcgctgcatgaggccgtggagatggatgaggccatcggaaaggcgggcaccatgacttcccagaaagacacgttgactgtggttactgctgatcactcccacgttttcacgtttggtggctacacccccaggggcaactccatttttggtctggctcccatggtgagcgacacggacaagaagcccttcacagccatcctgtatggcaacgggcctggttacaaggtggtggacggtgaacgggagaacgtctccatggtggattatgctcacaacaactaccaggcccagtccgctgtccccctgcggcacgagacccacggtggggaagatgtggcggtctttgccaagggccctatggctcacctgcttcacggcgtccatgagcagaactacatcccccacgtcatggcgtatgcctcctgcattggagccaaccttgaccactgtgcctgggccagctctgcgagcagcccctccccaggggccctgctgcttccactggctctgttccccctacgcaccctgttctgagggcccaggtcccacaagagcccacaatggacagccggctcccctccctttgtggcctgccacctggccgcccacactcaacggggaggcccaggcaacctcgagcaggaacagaagtttgctacctgcctcacttccgcccggaaccctccgtgggtcggattcctggctctgccgttgtttctctattcactgccttttggccagcagggtgggtttctctcttgggccggcaggacacagactgcgcagattcccaaagcaccttatttttctaccaaatatactctccagaccctgcaaccatcatggaacattccagatctgaccttctctcccctaccccttctctctggaacactgggtcccatagtcacagccagtccctcaacccaaccctccttggagggaagaccaggtctgctcagggtgagactcccaggaagccacctccggggttggctgtctacccagggtggccaggctgggaagaacaacccagccggacaggacgcacacactccccacccagctccagagactcgccaacccttcactgaagcgactcccctgtttggaatagcaaaaaaaaaaagaaagaaaaaaaagaaaaaaattttaatttctctttttggtgttggttaaaagggaacacaagacatttaaataaaatgttccaaataaaaaa

SEQ ID NO: 3209 - DNA, 5892 bp, Rattus norvegicus
  Genbank Accession No. NM_013062
cgcccgggcaggtgtctccttagatagcccggaacgctaccccgcacgaatgatatcccacattgtgtcctgcatccgggataaccttcctgacacgtgtccgccgacactgctgcaaccgcggctggagccacggcgccggtgccctgtgctttcccaggttatgcactgcaggagcgcttaccgcttctgtgacttctttgcgggccagggaccgagaaagcatctgtgccagcgcgaggtgcaggatggagagcagggcgctgctagctgtcgctctgtggttctgcgtggagacccgagccgcctctgtgggtttgcctggcgattccctccatccacccaagctcagcacacaaaaagacatacttacaattttggcaaatacaacccttcagattacttgcaggggacagagggacctggattggctttggcccaacactccgcgtgactctgaggaaagggtgttggtgactgagtgtggcgacagtatcttctgcaagacactcacagttcccagagtggttggaaatgatactggagcctacaagtgcttctatcgggacaccgatgtctcctccatcgtttatgtctatgttcaagatcacaggtcaccattcatcgcctctgtcagtgacgagcatggcatcgtgtacatcactgagaacaagaacaaaactgtggtgatcccatgccgagggtcgatttcaaacctcaacgtgtcactttgtgctaggtatccagaaaagagatttgttccggatggaaacagaatttcctgggacagcgagaaaggctttactatccccagttacatgatcagctatgccggcatggtcttctgtgaggcaaagattaatgatgaaacgtatcagtctatcatgtacatagttctggttgtaggatataggatttatgatgtggtcctgagcccccctcatgaaattgagctatctgccggagaaaagcttgtcttaaattgtacagcaagaacagagctcaacgtggggcttgatttcagctggcaattcccgtcctcaaagcatcagcataagaagattgtaaaccgggatgtgaaatcccttcctgggactgtggcaaagatgtttttgagcaccttgaccatagacagtgtgaccaagagtgaccaaggagaatacacctgcacagcgtacagtggactgatgaccaagaaaaataaaacatttgtccgagttcatacaaaaccttttattgcttttggtagcgggatgaaatctttggtggaagccactgtgggcagccaagtccgaatccctgtgaagtatctcagttacccagctcctgatatcaaatggtacagaaatggacgacccattgagtccaattacacaatgatcgttggtgatgaactcaccatcatggaagtgagtgaaagagatgcgggaaactacacggtcatcctcaccaatcccatttcaatggagaaacagagccacatggtctctctggttgtgaatgttccaccccagatcggtgagaaagccttgatctctcctatggattcctaccagtatggcaccatgcagacgctgacatgcacagtctatgccaaccctcccctgcaccacatccaatggtactggcagctagaagaagcatgctcctacaggcccagccaaacaaacccatatacttgtaaagaatggagacacgtgaaggatttccaggggggaaataagatcgaagtcaccaaaaaccaatatgccctaattgaaggaaaaaacaaaactgtaagtactctggtcatccaggctgcctacgtgtccgcattatacaaatgtgaagccatcaacaaagcaggacgaggagagagggtcatctccttccatgtgatcaggggtcctgaaattactgtccagcctgctacccagccaaccgagcgggagagtatgtctttattgtgcactgcagatagaaacacgtttgagaacctcacgtggtacaagcttggctcacaggcaacatcggtccacatgggcgaatcactcacaccagtttgcaagaacttggacgctctttggaaactgaatggcaccgtgttttctaacagcacaaacgacatcttgattgtggcattccagaatgcctccctgcaggaccaaggcaactatgtctgctctgctcaagacaagaagaccaagaaaagacattgcctagtcaagcagctcgtcatcctagagcgcatggcacccatgatcactggaaatctggagaatcagacaacaaccattggtgagaccatcgaagttgtttgtccaacatctggaaaccctacccccctcattacatggttcaaagacaatgagacccttgtagaagattcaggcattgtactaaaagacgggaaccggaacctaactatccgaagggtgaggaaggaagacgggggcctctacacctgccaggcctgcaatgtccttggctgtgcaagagcagagacactcttcataatagaaggcgtccaggaaaagaccaacttggaagtcattatcctcgtcggcactgcagtgattgccatgttcttctggctccttcttgtcattctcgtacggaccgttaagcgggccaatgaaggggaactgaagacaggctacttgtccattgtcatggatccagatgaactgcccttggatgagcgctgtgaacgcttgccttatgatgccagcaagtgggagttccccagggaccggctgaaactaggaaaacctcttggccgtggtgcctttggccaagtgattgaggcagatgcctttggaatcgacaagacagcgacttgcaaaacagtggctgtcaagatgttgaaagagggagcaacacacagcgagcaccgagccctcatgtccgaactcaagatcctcatccacattggccaccatctcaatgtggtgaacctgctgggtgcctgcacgaagcccggagggcctctcatggtgattgtagaattctgcaagtttggaaacctatcaacttacttacggggcaagagaaatgaattcgtgccctataagagcaaaggggcacgcttccgctctgggaaagactatgttggggagctctccgtagacctgaagcggcgcttggacagcatcaccagcagtcagagctctgccagctcaggttttgtggaggagaaatccctcagtgacgtagaggaagaagaagcttctgaagaactgtacaaggacttcctgaccttggagcatctcatctgttacagcttccaagtggctaagggcatggagttcttggcatcaaggaagtgtatccacagggacctggcagcacgaaacattctcctatcggagaagaacgtggttaaaatctgtgactttggcttggcccgggacatttataaagacccagattacgtcagaaaaggagatccccgactccctttgaagtggatggctccggaaacaatttttgacagaatatacacaattcagagtggtgtgtggtcttttggtgttttgctctgggaaatattttccttaggtgcttccccatatcctggggtcaagattgatgaaaaattttgtaggagattgaaagaaggaacgagaatgcgggctcctgactacaccaccccagaaatgtaccaaaccatgctggattgctggcatgaggaccccaaccagagacccgcgttttcagagttggtggagcacttgggaaatctcctgcaagcaaatgctcagcaggatggcaaagactatattgttcttccaatgtcagagacactgagcatggaagaggattctggactctccctgcctacctcacctgtttcctgtatggaggaagaggaagtgtgcgaccccaaattccattatgacaacacagcaggaatcagtcattatctgcagaacagcaagcgaaaaagccggccagtgagtgtaaaaacatttgaagatatccctttggaggaaccagaagtaaaagtgattccagatgacagccagacagacagtgggatggtccttgcctcagaagagctgaaaactctggaagacaggaacaaattatctccatcttttggtgggatgatgcccagtaaaagcagggagtctgtggcctcggaaggctccaaccagaccagcggctaccagtctgggtatcactcagacgacacagataccaccgtgtactccagcgacgaggcaggacttttaaagctggtggatgttgcagggcacgttgactctgggaccacactgcgctcatctcctgtttaaaaggaagtggccctgtcccgtccccgcccccaactcctggaaataactcgagaggtgctgcttagattttcaagtgttgttctttccaccactcggaagtagccgcatttgattttcatttcagaagaaggacctcagacgcaagaagcttgtcctcaggcatttccagaaaaatgcccatgaccaagaatgtgttgaatatactctcttttccattggtttaaaaatcctatatattgtgccctgctgcgggtctcactaccagttaaaacataagacgttcagacacgcggctctatcctccaagaagtacccatacccaggcaatggagccctctgtgaaactggataaaatgggcgatgttagtgctttgtgtgttgggatgggtgacatgtcccagggctgactctacctaaaaggctttgtggaggatgtgggctatgagccaagtgttaaatgtgagatgtggactggtaagaaggaaggagcaagctcgctcagagagcggttggagcctgcaaatgcattgtgctggctgtggtggaagtgagcatgttgcctgtcacgaaaccccaaggcggctgtcggggtttggttttggaaggttgcttgctctcacggttgggctactgccaattccctgtgctgtttcctaccctaatcaaattccgtccggactcttacgtgtctcctggcctagccccaggaaggaaatgacgcagcttgctcctcatctcccaggctgtgccttaactcagaatactaaaagagagggactttggccgaggctccgctccttgtcatgctgaagaactgtgagaacacaacagaaactcagggtttctgctgggtggatacccacttgtctgccctggtggcagtgtctgagggttttgtcaagtggcgacggtaaaggctcagacaggatgtatccctttgttcttcctctaactccacttctgtcttgccacacacccccccctccccagtgctcagtattttagctttgtggccacgtgatggcagaaggtcttaattggttggttttgctctccagataaaatcactagtcagatttcgaaattactttatagccaaggtctgataacatctactgtatcgtttagaatttaacatataaagctgtgtctactggtttttttttttgcccttgggcatatgtttttcaaaagagaaactacttttcatttggtaccatagcgtgacgagcaggggccaatgactgtaaaacatgctgtggcacatatatttatagtctgttatgtggaacaaatgtaatatattgaaactttatattatatataaggaactttgtactatccgcatttcgtatcagtattatgtagcacgacagagactgtgaggtctgagcagctggtggctcaggacgttgagaaactcgaaggaatcctttcgtgaggatgcgcagctatccctacccatctctctcacctcaaacggaggagaaaggggaatcagagataatgtgagtgtgtccttgttctctgttcttaggaggaatgttcttaccaactgttcatacgctttataaaccaataaatgtattccgagtaaaaaaaaaaaaaaaaa

SEQ ID NO: 3210 - DNA, 2706 bp, Rattus norvegicus
  Genbank Accession No. NM_013065
cgcccttgttcccgctgcggggaggagagtctggtgcctacaagatggcggacggggagctgaacgtggacagcctcatcacccgcctgctggaggtacgaggatgtcgtccgggaaaaattgtgcagatgactgaagcagaagtccgaggactgtgtatcaagtctcgtgaaatctttcttagccagcctattcttttggaattggaagcgccactgaagatttgtggagatattcatggacagtatacagacttactgagattatttgaatatggaggttttccaccagaagccaactatcttttcttaggagattatgtggacagaggaaagcagtctttggaaaccatctgtttgctattggcttacaaaatcaaatacccagagaacttctttcttctacgaggaaaccatgagtgtgctagcatcaaccgcatttatggattctatgatgagtgcaaacgaagatttaatattaaattgtggaagacattcactgattgttttaattgtctgcctatagctgctattgttgatgagaaaatcttctgctgtcatggaggactgtcaccagacctacagtctatggaacagattcggagaattatgagacccactgacgtacctgatacaggtttgctttgtgatttactgtggtccgacccagataaggatgtacaaggctggggagaaaatgatcgtggtgtttcttttacttttggagctgatgtagtcagtaaatttctgaatcgtcatgatttggacttgatttgtcgagcccatcaggtggtagaagatggatatgaattttttgctaaacgacaattggtaactttattttctgccccaaattactgcggcgagtttgacaatgctggtggtatgatgagtgtggatgaaactttgatgtgttcattccagatattgaaaccatctgaaaagaaagctaagtaccagtatggtgggctgaattctggacgtcctgtcactccgcctcgaacagctaatccaccgaagaaaaggtgaagacaggaattccggaaagagaaaccatcagatttgttaaggacatacttcataatatataagtgtgcactgtaaaaccatccagccattcgacaccctttatgatgtcacacctttaacttaaggagacgggtaaaggatcttaaatttttttctaatagaaagatgtgctacactgtattgtaataagtatactctgttataatattcaacaaagttaaatccaaattcaaaagtatccattaaagttctatcttctcatatcacagtttttaaagttgaaagcatcccagttaaactagctgcgttagttacccagatgagagcatgaagatccatctgtgtaatgtggctttagtgttgcttggttgtttctttattttgggcttgttttgttttgtttgtttttgctagaataatggcatctacttttcctatttttccctaaccattttaaaaagtgaaaatgggaagagctttaaagacattcaccaactattcttttccttcacttatctacttaaggaactgttggatcttactaagaaaacttacgcctcataataaaaaggaactttagaggccgataggttttaaaaatatacaaactatttgatccaatgattttaatcaaacagtttgactgggcaaactttgcagctgataatgactatttcgctttttacaaattgccactgatttggatttgtgcactctaacctttaatttattgatgctctattgtgcagtagcatttcatttaagataaggctcatatagtactatccaaaattagttggtaatgtgattatgtggtaccttggctttaggttttaattcgcacgaaacaccttttggcatgcttaactttctggtattatcctcacctgcattggttttgttttttggggtttttgttgttgtttgtttgtttgtttttagatccacagaacatgagaatcctttttgacaagccttggaaagctggctcttctttccctctctatgtgaaggatgtatttaaatgaacactggtcagtgggacattgtcagctctgagtattgggtgcttcactgtctaataattgccatgtgaatgttgtttttgactgtaaggctatgtcactaaagatttttactctgcgttttcataatcaaaggtcatgatgtgtatagacatgctttgtagtgaagtatagtagcaataatttctgcacatgatcaagagtttattgcagcatttctttccctgttctctcttttttaagggttagcattaacaaatgtcaaggaatagcaaagtcaacaaagactttaggaggtggaattaagaacacacagatttgtgatctttggatgtgacacttattggatgttattctaaagtcttattgaacattgtcaaatttgtaagcttcatggggatggacataatgtttatataatgcccttcttatgtgttaccatagatgtgaaaccttatattgtctttgaaaatgttaaattgagaactctgttaacattttatggattggcacattatattactgcaagaaacatttgattttcagcacagtgcaaaagttctttaaaatgcatatgtctttttttctaattcaattttgtttaaagcacattttaaatgtagttttctcatttagtaaaaagttgtctaatt

SEQ ID NO: 3211 - DNA, 2214 bp, Rattus norvegicus
  Genbank Accession No. NM_013067
tcgcggtcatggaggcgccgatcgtcttgctgctgctgctatggctcgccttggccccgacgcctggcagcgcctcttcggaggctccgccgctggtcaacgaggacgtgaagcgcacggtggacctgagcagccacctagccaaggtgacggctgaggtggtcctggcgcacccgggcggcggctctacagcacgagccagctctttcgttctggccctggagcccgaactggagtcgcgacttgcacacctaggcgtgcaggtaaagggagaagatgaggaagacaacaacctagaagtacgagaaaccaaaatgaaggggaaaagtgggaggtttttcaccgtcaagctcccagttgctcttgatcctgggtccaagatctcaatcgttgtggaaactgtctacacccatgtgcttcatccatacccgactcagataactcagtcagagaaacagtttgtggtgtttgagggcaaccattacttctactctccctatccaacaaagacccagaccatgcgagtgagacttgcttcccgaaatgtggagagccataccaagctggggaacccctcaaggtctgaggacatcctggactatgggccttttaaagacatccctgcctacagtcaggatactttcaaagtacattatgagaacaatagccctttcctgaccatcaccagtatgacccgggtcattgaggtttctcactggggcaatattgctgtggaagagaacgtggacttgaagcatacaggtgcggtgctgaagggacctttctcccgctacgattaccagaggcagcctgacagtgggatctcctccattcgttcttttaagaccatccttcctgctgctgcccaggatgtgtattaccgggatgaaatcggtaatgtttccaccagccacctccttattttggatgactccgtggaaatggaaatccggcctcgatttggtctctttggagggtggaagacacactacatcgttggttacaacctcccaagctatgagtacctctataatctgggtgaccagtatgcactgaagatgcggtttgtagaccacgtgtttgatgagcaagtgatagattctctgacagtgaagatcatccttcctgagggagccaagaacatccaggtagacagtccctacgatattagccgggccccagatgagctgcattacacctacctagacacattcggccgcccggtgattgttgcttacaagaagaatctagttgaacagcacattcaggacattgtggtgcactacacattcaacaaggtgctcatgctgcaggagcctctgctggttgtggccgccttctacatcctgttcttcaccgtcatcatctacgtccgtctagacttttccatcaccaaggacccagcagcagaagccaggatgaaagtggcctgtatcacagagcaggtcttaaccctggtcaacaagaggttaggcctctaccgtcactttgatgagactgtcaatagatacaagcagtcccgggacatctctaccctcaatagtggcaagaagagcctagagacagagcacaaagctgtgaccagtgagattgctgtgctgcagtctaggctgaagacggagggctctgacctgtgtgacagggtgagcgaaatgcagaagctggacgcgcaggtcaaggagctggtactgaagtctgcggtggaggcagagaggctggtggctggcaagctcaagaaggacacatacatcgagaatgaaaagctcagctcaggaaaacgccaggagctggtcaccaagatcgaccacatcctagacgctctgtagctcttgtctccagagcaggcctgggtggcctacacttctggatggaataggtagagggaggaagttgtgattagcctaagacctcaagaaaaaagctgaggcccatccatggctgtgtaagaagcttgtcccttatttctgaatggttctcttttttacaaaaacaaaaacctaaacaaaaatcctgcccaaaaaacaaacttggttgtgttttgagcaaaagcattttgagtagttgattgctgttttgttttgatacctgggtattttttctgtctgtaagccctgttttatggccttctgattcctaatgtttggttcttttgtgagcgtatgcatggttttttaaaagtgtgtatgaccaaataaaaataaaggagggactgtg

SEQ ID NO: 3212 - DNA, 1150 bp, Rattus norvegicus
  Genbank Accession No. NM_013069
gcagcagcagcagcaccagcagcacttgggggaaaagctagaggctagagtcatggatgaccagcgcgacctcatctctaaccatgagcagctgcccatcctgggccagcgtgctagagccccagaaagcaattgcaaccgtggagtcctgtacaccagtgtctctgtcctggtggctctgctcttggctgggcaggccaccactgcttacttcctgtaccagcagcagggccgcctggacaagctgaccgtcacctcccagaacctgcaactggagaaccttcgcatgaagcttccgaaatctgccaaacctgtgagcccgatgcgcatggctactcccttgctgatgcgcccactgtccatggataacatgctccaagcgcccgtgaagaatgttaccaagtatggcaacatgacccaggaccacgtgatgcacctgcttacgaagtctggacccgtgaactacccacagctgaaggggagcttcccggagaatctgaagcaccttaagaactctatgaatggtctggactggaaggtctttgagagctggatgaaacagtggctgttgtttgaaatgagcaagaactccctggaggagaagcagcccacccagactccacctaaagagccactggacatggaagacccatcttctggcctgggagtgaccaagcaggatatgggccaaatgttcttgtgaagacagaagccagctctgcacggcggcacgtcccctgctcctcagcccttcttacactccctaacatcacacccattccgtcttcctgcacctgggcttgagactggtatctgcttcaccgtccctgacacaacaaatgaaaccggaacagaatgagaacactggagggagggccttgctgcctacccccatctaaaggacccccatttctgacccattagcagtctttaatgtggggctctgagatctaggcccactgacagggataggggatgccctacccttaatctaggctggatacatttgctgtcttctcaaggaagaggccaagccctcccagcaacccttcctcatgtcctgccgacgcccctgggatccctgctcagccaagcttgtcagcagcctgtaggaccatggttcacgtgacaataaaaggtagaaggtaaa

SEQ ID NO: 3213 - DNA, 1658 bp, Rattus norvegicus
  Genbank Accession No. NM_013073
aattcgggggaccgtcgccgcgctgaaggtggctctatacctgctcgggtgtgcttcgcgatggcctggaaatccggcggcgccagccactcggagctaatccacaacctccgcaagaatggaatcatcaagacagataaagtatttgaggtgatgctggctacagaccgctcccactatgcaaaatctaacccttacatggattctccacagtcaataggtttccaggcaacaatcagcgctcctcacatgcatgcatatgcactagagctcctgtttgaccagctgcacgaaggcgctaaagcccctgacgtagggtctggaagtggaatcctcaccgcgtgttttgcacggatggttggacacagtgggaaagtcattggaattgatcacattaaagaactagtggacgactcaataactaatgtcaaaaaggatgaccccatgctcctgtcctctgggcgagtacggctggttgtgggcgatggaagaatggggtttgctgaagaagccccttacgatgccattcacgtcggagctgcagccccagttgtgccccaggcattaatagaccagttaaagcctggtggaagattgatattgccagtcggtcctgcaggaggaaaccaaatgttggagcagtatgacaagctacaagatggcagtgtcaaaatgaagcctctgatgggggtgatatacgtgcctttaacagataaagaaaagcagtggtccaggtggaagtgattttctcttctgctctttcttcctccacacattcaagggacgagctgtgagagcaacctgtagcttggccgtctgtaacactgcagtggattgctcatctcggtcctcaaagcattgagagccaacagcatcaccgcttgttttggactttgttacactctcttattttcagcatgaaaatgtgtggtttttgtagggtttcctaattcaaaacggtgcagagccagactgatagaggagggctggagagtgttaactttgtgttgtttaacatgccacatttactttacaaatattaaaagaaagggttctctaaccggaaagcttcgtttgtgacttagtttggaagagtggctttgcttttcttggacacttacttctgttccaatattaatttatgagatttcttttgtgtgtcagataacaccacattcacaagtttagcttttttttctttttttatgtgattttggctagcgagcattattagtgggaggagtcaagttgttagaatgattagtggggtggataatggatcgaggagaatataactagaaatttaggtaattttcgtcattttgtcataggagtgataagcttaataggctcactagaggaaagctgtaggaggtgacattggttcagatttttttgttggctgagagtcatgttagtgggaggagtatgatagatgggaaaataatttttaacattgtagaaggttgaggttttgtacgtagtctgttccgtaagtatttgaaatttttactagtaaggctaaacctacggtctttcgcaggctgcaaaaacatgaatggtaattgggatggttatggagattatggagttggagtttaatgtggatgttgaagttatgacaaatagtgatagtattattccttctccgaaattcc

SEQ ID NO: 3214 - DNA, 1519 bp, Rattus norvegicus
  Genbank Accession No. NM_013078
tgcaactgaaagcattcttagcttgccagtggcccccactgcctgcctgcctgcggaactctctagaccatagattcctcctccactctagcaagagaagatgctgtctaatttgaggatcctgctcaacaaggcagctcttagaaaggctcacacttccatggttcgaaattttcggtatgggaagccagtccagagtcaagtacagctgaaaggccgtgacctcctcaccctgaagaacttcacaggagaggagattcagtacatgctatggctctctgcagatctgaaattcaggatcaaacagaaaggagaatacttgcctttattgcaagggaaatccttagggatgatttttgagaaaagaagtactcgaacaagactgtccacagaaacaggcttcgctcttctgggaggacatccttcttttcttaccacacaagacattcacttgggcgtgaatgaaagtctcacagacacagctcgtgtgttatctagcatgacagatgcagtgttagctcgagtgtataaacaatcagatctggacatcctggctaaggaagcaaccatcccaattgtcaacggactgtcagacctgtatcatcctatccagatcctggctgattaccttacactccaggaacactatggctctctcaaaggtctcaccctcagctggataggagatgggaacaatatcctgcactccatcatgatgagtgctgcaaaattcgggatgcaccttcaagcagctactccaaagggttatgagccagatcctaatatagtcaagctagcagagcagtatgccaaggagaatggtaccaggttgtcaatgacaaatgatccactggaagcagcacgtggaggcaatgtattaattacagatacttggataagcatgggacaagaggatgagaagaaaaagcgtcttcaagctttccaaggttaccaggttacaatgaagactgctaaagtggctgcgtctgactggacgtttttacactgcttgcctagaaagccagaagaagtagatgatgaagtgttttattctccgcggtcattagtgttcccagaggcagaaaatagaaagtggacaatcatggctgtcatggtatccctgctgacagactactcacctgtgctccagaagccaaagttctgatgcctgcaagaggacgaaaaacccaaaagacaaaaaaatctgttctttagcagcagaataagtcagtttatgtagaaaagagaagaattgaaattgtaaacacatccctagtgcgtgatataattatgtaattgctttgctattgtgagaattgcttaaagcttttagtttaagtgctgggcattttattatcctgcttgacttgacttaagcactctcttcaattcacaacttctgaatgatatttgggtttcatattaattatcatacacatttccttccactaagcattaaacactatgcttacaatgcataccatctaagtcattaaatgtaatccatgcttattacctt

SEQ ID NO: 3215 - DNA, 1303 bp, Rattus norvegicus
  Genbank Accession No. NM_013087
gtggcggtctgagcgagcgcgcccttgcttcaaagcggtagcgactctagcgcctccggctaggctccaacccttctctaccctacgtctcaatagccacaccgcagtctccggcctcaagcgacccaggctatcttccagtcccgggactccgggtactgcggtccccagaaccgcccgtccagggaccaacccaagttccgcaggccgcggcggccgccaatgggggtggagggctgcaccaaatgcatcaaatacctgctcttcgtcttcaatttcgtcttctggctggctggaggtgtgatcctaggtgtagctctgtggttgcgccatgatccacagaccaccaccttgctctacctggaactgggagacaaaccagcacctagcaccttctatgtgggcatctacattctcattgctgtgggagctgtgatgatgtttgtaggcttcctggggtgctatggggccatccaggagtcccagtgcctgctggggacgttcttcacttgccttgtgatcctgtttgcctgtgaggtagctgcgggcatctggggctttgtaaacaaagaccagatcgccaaggatgtgaagcagttctacgaccaggcccttcagcaggctgtgatggatgatgatgccaacaatgccaaggcagtggtgaagaccttccatgagacgctcaactgttgtggctccaatacgctgaccacactgaccaccgccgtgctgaggaacagcctgtgtccctcaagcagcaactcattcactcagcttctgaaggaagactgccatcagaaaatcgatgagctcttttctgggaagctgtacctcattggaattgcagccattgtggtagctgtcattatgatcttcgagatgattctgagcatggtgctgtgctgtggcatccggaacagctccgtgtactgaggcccttcgcttcgcaccagagggtccctggaatgaccagagggcaccttggggggcatggcctgtgtatatactatttctgtattactctgctacacttagcctttttacttttgagtcttttttgttctgaacttttcctgtcaccttttggagccgacaccacacataggtggcgtatgtggggacgtagaggtggagctggccctagctggcagggccctgtacttctgggacccctggagagttctgcctgctgagccaaacctcctccatagctacttgtccagaggccacatagccaagctagaaggccatgtccacccactctgcccactgtgggtcacatcgctcccatctttttaatccg

SEQ ID NO: 3216 - DNA, 2130 bp, Rattus norvegicus
  Genbank Accession No. NM_013091
ttttctccgagttttctgaactctggctcatgatcgggcttactggatacgagaatcctggaggaccgtaccctgatttccatctacctctgactttgagcctttctaacccggggctcacgctgccaacacccgggccacctggtccgatcgtcttacttcattcaccagcgttgccaattgctgccctgtccccagccccaatgggggagtgagagaggccactgccggccggacatgggtctccccatcgtgcctggcctgctgctgtcactggtgctcctggctctgctgatggggatacacccatcaggggtcaccggactggttccttctcttggtgaccgggagaagagggataatttgtgtccccagggaaagtatgcccatccaaagaataattccatctgctgcaccaagtgccacaaaggaacctacttggtgagtgactgtccaagcccagggcaggaaacagtctgcgaggtgtgtgataaaggcacctttacagcttcgcagaaccacgtcagacagtgtctcagttgcaagacatgtcggaaagaaatgttccaggtggagatttctccttgcaaagctgacatggacaccgtgtgtggctgcaagaagaaccaattccagcgctacctgagtgagacgcatttccagtgtgtggactgcagcccctgcttcaatggcaccgtgacaatcccctgtaaggagaaacagaacaccgtgtgtaactgccacgcaggattctttctaagcggaaatgagtgcaccccttgcagccactgcaagaaaaatcaggaatgtatgaagctgtgcctacctccagttgcaaatgtcacaaacccccaggactcaggtactgccgtgctgttgcctctggttatcttcctaggtctttgccttttattctttatctgcatcagtctactgtgccgatatccccagtggaggcccagggtctactccatcatttgtagggattcagctcctgtcaaagaggtggagggtgaaggaattgttactaagcccctaactccagcctctatcccagccttcagccccaaccccggcttcaaccccactctgggcttcagcaccaccccacgcttcagtcatcctgtctccagtacccccatcagccccgtcttcggtcctagtaactggcacaacttcgtgccacctgtaagagaggtggtcccaacccagggtgctgaccctctcctctacggatccctcaaccctgtgccaatccccgcccctgttcggaaatgggaagacgtcgtcgcggcccagccacaacggcttgacactgcagaccctgcgatgctgtatgctgtggtggatggcgtgcctccgacacgctggaaggagttcatgcggctcctggggctgagcgagcacgagatcgagcggctggagctgcagaacgggcgttgcctccgcgaggctcattacagcatgctggaagcctggcggcgccgcacaccgcgacacgaggccacgctggacgtagtgggccgcgtgctttgcgacatgaacctgcgtggctgcctggagaacatccgcgagactctagaaagccctgcccactcgtccacgacccacctcccgcgataaggccacacccccacctcaggaacgggactcgaaggaccatcctgctagatgccctgcttccctgtgaacctcctctttggtcctctagggggcaggctcgatctggcaggctcgatctggcagccacttccttggtgctaccgacttggtgtacatagcttttcccagctgccgaggacagcctgtgccagccacttgtgcatggcagggaagtgtgccatctgctcccagacagctgagggtgccaaaagccaggagaggtgattgtggagaaaaagcacaatctatctgatacccacttgggatgcaaggacccaaacaaagcttctcagggcctcctcagttgatttctgggcccttttcacagtagataaaacagtctttgtattgattatatcacactaatggatgaacggttgaactccctaaggtaggggcaagcacagaacagtggggtctccagctggagcccccgactcttgtaaatacactaaaaatctaaaagtg

SEQ ID NO: 3217 - DNA, 556 bp, Rattus norvegicus
  Genbank Accession No. NM_013096
acattctccttctgatagactcaggaagcaatcatggtgctctctgcagatgacaaaaccaacatcaagaactgctgggggaagattggtggccatggtggtgaatatggcgaggaggccctacagaggatgttcgctgccttccccaccaccaagacctacttctctcacattgatgtaagccccggctctgcccaggtcaaggctcacggcaagaaggttgctgatgccttggccaaagctgcagaccacgtcgaagacctgcctggtgccctgtccactctgagcgacctgcatgcccacaaactgcgtgtggatcctgtcaacttcaagttcctgagccactgcctgctggtgaccttggcttgccaccaccctggagatttcacacccgccatgcacgcctctctggacaaattccttgcctctgtgagcactgtgctgacctccaagtaccgttaagccgcctcctgccgggcttgccttctgaccaggcccttcttccctcccttgcacctatacctcttggtctttgaataaagcctgagtaggaagc

SEQ ID NO: 3218 - DNA, 2237 bp, Rattus norvegicus
  Genbank Accession No. NM_013098
gccagcttcctgaggtaccaaggaggaaggatggaggaaagaatgaacgtgctccacgactttgggatccagtcgactcgctacctccaagtgaattacgaagactcccaggactggtttgtcttggtgtctgtgatcgctgacctcaggaacgccttctatgtcctctttcccatctggttccacattcaagagactgtgggcatcaatctcctctgggtggcagtggttggagactggttcaacctcgtctttaagtggattctttttggacagcgcccgtattggtgggtcctggacactgactattacagcaacagctccgtgcctctgataaaacagttccccgtcacctgtgagactggaccagggagtccctcgggccatgccatgggcacagcaggtgtatactacgttatggttacttctactctcgctatctttcgtggaaagaaaaagtcaacgtatggattccggtgcttgaatgtcgtcttgtggttgggatactgggctgtgcagctgaacgtctgtctgtcccggatctaccttgcggctcactttccccatcaggtggtggctggagtcttgtcaggcattgctgtggctgaaactttcagccacatccggggcatctacaatgccagcctccagaggtactgtctcatcaccttcttcctgtttggtttcgcacttggattttacctgctgctaaaggggctaggggtggacctcctgtggactttggagaaggccaagagatggtgtgagcgccccgagtgggtccaccttgacactacaccctttgccagcctcttcaaaaacctggggaccctcttggggttggggctggccctcaactccagcatgtaccgcaagagctgcaaaggagaactgcgcaagtcgctcccattccgtttggcctgcatcgtggcctccttgggcctgctgcatctctttgactcgctgaagcccccgtcccagattgagtcgatcttctacatcttgtctttctgcaagagtgcgaccgtcccctttgcatctgtcagtcttatcccctactgcctagcccggctcctgggacagacacacaagaagtctttgtaaagcgttaagtctctgacacaagtcagcggccgtgcaaaggactaggagcaacccaagccttgtgcaacccagtgtggggccagaggtgttcacagccaccctggtagccctgtctttctttgccatcgtaaccaaaaaggtgaatttttaaaagctaacagggctgtttgaggaaagcgtgaatgctggaagatgtttccctgatgaatcacttccggtctcctgtccgacacagaagagaaagcccagactagagatcctgacagaatgctctcactgtgcagaatcctccaggccgagggtaaaagaaaagagcgttgtgcatttgctaggaagagaaggaaggatcgggaggagggggagtgtttggtggattgagcaaaccatatgcaagccatgtctacccggcttcagttatgcctgggtctttagatatgtaggacactctcaataatgatagaccagcccgtgtaatgagtagccagttagaggcgatcattctgctcccagatttttctctactgtacatgaaagtcacaccgtgtgcttgtattcctgaatggtaatggtgactgtcactcaggaaccaccaccttctctgtgacaccacagctttgcctcctcggcccaggtctgcgtgccataggactcatcactgcttccctgaccacgctgctggaccctgcattgctgaaccccatgctgctggaccctgtggtgtacggtgggcaattgtttgctggtgcttttgtagggttaagttaaactctgagatcttgggcaaaacggcaaggggagagtcaggattcctctctccaaaggtcactccgaagttacttttgattcctggagcagaaatgactccttcctctagcccaagccagccaagaactcattcttagaggcaaagcagcccaagcccgactgtgcctgtcctccagcctgggctggttttgcagagtgtgtcttcaagaagaaaaaatggtaaagctatttattcaaaatgcttgttttttgctatgaatgatgcctgtgtttccacccacgccaagcacttgttcctattgtcttgataagaaactacatgtgtgcagtattttattaaaacgacattttatttaaaaaaaaaaaaa

SEQ ID NO: 3219 - DNA, 2914 bp, Rattus norvegicus
  Genbank Accession No. NM_013101
aaaggaattccgcgcttggagcccactgagctcggacaggccaggggtacgctttgcccccaggcgccccacaagacagagcgggagccatggagcctccggccgccccctcggaaaggagcctgtctctctctcttccggggccccgggagggccaggccaccctgaagccgcccccccagcacctgtggcggcagccgaggaccccgatccgcatccagcaacgcggctacccggacagtgccgagcgctcagagacagagcgctcaccgcaccggcccatagagcgcgccgacgccgtggacactggcgaccggccaggcctgcggactacccgcatgtcctggccctcgtccttccacggcaccggtaccggcggaggcagcagtaggcgcttggaggcagaaaatgggccaacgccatcccctggccgcagccccctggactcgcaggcgagcccggggcttgtgctgcatgctggggccaccaccagccagcgccgcgagtccttcctctaccgctcagacagcgactatgacatgtcaccgaaggctgtgtccaggagctcgtctgtcgccagcgaagcgcacgctgaggacctcattgtgacaccatttgcccaggtgctggccagtctccgcagcgttcgaagcaacttctcactcttaaccaatgtgcccatccccagcaacaagaggtctccactgggtggcccaccctctgtctgcaaggccacactgtcagaggagacgtgccagcagctggcccgggagaccctggaagagctggattggtgcctggagcagctggagaccatgcagacctaccgctctgtcagcgagatggcctcacacaagttcaaaaggatgctgaaccgtgagctcacacacctgtcggaaatgagcaggtcaggaaaccaggtctcagagtacatttccaacacattcctggacaagcagaatgaagtggagatcccctcacccacacctcggcagagagccttccagcagcccccgccgtcagtgctgcgacagtcccagcccatgtctcagatcacagggctgaaaaagctggtacacactggaagcttgaacaccaacgtcccacggtttggagtcaagacagatcaagaggacctcttagcacaagaactggagaacttgagcaaatggggcctgaacatcttttgtgtgtcggagtacgctggaggccgctcactcagctgtatcatgtatacgatattccaggagcgggacctactgaagaaattccacatccctgtggacaccatgatgatgtacatgctgaccctggaggaccactaccatgccgacgtggcctaccacaacagcctgcacgcagcggatgtgctgcagtccacacacgtgctgctggccacgcccgcactggacgctgtgttcacagacctggagattcttgctgccctcttcgctgctgccatccacgatgtggaccaccctggcgtctccaaccagttcctaatcaacaccaattcggagctggcgttgatgtacaacgatgagtctgtgcttgagaaccaccacctggctgtgggattcaagctgctgcaagaagagaactgcgacatcttccagaacctcagcaagcgccagcggcagagcctgcgcaagatggtcatcgacatggtgctggccacagacatgtccaaacacatgaccctcctggctgacctgaagactatggtggagacgaagaaagtgaccagctccggagttctcttgctggacaactactctgaccgtatccaggtcctcaggaacatggtgcactgtgcagacctcagcaatcccaccaagcccctggagctgtaccgacagtggaccgaccgcatcatggctgagttcttccagcagggcgaccgagaacgggagcgtggaatggagatcagccccatgtgcgacaagcacacagcctctgtggagaagtctcaggtgggcttcatcgactacattgttcatccattgtgggagacatgggcagatctcgtccacccggatgcccaagacatcctggacacgctggaagacaaccgggactggtaccacagtgccattcggcagagtccttccccacccctggaagaggagccaggggggcttggccatccgtccctgcctgacaagttccaatttgagctcaccttggaggaagaggaggaagaggattccttggaggttccaggattgcctaccactgaggaaaccttcctggctgcagaggatgccagagctcaagctgtggactggtcaaaggtcaaaggcccgagcactacagtggtggaagtggcagagcgcttgaagcaggagaccgcctcagcatatggtgctcctcaggagtccatggaggctgtaggctgttccttcagccctgggacccctattctgcctgacgtgaggaccctatcctcctcagaggaggccccgggcctcctgggcctcccctccacggcggcagaggtggaggccccaagagaccatctggctgccacgagggcttgttctgcctgctctgggacctcaggagacaattctgccatcatctctgctccaggcaggtgggggtcaggcggagaccctgcctgatcctttttcccttcacccttgggtcctccctcctccccacacttcccactcaccacagaccgcctcagcgactcctggccctcctgagaaaaaagaaaacagaaaagtggggtttttttctcttttcttttttttaaccctttcccctctgcccttgtccacagggcctttttgttgaggtggggtatggggagccaggaactgaagtccccaaaaaaagggattttattttttgaattttaattgtaaagtttttagaaaaagaacaaaaaaaaaaaaaaaaggaattc

SEQ ID NO: 3220 - DNA, 554 bp, Rattus norvegicus
  Genbank Accession No. NM_013102
gccgccgccgccgccgccgccgccatgggagtgcaggtggagaccatctcttctggagacgggcgcaccttcccgaagcgcggccagacctgcgtggtacactacacggggatgcttgaagatgggaagaaatttgactcctctcgggacagaaacaagccttttaagtttacactaggcaagcaggaggtgatccgaggctgggaagaaggggtagcccagatgagtgtgggccagagagccaaactgataatctccccagactatgcctatggagccaccgggcacacaggcatcatcccaccacatgctactcttgtttttgatgtggagcttctaaaactggaatgacagaagtggcctcctcccttagctctgcacatggatctgccatggaggaatctggtacctccagatgggtgcacatgaatccatgggagcttttcctgatgtcccaccactctttgtatagacacctactaactgaatgtgttccgtcactcagctttgcttcggacacctccatgtcctcttcccccttctgtatgtgtgtt

SEQ ID NO: 3221 - DNA, 2026 bp, Rattus norvegicus
  Genbank Accession No. NM_013105
aggaagccctgcagagcatcagaggcccagctagagggacaacacagaggagtaatttgctgacagacctgcagggatggacctgctttcagctctcacactggaaacctgggtcctcctggcagtcgtcctggtgctcctctacggatttgggacccgcacacatggacttttcaagaaacaggggattcctgggcccaaacctctgcctttttttggcactgtgctgaattactatatgggtttatggaaattcgatgtggagtgccataaaaagtatggaaaaatatgggggttgtttgatggtcaaatgcctctgtttgccatcacggacacagaaatgatcaagaatgtgctagtgaaggaatgcttttctgtcttcacaaaccggcggtattttggcccagtggggattatgggaaaggccatctctgtatctaaggatgaggagtggaagagatatagagccttgctgtcacccacgttcaccagtggaagactcaaggagatgttccctgtcatcgaacagtatggagacattttggtaaaatacttgaggcaagagaaaggcaaacctgtccctgtgaaagaagtgtttggtgcctacagcatggatgtgatcaccagcacatcatttggagtgaatgttgattccctcaacaacccgaaggatccttttgtggagaaagccaagaagctcttaagaattgatttttttgatccgttgttcttgtcagtagtactctttccattcctcacgccagtatatgagatgttaaacatctgcatgttcccaaaagattcaatagaatttttcaaaaaatttgtgtacagaatgaaggaaacccgcctggattctgtgcagaagcatcgagtggattttcttcagctgatgatgaatgctcataatgattctaaagacaaagaatctcatacagccctatccgatatggagatcacagcccagtcaatcatttttatttttgctggatatgaacccaccagcagcacactttcctttgtcctgcattccctggccactcacccagatacacagaagaaactgcaggaggagatcgacagggctctgcccaataaggcacctcccacctatgatactgtgatggaaatggaatacctggatatggtgttgaatgaaaccctcagattgtatccaattggtaatagacttgagagagtctgtaaaaaagatgttgaaatcaatggtgtgtttatgcccaaagggtcagtggtcatgattccatcttatgctcttcaccgtgatccacagcactggccagagcctgaggaatttcgcccagaaaggttcagcaaggagaacaagggcagcattgatccttatgtatatctgccctttggaaatggacccaggaactgcattggcatgaggtttgctctcatgaatatgaaactcgctctcactaaagttctgcaaaacttctccttccagccttgtaaggaaacacagatacctctgaaattaagcagacaaggacttcttcaaccaacaaaacccattattctaaaggttgtgccacgggatgaaatcataactggatcatgattttccctcaaggagttctgctgaattcttcagaaatgtggtgtctaagaacaccagaccctttaatttatgtcatgaataaaattcagatgaaattagggcttaatcgactttgttttgatttggtacatctttgctctttctcagtgtctacaatgtacccatctaatataaaggaaatgacaagtcagtgacagaacaggaacttaacctttggtgattctcatgggactacctccatccacatctggttgtctctgttaatttcttttgatagtaaccttgtctctgtaatttgatcaagaatttttcatgaaaatgtgaactattgtgacaactttaattgtagatttggtatcagatgttttagatgcattattctacactaaatgttacatggaaaaaatgtgaataaacacttctttaaaaaatccccatttt

SEQ ID NO: 3222 - DNA, 3072 bp, Rattus norvegicus
  Genbank Accession No. NM_013106
cagaagacgcgtctcagccggtgtgtcgcggttccccgcggtgtgtgagtgagccagggcccggtcccctctccggccgccgtcatgggctgcacgttgagcgccgaggacaaggcggcggtggagcggagtaagatgatcgaccgcaacttgcgggaggacggagagaaagcggccaaagaagtgaagctgctgctgctcggcgctggagaatctggtaaaagtactattgtgaaacagatgaaaatcattcatgaggatggctattccgaggacgagtgtaagcagtataaagttgtcgtctacagcaataccattcagtccatcattgcaatcataagagccatgggacggttgaagattgattttggggaagctgccagagcggatgatgcccgacagttatttgttttagctggcagtgctgaggaaggagtcatgacttcagaactagcaggcgtgattaaacgtttatggcgagatggcggggtgcaggcatgcttcagcaggtccagggaatatcagctcaatgattctgcttcatattacctaaatgatttggatagaatatcccagaccaactacattccaactcagcaagatgttcttcggacgagagtgaagactacaggcattgtggagacccacttcaccttcaaggagctctacttcaaaatgtttgatgtaggtggccaaagatccgaacggaaaaagtggatccactgttttgagggagtgacagcaattatcttttgtgtggctctcagtgattacgaccttgttctggctgaggacgaggaaatgaaccgaatgcatgaaagcatgaaattgtttgacagcatttgtaacaacaaatggtttacagacacttcaatcattctcttccttaataagaaagacctttttgaggaaaaaataaagaggagtccattaacaatctgttatccagaatacacaggttccaatacgtacgaagaggcagctgcttacatccagtgccagtttgaagatctgaaccgaagaaaggacaccaaggaggtctacactcactttacctgtgccactgacaccaaaaacgtgcagtttgtttttgatgctgttacagatgtcatcattaaaaacaacttaaaggaatgtgggctttactgagaggatggcatagtaaaagctactacagggaggaatgttgagaccagacatcatctactgtctcttgggtcagcgacaagcatgacaggaccaaggaatggcaacagcatgcagaatctttagcacaatcttctgtattaggaaatgtttaattggcatgagaagagatgatcgagtcagacatgaaattggacaactgtaaagtatgaccggatcatcagggcaccgcttggactttaaatctcaatgtttagggcatattgaagtcgaggtgctgcattccagaacttaaacttgtagcttactgttccccgtctttttaacaaatgaccagtagttaatttctaaggtttttctcatcaagagaacaatacctaaaaactcttacttgtttgcaaaagaatcttctggggactcagtcttaactatgcacacaatgtagccggacatcttgaaatattcctcttagtaggaactgtttgtttttaactcttggaatggtcaggagtaatattccacagctaaaaatcttcctggttattgggactatactaatagagctttttggaatgaagtttatgttactgtcctgtttaaagtatcacaatggcttctaaacagcattcacttcggagagctgtacagtaagattctagctctcgtttcttaagcttacggttggagttaaccttgtttgtgctgattaccaaattactagatgaatactgatgtaatatgataaactgctcttgggtacagacacacgcaggatagctgtcagtcagagacgcagactgctaaggtgagaagcagtgacttgctgctacagatctaccgaggtggccacactgatttgcctgctcgtctcaggcgtgtgggttgtatgcggtggccccttgttttccatctttgtggccttttttgctaggagacgtctaagagtataacaactgtgcatgcctttcctttgtaaatgtgctgccaaatccctgcttgctgtcattgtcactgtatcgatggtaactgcatagcggcccttgctgtgttctttttctaagacttgcattctgggactctgttccaccttgtcacgtgtacagactttaatctgttacagctggcagcagtattaacgcggtgagtaaagagcccaggattgctcctgtttgtaaccgatcctttctggaagccctgccttctgtttctttttgcccctgctgagtgttctttagcctttgagagtgggtttaggtagaaaagtgtttttgaaagtctagttccttgatgtaatagtgatatcaaatctagggctgggggctttatgtccagtctgtgcaagtcatacaagtgtccgatgtgtacagtttgcttgcgctgagagcttcagtcctcttgtacagactgtatcaaatgtcattaaacactgagtggaccactgagggacggcgaaacagaggatgcattttgagcatttcagatcagtagtttgatcagtgccttttgaggtccagtctttgtggattggatccgttcatcttttgatgttacctcctactcatttgaaagaaggttggtggtcagaactgctttgggaagcaagccacggtgatcagtgccttcattggcagcttttaccatttttaattcttacgtgtctttgcgaaatcattattatgcagacagtataactgttatcttacaaatatttccatagggctaagaaagtatcacttgaaagaaaagtattgatttcaatcagcgattgactcaattcccacagtgtaggggttaataagtcttactctcaatttattgttcctttgttgtattctgtaatataagaacatctgggaatgcgaactagtggaatatgttttcataatttttctatactttgggtttaataaaatggtgttgataatc

SEQ ID NO: 3223 - DNA, 2528 bp, Rattus norvegicus
  Genbank Accession No. NM_013113
gagcccgcgctccactcctttcgtccttcccggtgactttccctccttgtccctggtccatctcgccagaggtcatagcaggcagagtggtgcagctacagcttgaagcagcagctgcggggttcgctgagccccccgggaggcgatcggagcgcggggagagcaggagtgcggccacgcgcccacctctaggtgcggggctcggagccgcccagcccgcgcgcgccctcctccctcctccctcctccctccgcccccgccgcacctccccctcctcccgctctgcttaggctgctccgcggcgcgcctcgcactcggagagccgcagcggcagcggcgcgtctcgcctttggagacagagccgggccgcggggacaccgagcagtcgccgcgaggacgccagggcgcgcgcagcactcgctttccctcggcctcggccgccactgctgagcagacaccatggcccgcggaaaagccaaggaggaaggcagctggaagaaattcatctggaactcggagaagaaggagtttttgggcaggaccggtggtagttggtttaagatccttctgttctacgtgatattctatggctgcctggccggcatcttcatcgggaccatccaagtgatgctgcttaccatcagtgagctgaaacccacgtaccaggaccgtgtggccccgccaggattgacacagattcctcagatccaaaagactgaaatttccttccgtcctaatgaccccaagagctacgaggcctatgtgctaaacatcatcaggttcctggaaaagtacaaagattcggcccagaaggacgacatgattttcgaggattgtggcagtatgcccagtgaacccaaggagcggggagagttcaatcatgaacgaggagagcgcaaggtgtgcaggttcaagcttgactggctggggaactgctctggtctcaatgatgaatcctacggctacaaagaggggaagccctgtatcattatcaagctcaaccgaatgctgggcttcaaacctaagcctcccaagaatgaatccttggagacttaccctctgacgatgaagtataatccaaacgtcctacctgtccagtgcactggcaagcgcgatgaggataaggataaagttggaaacatagagtactttgggatgggcggattctatggctttcctctgcagtactatccctactacggcaaactcctgcagcccaagtacctgcagcccctgctggccgtgcagttcaccaacctcaccttggacactgaaatccgcattgagtgtaaggcgtatggtgagaacattgggtacagtgagaaagaccgttttcagggacgctttgatgtaaaaattgaagttaagagctgatcacaagcacaaatctttcccactagccatttaataagttaaagaaaaagatacacaaacctactagtcttgaacaaactgtcatacgtatgggacctacacttaatctctatgctttacactagcttctgcatttaataggttagaatgtaaatttaaagtgtagcaatagcaacaaaatatttattctactgtaaatgacaaaagaaaaaaataaaaattgagccttgggacgtgcccatttttactgtaattagactccgtaactgacttgtagtgagcagtgttctggcccctaagtatcgccgccgtctgttttatttagtgtacagtactataggtgcgcactctggtcattttccaagccatgttttatcatatctgttttctactttccgtgagcgaggtttgctgtccaaggtgtaaatactcatgggaataaaactggcatggtactttcccttcctttctcattttcttggctctgagatttcaaaggtaacggcccatcaacaagcatttttaacacactccatagtctttccctgtggtatcaggtctttactattgtttttctttgtttcctggggctggggggtgggctgtcgtgggggaactgccctttaaattctaagtgacgctgcagaaaaacaacggtgatgggttgtgttgtgctccgtgctgagtgctgtctcgccatctctccccttgtcctccagtgtgctccgaagctgtgtctgatctggatctgcccgtcactttggctagtgatggggctagttaatttgcttagtacatttccttttccttctttcctttctctggaggcatcatgtgctggtgctgtgtctttatgaatgttttaaccattttcatggtggaagaattttatatttatgcagttgtacaattttatttttttctgcaagaaaaagtgtaatgtatgaaataaaccaaagtcacttgtttgaaaataaaatctttattttgaactttataaaaagcaatgcagtaccccatagactggtgttaaatgttgtctacagtgctaatccatgttctagcatatgtagtgattgccaggagtacagtgctcttgttggtcttgtgtcagtcaggttaacacaatggacaataaaagaatgaacacattc

SEQ ID NO: 3224 - DNA, 2156 bp, Rattus norvegicus
  Genbank Accession No. NM_013120
gagggtccacagtgtgggaccatgccaggcaccaaacgatatcagcatgtgatcgagacccctgagcctggtgaatgggagttgtcagggtatgaagcggctgtgccaatcacagagaaatccaacccactgacccgaaacctggacaaagcagatgcagagaaaattgtcaaactgctggggcagtgtgatgctgagatattccaggaggaggggcagattgtgcccacctaccagcgactatacagcgaatcagttctgaccaccatgttgcaagtggctggaaaagtccaggaagttctgaaggagccagatgggggtctggtagtgctgagtggagggggaacctctggtcgtatggcatttctcatgtctgtgtctttcaaccagctgatgaaaggcctgggacaaaagcctctttacacctacctcattgcaggaggtgacaggtctgttgtggcctctcgtgaacagacagaagatagcgccctacacgggatcgaggagctgaagaaggtggctgctgggaagaagagagtggtcgtcataggcatctctgtgggactctctgcgccctttgtggcaggtcagatggactactgcatggataacacagccgtcttcttgccggttctggttggcttcaatccagtgagcatggccagaaatgaccccattgaagactggagatcaacattccggcaagtggcagagcggatgcaaaagatgcaggagaaacaggaagcttttgtgctcaatcctgccatcgggcccgaggggctcagcggctcttcccgaatgaaaggtggaggtgccaccaagattctactggaaaccctgctactagcagcccataagactgtggaccagggtgttgtgtcctctcaaagatgccttctggaaatcctgaggacatttgagcgggctcatcaggtgacctacagtcaaagttccaaaattgccacgctgatgaaacaagtcggcatcagcctggagaagaaaggccgagtgcacttggttggctggcagactctcggcatcattgccattatggacggagtagagtgcatccacacttttggtgctgatttccaagatatccgtggctttcttattggtgaccacagtgacatgtttaaccagaaggatgaactcaccaaccagggtccccagttcaccttctcccaggatgacttcctgacttccatcctgccatccctcacggagactgacaccgtggtcttcatttttaccctggatgataacctcacagaagtacaggccctggcagaaagagtgagagagaagtgccagaacatccaggccctggtgcacagcactgtggggcagtccttgccggcccctctaaagaaactctttccctcactcatcagtatcacgtggccacttcttttcttcgattatgaagggacctatgttcagaagttccagcgtgagttaagcaccaagtgggtgttgaatacagtgagtactggggcccatgtactgctggggaagatcctacagaaccacatgctggacctccgcatcgccaactccaagctcttctggagggcgctggccatgttgcagaggttctctggacagtccaaggctcgctgcattgagagcctccttcaagcaatccactttcctcaaccactgtcggatgatgtccgcgccgctcccatctcctgccacgtccaggttgcccacgagaaggaaaaggtgatccccacagccttgctgagcctcctactccggtgctccatctctgaggctaaggcacgcctgtctgcagcttcttcagtctgtgaggttgttaggagcgccctctctgggccgggtcagaagcgcagcacgcaagcccttgaagaccctcccgcctgtgggaccctgaattgatatttctagaaccatggaggggcagagtctccgtccacttccaaggggacatgtgccagcagtacacgctgtgggaagaactcagtttcgggtgggtggggcctaactgcccagaattggggaagagccctgttctcaaccggattatttccatttttactggtgtcttctgaactcagaaataaaactaaatgtcttgttttggaaaaaaaaaaaaaaaaaaaaaaaaaaaaaaaaaaaaaaaaaaaaaa

SEQ ID NO: 3225 - DNA, 1417 bp, Rattus norvegicus
  Genbank Accession No. NM_013132
gtcctgctctcaaccgcagcctgcgccctaccttctgcagctccagcctactcctgaccgacagcatcatggctctcagaggcaccgtgactgacttctctggattcgacggcagggctgatgccgaagttcttcggaaggccatgaaaggcttgggcaccgacgaggacagcatcctgaacctgttgacagcccggagcaacgctcagcgccagcagattgctgaggagtttaagactctgtttggcagggaccttgtgaatgacatgaagtctgaactgaccggaaagtttgagaagttaattgtggctttgatgaagccctcccggctctacgacgcctacgagctgaaacacgctcttaagggagctgggacagatgagaaagtgttgactgaaatcattgcctcaaggacacctgaagagctcagggccataaaacaagcttatgaagaagaatatggttccaacctggaagatgatgtggtgggggatacctcagggtactaccagaggatgttggtggtcctccttcaggccaatagagaccctgacactgcaattgatgatgctcaagttgaactggatgctcaggcattgttccaggctggagagctgaagtgggggacggatgaagaaaagttcatcaccatccttgggacacgcagtgtgtctcatttaagaagagtgtttgacaagtacatgacaatatcaggatttcagattgaggaaaccattgaccgagagacctcagggaacttggagaacttactcctggctgtcgtgaagtctattcggagcatacctgcctaccttgcagagaccctctactatgctatgaagggtgctgggacggacgatcacaccctcatcagagtcatagtgtcgaggagtgagattgatctgtttaacatcaggaaggagtttaggaagaacttcgccacgtccctgtactctatgatcaagggcgacacatctggagactataagaaggccctgctgctcctctgtggaggcgaggatgactgaggagctgcctggagtgccctgggcccgcctgctgcccaccatcagcttccttcagcaccacgcctacttacgttcaatgcctgcctgcctgccacgctgccttactcacacgagtgtgtgctaatgaccaaagctgtctcgaatgaaagcagtgttctgctgttctgtctgacagaccttcccacgtctctcagtctagtatctctaagttgcgttttctatcctcttctaaagcttcatttatattaagttaataaccatattaccttgaacggaaccttagccatgaaattgtgaactcttggaagtgctgtcaatcaagcttagtgctctagctgacctgaaaaattaagatggtcgtaatatcagaaacgttgccgacaaataaa

SEQ ID NO: 3226 - DNA, 2664 bp, Rattus norvegicus
  Genbank Accession No. NM_013134
atgttgtcaagacttttccgtatgcatggcctctttgtggcctcccatccctgggaggtaattgtgggaacggtgacacttactatctgtatgatgtccatgaacatgttcaccggcaacaacaagatctgtggttggaattatgagtgcccaaaatttgaagaggacgtgctgagcagcgacatcatcatcctcacgataacccggtgcatcgccatcctgtacatctacttccagttccagaacctgcgtcagcttgggtcaaagtacattttgggtattgccggcctcttcacaattttctcaagtttcgtcttcagcactgtcgtcattcatttcctcgacaaagaattgacaggcttaaatgaagctttgccctttttcctgctcttgattgacctttctagagcgagtgcattggccaagtttgccctgagttcaaactcacaggatgaagtaagggagaatatagcgcgtgggatggcgatcctgggccccacgttcacccttgacgctctggtggaatgtcttgtgattggagttggcaccatgtcaggggtgcggcagcttgagatcatgtgctgctttggctgtatgtccgtgcttgccaactactttgtcttcatgacattcttcccagcctgcgtgtccctggtcctagagctttctcgggaaagccgtgagggtcgtccaatttggcagctcagccattttgccagagttttagaagaagaagagaataaaccaaacccagtaacccaaagggtcaagatgatcatgtctttaggcctggttcttgttcacgctcacagtcgctggatagctgatccttctcctcagaacagcacagcagaacagtctaaggtttccttgggtctggctgaagatgtgtccaagagaattgagccgagtgtttctctctggcagttttacctctccaagatgatcagcatggacatcgagcaagtgattaccctgagcttagcgttgcttttggctgtcaagtatattttctttgaacaagcagagacagaatcaacactctcattaaaaaatcctatcacatctcctgtcgtgaccccaaagaaagctcaagacaactgttgtagacgtgagcctctgcttgtgaggaggaaccagaagctttcgtcagtggaggaggatccaggagtgaaccaagacagaaaagttgaggttataaaacctttagtggcagaagccgagacttcgggcagagctacgtttgtgcttggcgcctctgcagccagccctccattggccctgggggcacaggagcctgggatcgaactccccagcgagcctcgacctaatgaagagtgtctacagatactggagagtgcagagaaaggtgcgaagttccttagtgatgcagagatcatccagttggtcaatgctaagcacatcccagcctacaaactggaaaccctcatggagacgcacgagcgtggtgtgtctattcgccggcagctcctctccgccaagcttgcagagccatcttctctgcagtacctgccttacagagactataattactccttggtgatgggagcttgctgtgagaacgtgatcggatatatgcccatccctgttggagtggcaggacctctgtgcctggatggaaaagagtaccaggtgccaatggcaacaacagaaggttgtcttgtggccagcacgaacagaggctgcagagcgatcagtcttggtggaggtgccagcagccgggtccttgcagatgggatgagccgaggcccagtggtgcgtcttcctcgtgcttgtgactcagcagaggtgaagagctggcttgaaacacctgaagggtttgcagtggtaaaggaggccttcgacagcacgagcagatttgcacgtctacagaaacttcacgtgacgctggcaggacgcaacctctacatccgtctccagtccaaaacgggggacgccatggggatgaacatgatttccaagggtacggagaaagcacttctgaagctgcaagagggcgtgccggagctgcagatactggcggtcagtggtaactattgcaccgacaagaaacctgctgccataaactggatcgaagggagaggaaagactgtggtttgtgaagctgtcattccagccaaggtggtgagagaagtattaaagacgactacggaagctatggttgacgtaaacattaacaagaatcttgtgggctctgccatggctggtagcataggaggctacaacctccatgctgccaacatcgtcactgccatctacattgcatgtggccaggatgcagcacagaatgtggggagttcaaactgtattacgttaatggaagcaagtggtcccacaaatgaagacttatacatcagctgtaccatgccgtctatagagatcggaaccgtgggtggtgggaccaaccttctacctcagcaagcctgcctgcagatgctaggtgttcaaggggcgtgcaaagacaatcctggagaaaatgcacggcagcttgcacgaattgtgtgtggcactgtgatggctggtgagttgtccttgatggcagcattggcagcaggacatcttgtcagaagtcacatggttcacaacagatcaaagataaatttacaagatctgcaaggaacatgcaccaagaaggcagcttga

SEQ ID NO: 3227 - DNA, 1500 bp, Rattus norvegicus
  Genbank Accession No. NM_013144
cgccgagcacaaacccagcgagcattgaacactgcacacggccatctgcccagagagctgtgaccaccacttccgctactatctactcagaaagtcgtgactactgagccactgctgcctgcccagattctcatccaccgcctgctgcgtctggttgcgatgccggagttcctaactgttgtttcttggccgttcctgatcctcctgtccttccaggttcgcgtagtcgctggagccccccagccatggcactgtgctccctgcactgctgagaggctggagctctgtccacccgtgcctgcttcgtgccccgagatttctcggcctgcgggctgtggctgctgcccgacatgtgccttgccactgggtgctgcctgtggtgtggccactgcgcgctgcgctcagggactcagctgccgtgcgctgccaggggagcctcgacctctgcatgccctcacccgtggccagggagcctgtgtactagaacctgccgcacccgccacgagcagcttgtccggttctcagcatgaagaggcaaaggctgctgtggcctctgaggatgagcttgccgagagcccagagatgacagaggaacagctgctggatagcttccacctcatggccccatcccgtgaggaccagcccatcctgtggaatgccattagcacctacagcagcatgcgggcccgggagatcactgacctcaagaaatggaaggagccctgccaacgggaactctataaagtgttagagagattagctgccgctcaacagaaagcaggagatgagatctacaaattttatctgccaaactgcaacaagaatggattttatcacagcaaacagtgcgagacatctctggatggagaagctgggctctgctggtgtgtctacccatggagtgggaagaagatccctggatctctggagaccagaggggaccccaactgccaccagtattttaatgtgcaaaactgaaagttgtttcctccctccttcttcacacaaaatatttaagtatatagtgtatttatactccggagcacaccattttatatatgtgtatatgtatatatccaggaactagtttttatactccacatgctgcttgatgtacaagtgggtttgtatttattcactctaagtttatttttttctaccctgtccttgtgctgtattaatttatataactgaagcttttctcatctccatacatgtaaatactaccatctcagctcttccagagttctgctttgaaagggcagcgcggtagtgcctagaacgagcacaagtcagtctgaggtaggggcctttcagtgggttcagggaggaaggttagccctggctcggggagacttcctcatcgaatcccacaggtctgtgtctgatgcctattggctgggaaggttccgatgttggttgtgtaatcaaagctaaacgtggaaagctgcgtcccatgcactgttaaacacacgtctggaataaaacattctacctgga

SEQ ID NO: 3228 - DNA, 1200 bp, Rattus norvegicus
  Genbank Accession No. NM_013154
catgagcgccgctcttttcagcctagacagcccagcacgcggcgcaccctggcccacagagcccgcggccttctacgagccaggcagggtgggcaagccaggacgagggccggagcctggggatctgggggagccgggctccacgacccctgccatgtatgacgacgagagcgccatcgacttcagcgcctacattgattccatggctgccgtgcccaccctagagttgtgccacgacgagatcttcgccgacctcttcaacagcaatcacaaagcggccggcgcgggcagcctggagctgctgcagggcggccctacgcgacccccgggtgtggggtcaatcgccaggggcccgctgaagcgcgaacccgactggggcgacggcgacgcgccgggctccctgctgccggcgcaagtggcagtgtgcgcgcagacagtggtgagcttggcggccgcggcacagcccacaccacccacttcgcccgagcctcctcgaggcagccctggaccgagccttgcgcctggccccgtccgagagaagggcgccggcaagaggggtccggaccggggcagccctgagtaccggcagcgacgcgagcgcaacaacatcgctgtgcgcaagagccgggacaaggccaagcgccgcaaccaggagatgcagcagaagctggtggagctgtcggccgagaacgagaagctgcatcagcgtgtggagcagctcacccgggacctggccagcctccggcagttcttcaaagagctgcccagcccgcctttcctgccgcccaccggcaccgactgccggtaacgcgcggtgtgggccttagagactccgaacgaccgatacctcagaccccgacggcggggagcagacgccgcccgaattgctacagtttcttgggcactggactgcgagagaagctatatgaatcccccttaaattatttttttataatggtagcgttttctacgtcttattaccattgcagctaaggtacattgtagaaaagacttttccgacagacttttgtagataagaggaagagactgcgcatgctttttatattcatttttacagtatttgtaagaataaagaagcatttaaattgcaaaaaaaaagaggcaccagctctgactggcctctttctaggctacggtgatcctgagcatcttttgttacctgctggtagaaatgatcct

SEQ ID NO: 3229 - DNA, 1386 bp, Rattus norvegicus
  Genbank Accession No. NM_013156
aattccgcggcgacctccggggatccgagtttgcagactacgtgtgtgcgcagctagccacctcaggtgtttgaaccatgacccctttactcctcctggctgtcctctgcttgggaacagccttagccactccaaaatttgatcaaacgtttaatgcacagtggcaccagtggaagtccacacacagaagactgtatggcacgaatgaggaagagtggaggagagcagtgtgggagaagaacatgaggatgatccagctacacaatggggagtacagcaacgggaagcacggctttaccatggagatgaacgccttcggtgacatgaccaatgaggaattcaggcagatagtgaatggctatcgccaccagaagcacaagaagggaaggttatttcaggaacctctgatgctgcagatccccaagactgtggactggagagaaaagggttgtgtgactcctgtgaagaatcagggccagtgtggttcttgctgggcttttagcgcatcgggttgcctagaaggacagatgttccttaagactggcaaactgatctcactgagtgaacagaaccttgtggactgttctcacgatcaaggcaatcagggctgtaatggaggcctgatggattttgctttccagtacattaaggaaaatggaggtctggactcagaggagtcttatccctatgaagcaaaggatggatcttgtaaatacagagctgagtatgctgtggctaacgacacagggtttgtggatatccctcagcaagagaaagccctcatgaagcctgtagcgacggtggggcctatttctgttgccatggatgcaagccatccgtctctccagttctatagttcaggtatctactatgaacccaactgtagcagcaaggacctcgaccatggggttctggtggttggctatggttatgaaggaacagattcaaataaggataaatactggcttgtcaaaaacagctggggtaaagaatggggtatggatggctacatcaaaatagccaaagaccggaacaaccactgcggacttgccaccgcagccagctatcctatcgtgaattgatggacagcgataataaggactgacggacactacatccgaaggagttcatcttaaaactgaccaaacccgtctctgagtgagaccatggtacttgaatcgttcaggatccaagtcacgatttaaattctgttgacatttttacatgggttaaatgttaccactacttaaaactcctgttataaacagctttataatattggacacttaatgcttaattctgattctggaatatttgttttataaaagttgtataaaactttctttaccttttaaaaataaattttagctcagtgcaaaaaaaaaa

SEQ ID NO: 3230 - DNA, 2325 bp, Rattus norvegicus
  Genbank Accession No. NM_013177
tttttttttaggagcccgcgcctcggtttcagcggacgcttcccctgatctccgttctaccaccatccactgccgtcttaccacccaccatggccctcctgcactccggtcgcgtcctctccgggatggctgctgcctttcacccaggccttgcagccgcagcctctgccagagccagctcctggtggacccatgttgaaatgggacctccagatcccatcctgggagtgaccgaagccttcaagagagataccaacagcaagaagatgaacctgggagttggtgcctaccgggacgataacggaaagccttacgtgctccccagtgttcggaaggcagaggcccagattgctgggaaaaatttggacaaagaatacctacccatcgggggactggctgatttttgtaaggcttctgcagaactggccctgggcgagaacagcgaagtgttgaaaagcggccggtttgtaactgtgcagaccatttccgggactggagccttgagggtcggagccagctttctgcaaagattttttaagttcagccgagatgtctttctgcccaaaccatcctggggaaaccacacgcccatcttcagggatgccggcatgcagctgcaaggttatcgatactatgaccccaagacttgcggctttgacttctctggagccttagaagacatatcaaaaatcccagagcagagtgttctccttctgcacgcctgcgctcacaaccccacgggcgtggacccgcgtccagagcagtggaaggaaatggcggcggtggtgaagaaaaagaatctcttcgcattctttgacatggcctaccaaggctttgccagcggcgatggtgataaggacgcctgggccgtgcggcacttcatcgagcagggcatcaatgtctgcctctgccaatcctatgccaagaacatgggcctgtacggtgagcgtgtgggagccttcactgtggtctgcaaagatgcagaagaagccaaaagggtggagtcacagctgaagatcctgatccgccccttgtattccaacccgcctctcaatggagcccggatcgccgcaaccatcctgacttctccagacttgcggaagcaatggttgcaggaggtgaaaggcatggctgaccgcatcatcagcatgaggacccagttggtctccaacctgaagaaagagggctcgtcccacaactggcagcacatcaccgaccagatcggcatgttctgcttcaccggcctaaagcctgagcaggtggagcggctgaccaaggagttctcagtctacatgacaaaggatggtcgaatctctgtggccggggtcacctctggcaatgtgggctacctggcccacgccattcaccaggtcaccaagtaatcaccaggtgcaaggaaacagagatcactttcccttcagcctttgctctcatgagagtcacgtgcagggtgagggagggtggatggtgttgagtagatcctgttttcaaccacggtgcataactcctgtcgattgaacgcgttcctcggaaaagaggtagggcagaggctcccacggctgatatctggaacttcgtcggctctaaaccaaactctccctcatccttttgtctccagcttttctgaaagtttacacatgcaaaaaaatcacagcaccaaaacctgtcagcatggcataggcacaggtcagaagctttacctgaagcctcaggtggtgtcaggggttcccctgtggaccccggtagagcctctcatattagaggctgtaagagaagaataactagttctgtcattaacagttgtcgagtgtgtcctcgtggtgtggagcaactgtgtcagcagaccacattatggaaattatgctttacaaaaaccaacagggacagtagaagatgtaatgtcttgtcatggctgttctgtagcctggagtttcatcccattctactgctcggttgaccatcaacctcatccttaggagtgatctaagaataaagaatgtagtttttctgttcatgccataaccttctgtctcagcaaagagccggggagagtgggaccctgcccttgatttcagagtcctcttcagtgattgattggctcctacgggggtggggcctctgcccagctggacgtcctcattcatcctgactgcagcctgtcttcacatgagtcagacatgcagggtaggatcggaaggagctattctggggtttgtatgctaccagcccggctcagactcagcccttgggaaagataaccaccatctgctctaaccgtgtagacgtacctggttttctctgttacaataaaattactacagaccc

SEQ ID NO: 3231 - DNA, 1911 bp, Rattus norvegicus
  Genbank Accession No. NM_013185
gaattccggtcgccggtaaaggcggctctgacccgctcggagcgccaacgcagcctccgtagcccgcaagtcttcgtcgcttgctccgggctctcgagtccgggccaccaggggcgcgcgctggggggtcgttcgagctgcgaggatccgggctgcccgcgaggcgaagggcgggtgcccaggatgggatgtgtgaagtccaggttcctccgagaaggaagcaaggcctcaaaaatagagccaaatgccaaccagaaaggccctgtgtatgtgccggatcccacgtcccctaagaagctgggaccgaacagcatcaacagcctgcccccggggttcgtggagggctctgaggacaccattgtggtcgcactgtacgactatgaggccattcaccgtgaagacctcagcttccagaagggagaccagatggtggttctggaggagtctggggagtggtggaaggcccgttccctggctaccaagaaagaaggctatatcccaagcaattatgtagctcgagttaactctttggagactgaggagtggttcttcaagggtatcagccggaaggatgcagagcgccacctgctggctcccgggaacatgctgggctccttcatgatccgggacagtgagaccaccaaagggagctactcactttctgttcgagactttgacccccagcacggagacacggtgaagcattataaaatccggacactggacagtggagggttctacatctctccgaggagcaccttcagcagcctgcaggaacttgtcgtccactacaagaaggggaaggatgggctctgccagaagctgtcagtgccctgtgtgtctccgaaaccccagaagccatgggagaaagatgcctgggagattcctcgagaatccctgcagatggagaagaaactgggagccgggcagtttggagaagtgtggatggccacctacaacaagcacaccaaagtggcggtgaagacaatgaagccagggagcatgtctgtggaggccttcctggcagaggccaacctgatgaagacgttacagcatgataaactggtgaagctacacgctgtggtctctcaggagcccatctttattgtcaccgagttcatggccaaaggaagcctgctggactttctcaagagtgaagaaggcagcaagcagccactgccaaaactcattgacttctcagcccagatttcagagggcatggctttcattgagcagaggaactacatccaccgagacctccgggctgccaacatcttggtttctgcatcactggtgtgtaagatcgctgactttggactggcacggatcatcgaggacaatgagtacacagctcgggaaggagccaagttccccatcaagtggacagctcctgaagccatcaactttggctccttcaccatcaagtcagatgtctggtcctttggtatcctgctgatggaaatcgtcacctacggccggatcccttacccaggtatgtcaaacccagaggtgattcgagcactagagcatgggtaccgtatgcctcgaccagataactgcccagaggagctctacagtatcatgatccgctgctggaagaaccgtccagaggaacggcccactttcgaatacatccagagcgtgctggatgacttctacacggccactgagagccagtatcagcagcaaccttgatgggccggaagaacatgagcacagccagaagccccatcagggccttgacatgctcgacctgctgggcccactctcagacgccccctcccccacattccagctgtcgagtggagggagaggacttcacaatctctttttgactctagtcatctgcaatctgccattctcagggcctccaagttagtgtttctcatttgcctggaatgaactgaattc

SEQ ID NO: 3232 - DNA, 1899 bp, Rattus norvegicus
  Genbank Accession No. NM_013197
gactttgggctcaggatggtggcagcagctatgttgctacggtcctgtccagtgctctctaagggccccacaggcctcctaggcaaagtggctaaaacttaccagttcctatttggtattggacgctgccccatcctggccactcaaggaccaacctgttctcaaatccatcttaaggcaaccaaggctggagcagactctccgtcttggactaagagccattgtcctttcatgctgtcagaactccaagacaggaagagcaagattgtgcagagggcagctccagaagtccaagaggatgtcaagactttcaagacagacctgctgagcttcatggagtcaactacccgaagccaatcagtgcctcgtttccaggatccagagcagactggaggggcacctcccctgctgattcagaataatatgactggaagccaggcttttggttatgaccaattttttagagacaagatcatggaaaagaagcaggaccacacataccgtgtgttcaagactgtgaatcgctgggctaatgcctacccctttgcccaacacttctccgaggcatctatggactcaaaggatgtttctgtctggtgcagtaatgactatttgggcataagcaggcaccctcgtgtcttgcaggccatagaggagaccctgaagaatcatggagctggagctgggggcactcgcaatatctcaggtacaagcaagtttcatgtggagcttgaacaggagctggctgaactacatcataaggactcggctctgctcttctcctcctgttttgtggccaatgattctactctctttacactggccaagcttctgccagggtgtgagatctactcagacgcaggcaatcatgcctccatgatccaaggcattcgtaacagtggtgcagtcaagtttgtcttcagacacaatgacccaggccacctgaagaaacttcttgagaagtccgatcccaagacaccaaaaattgtggcttttgagactgttcactccatggatggtgccatctgtcctctggaggaattgtgtgatgtggcccaccagtacggggccctgaccttcgtggatgaagtccatgccgtaggactatatggaacccggggtgcagggatcggggagcgtgatggaattatgcacaagcttgacatcatctctggaactcttggcaaggcctttggctgtgtcggtggctatatcgccagcactcgggacttggtggacatggtgcgctcctacgctgcaggcttcatctttaccacttcactgcctcccatggtgctctctggagctctagagtctgtgcgtctactcaagggagaggagggtcaagccctgaggcgtgcacaccagcgcaacgtcaaacatatgcgccagctactaatggacaggggctttcctgttatcccctgtcccagccacatcatccccataagggtgggtaatgcggcactcaacagcaagatctgtgatcttctgctcgccaagcacagcatctatgtgcaggccatcaactacccaactgtgcctcgtggtgaggagctgctgcgcttggccccctccccccaccacagccctcagatgatggaaaactttgtggagaagttgctgctggcctggactgaggtggggttgcccctccaagatgtgtctgtggctgcatgcaacttctgccgtcgtcctgtgcactttgagcttatgagcgagtgggagcgatcctactttgggaacatgggaccccaatatgttactacctatgcctaaggagccagctgccttagatgccaaccccacctgcactccccctggggatggtcttcctcctactctctgctttgctgtgtgcttctagctgacttgattctaaaaataaagagcaacctg

SEQ ID NO: 3233 - DNA, 2389 bp, Rattus norvegicus
  Genbank Accession No. NM_013198
gtctcaggcagaggtccagactcagtggaagcagaggagagagcctgaaacctggcgagcaccatgagcaacaaatgcgatgtgatcgtggtggggggcggcatctcaggtatggcagcagccaaacttttgcatgactgtggcctcagtgtggtggttctggaagcacgagactgtgtgggaggcaggacttacacaattaggaataaaaatgttaaatatgtggaccttggaggatcttatgttgggccgacccagaatcgtatcttacgattggccaaagagctaggattggagacctataaagtgaatgaagttgagcggctgatccactttgtaaagggaaaatcatatgccttcaggggcccattcccaccagtgtggaatccaatcacttacctagattataacaacctctggagaacaatggatgagatgggccaagagattcccagtgatgctccatggaaggcaccccttgctgaagagtgggactacatgacaatgaaagagttgctagataagatctgctggaccaactctacaaagcagattgccacactctttgtgaacctatgtgtaactgcggagacccatgaggtttctgcactgtggttcctgtggtatgtgaagcagtgtgggggtacaaccagaatcatatcaacaaccaatggaggacaggagaggaaatttattggtggatctggtcaagtgagtgagcggataaaggatatccttggggacagagtgaagctggagaggccggtgatccacattgaccagacaggagaaaatgttgttgtgaaaaccctaaaccatgaaatatatgaggctaaatatgtgattagtgccatcccacctgttttgggcatgaagattcaccatagtcctcctctgcccattctaagaaaccagctgattactcgtgtgcctttgggttcagttattaagtgcatggtttattataaagaacccttctggaggaaaaaggatttctgtggaaccatggttattgaaggagaggaagctccaattgcgtacacattggatgataccaagccagatgcaggctgtgctgctataatgggatttatccttgctcacaaagctagaaaactggtacgccttactaaagaagaaagactgaggaagctctgtgagctatacgcgaaagttctgaactctcaagaagctctgcagccagtccattatgaagagaagaactggtgtgaggagcagtactccgggggctgctacacagcctacttccctcctggcatcttgacccagtatggaagggttctacgccagccagtgggcaagattttctttgcaggcaccgagacagcttcacattggagtggctacatggagggggctgtagaggctggagagagagctgccagagagattcttcatgccattgggaagattccagaggatgaaatttggcagccagaaccagaatctgtggatgtcccagcaagacccattaccaacaccttcctggagagacacttgccttctgtaccaggtctactaaagctgcttggattgaccaccatcttgtcagcaacagctcttggtttcctggcccacaaaaagggtctgtttgtacgtttctaaagatgggctttaggaccatatccacaggtttctcattcagtgtgtcacaaaagcttttggaaggagttgggataaaaatctgacaaaggtgcagagattatggagtgagaaagcacagtaacttggtctccattttggctatcttttagcatcgctgtggtccactcattttcaactttcctgcactctgaatattgagaacagatacacaggctctctcacaacctacctgccctatgcacatagttgtttttcaaaaccctatgcctttgtgcttgtctttcttctggtgtgttaggtcctcacctatatcaagttcttcatcattgtacctagaatcctgtcttgttagaaccagaaggcattagacactgtagcttattgtctactttagagttaaataaaccaaatgcaacagaagtgaaatctaaccacacaaggcctacacaaagctactggtatttgggtgactggaacacaagctgatgcttttctcacctcccaaggttcattcccctgtgatcctcctccaccttatgtcatagtcattcacggatcattgttcttgtggatttactctgtattaactggtattgtgttactcagtagattcttctaggcttgctattttgtgtagtgttgccagctgattctaatttttcttgagaatgggagtcttgtctttgtcatttcttttttgcatcttccagtatgcttccactcatagatttaagacatgcttaaataattaaaaataaagctg

SEQ ID NO: 3234 - DNA, 2826 bp, Rattus norvegicus
  Genbank Accession No. NM_013200
gacagaagcaaacctgagctgtgctgactaaaccccaggatggcggaagcacaccaggcagtagctttccagttcactgtgaccccagacggggtcgacttccggcttagtcgggaggctctgagacacatctacctgtctggaatcaactcctggaagaaacgccttattcgaatcaagaatggtatccttaggggtgtgtaccctggcagccctaccagctggctggttgttgtcatggcaacagttggttccaactactgcaaagtggacatctccatggggctggtccattgcatccagagatgcctcccgacaaggtatggctcctacgggaccccacagaccgagacacttctcagtatggtcatcttctccaccggagtctgggcgacaggcatttttttattccgacaaaccctgaagctgctgctttcctatcatgggtggatgttcgagatgcacagcaagaccagccatgccaccaagatctgggctatctgtgttcgtctcctgtccagccggcggcccatgctctatagcttccaaacatcactgcccaagcttcctgtccccagtgtgccagccacaattcaccggtacttggattctgtgcggcccttgctggatgacgaagcctatttccgcatggagtcgttggccaaagaattccaggacaagattgcccccagactgcagaaatacctggtgctgaagtcatggtgggcaaccaactatgtaagtgactggtgggaagagtacgtctacctccgaggcaggagccccatcatggtggacagcaactattacgccatggattttgtgcttattaagaacacgagccaacaagcagcacgtttgggaaacaccgttcacgccatgatcatgtatcgccgcaaactggaccgagaagagatcaagccggtgatggcactgggtatggtacccatgtgctcctaccagatggagaggatgttcaacactacacgcatcccaggcaaagagacagacttgctacagcacctctcagagagcaggcacgtggctgtctaccacaaaggtcgcttcttcaaggtttggctctatgagggctcgtgcctgctcaagccccgagacctcgagatgcagttccagagaatcctcgatgacacctccccgcctcagcctggagaggaaaagctggcagccctcaccgcaggaggaagggtagagtgggcagaagcacgtcagaagttctttagctctggcaagaacaagatgtccctggataccatcgaacgtgctgctttctttgtggccctggacgaagactctcactgttacaaccctgatgacgaggccagtctcagcctctacggcaaatccctgctgcacggcaactgctataacaggtggttcgacaaatctttcactctcatctcctgcaagaatggccagctgggcctcaacacagaacactcatgggcagatgctcccatcatcggtcacctctgggagttcgtcctggccactgatacctttcacctgggctacacggagacaggacactgtgtgggtgaacccaacaccaagttgccgccgcctcagcggatgcagtgggacattcccgagcagtgccagacagccatcgagaattcgtaccaagtagccaaggccctggctgatgatgtggagttatactgcttccagttcttacccttcggcaaaggcctgatcaagaagtgtcggaccagccctgatgcctttgtgcagattgccctgcagctggctcatttccgggacaaaggcaagttctgcctgacctatgaggcctccatgacaagaatgttccgagaggggcggacagagactgtgcgttcctgtactagcgagtccacggcctttgtgcgggccatgatgacggggtcccataaggaacaagacctccaagacctcttccggaaagcctccgaaaaacaccaaaacatgtaccgcctagccatgacaggggctgggatcgacaggcacctcttctgcctctacatcgtctccaagtacttaggggttaggtctcctttcctggacgaggtgctttcggaaccctggagcctctccaccagccagatcccccagttccagatctgcatgtttgacccaaagcagtaccccaatcatctgggtgctggaggtggctttggtcctgtggccgaccacggatacggggtttcctacatgatcgcaggcgaaaacacaatgttcttccatgtttccagcaagttatcgagttcagaaacgaacgccctgcgcttcgggaaccacatccgtcaagcactgttggatatcgccgaccttttcaaaatttccaagactgacagctgagaccaggagacacaccagctgccctttggtccccacctggtggaggaagaggtctgtggccagttcacaggcataaggggtggcatgcacacgtgcccagttctgagaccagctccagcgcaggggctccccaggcagacactgctcctccaggcccggtcgaggtgggattggagtggtgagggaactttgatctttttttttcccccggtcttggtagatgctaataaaaataaggctgtataattctctctcagcccttaggtgcctatgtttggttagagaactagaaggcctttcccctgcccctgctcaggttagggtggtggcgactgaagggccgggtgaatgttcataatggctttttacctgctttgaaatgtgtgcttttcctgaataatgcggacttcgagagtgctgtccaacctctcatgtgcacttggaataaattcttactttagaaccttt

SEQ ID NO: 3235 - DNA, 1523 bp, Rattus norvegicus
  Genbank Accession No. NM_013214
acttctacatcaagatccgtcctggggagtatgagcagttcgagagcaccatcggcttcaagctccctaaccttcaccttcattgcgccacggcggctttcggacgagcctctgactcgcgcacgcgttagactccttggtccgtgttacaagacgggtcgggtgggtagccgacatcgccgccgaccccgtgccgtcgcagccaagatgtccggtcccaccaccgacacgccggccgccatccagatctgccggatcatgcgtccggatgatgccaacgtggccggcaatgttcacggagggaccattctaaagatgatcgaggaggctggggtcatcatcagcacccggcactgtaacagccagaatggggagcgctgtgtggctgccctggcccgggtggagcgcactgacttcctgtcgcccatgtgcatcggtgaggtggctcacgtcagcgcagagatcacctatacttccaagcactctgtggaggtccaggtccacgtgttgtcggagaacatcctcacaggtaccaaaaagctgaccaataaggccaccttgtggtatgtgcccctgtcattgaagaatgtggacaaggtccttgaggtgcctcctattgtgtatttacggcaggaacaggaggaggagggtcggaaacgctatgaagcccagaagctagaacgcatggagaccaagtggaggaacggagacattgtccagcccatcctgaacccagagccgaacacagtgagctacagccagtccagcctgatccacctggtggggccctcagactgcactcttcatggcttcgtgcacggaggtgtcaccatgaagctcatggatgaggtggccgggattgtggctgcgcgccactgcaagaccaatatagtgactgcctctgtggatgctattaatttccatgacaagatccggaaaggctgtgtcatcaccatctctggacgcatgaccttcacaagcaataagtctatggaaattgaggtcctggtggacgctgaccctgtggtggacaactcacagaagcgctaccgggctgccagtgccttcttcacctacgtgtccctgaatcaggagggcaagccgctgcctgtgcctcagcttgtgccggagacggaggacgagaagaagcgttttgaagaaggcaaaggccgctatctgcagatgaaggcgaagcgacagggccatacagagcctcagccctagatgtcttcctccctcccatcctgtcccgtcctgggtcagcacagttgtggcagtagtcctgtgtgcagtcacttagaagtcgcccccttggccaaaccccgatttcctttgagagctggtgttgtgaagtaccgtgtgacagtgttacctgtggcctgttcccaaaacctgtgcaccaaagctttatttatatccctccagtccctgtcccatgttgtcccaaaggccatcgtggacaccagagcacactgactggcctggagaagccagcaccactaataaagctgctgtctggctgg

SEQ ID NO: 3236 - DNA, 1272 bp, Rattus norvegicus
  Genbank Accession No. NM_013215
gaattcgactgctggaaccaacgtcctctcttaccctccaccttcttctgccacctctaccacggtcaccatgtcgcaagcccggcctgccactgtgctgggtgccatggagatgggtcgccgcatggatgtgacctccagctccgcgtcggtgcgcgccttcctgcagcgcggccacacggagatagacaccgccttcgtgtatgcgaacggtcagtctgagaccatcctaggagacctggggctcggactgggccgcagcggctgcaaagtaaaaattgccaccaaggctgccccaatgtttgggaagacactgaagccagccgatgttcggttccagctggagacgtcactgaagaggctgcagtgtccccgggtggacctcttctatttacactttccagaccacggcactcctatagaggagaccctgcaggcctgccaccagctgcatcaggagggcaagtttgtggagcttggtctgtccaactatgtctcctgggaagtggctgagatttgtaccctctgcaagaaaaatggctggatcatgccaactgtgtaccagggcatgtacaacgccatcaccaggcaggtggagactgagctcttcccctgcctcagacacttcggactaaggttctacgccttcaaccctttggctgggggcctgctgactggcagatataaataccaggataaggatgggaagaatcctgagagccgcttctttgggaatccattttctcaactgtacatggaccgctactggaaggaggaacacttcaatggcatcgccttggtggagaaggctctgaagactacctatggccccactgcccccagtatgatctcagctgccgtacggtggatgtaccatcactcacagctcaagggcacccaaggggatgcagtcattctgggcatgtccagtctggaacaactggagcagaacttggccttggtcgaggaagggcctctggagccagctgttgtggatgcctttgaccaagcctggaacctagttgcccacgagtgtcccaactatttccgctaagatacatctgccttggggatggcgcagcttactgcctgccccgccttgtcctgggctcgatctgatctggttctttcctttttagacaggtcactgtctttttcttccctgctttctatacagccagttgctttcaaagtgagagctggctgagccccaatacctcctgctgaataaaactgttccctgtcacagcctgggctacaactggcggccga

SEQ ID NO: 3237 - DNA, 1088 bp, Rattus norvegicus
  Genbank Accession No. NM_013216
gcgcccgccgccgcgctctgtatgccgcgttcccccggcgcacccgccgccgatagtctgagccggaggagtcgccgccgctgcggttgatgtggttgggccggggctgaccaggctaccaagatgcctcagtccaagtcccggaagatcgccatcctgggctatcggtctgtgggaaagtcctcattgacaattcagtttgttgaaggtcaatttgttgattcctacgatccaaccatagaaaacacattcaccaagctgatcacagtaaatgggcaagagtatcatcttcagcttgtagacacagcagggcaggatgaatattccatttttcctcagacatactccatagatattaatggttatattcttgtgtattctgttacatcaatcaaaagctttgaagtaattaaagttatccacggcaagctgttggacatggtggggaaagtgcagataccgattatgttagtcggaaataagaaggacctgcatatggaaagggtgatcagttatgaagaaggaaaggctttggcagaatcttggaatgcagcttttttggaatcttctgcaaaagaaaatcagactgctgtggatgtttttagaaggataattttggaagcagaaaagattgacggagcggcttcacaagggaagtcttcgtgctcggtgatgtgacgcgcctgctgcagagcctgagtgtattccacctgaggaagcaagctgcctgtcatccttgaagataaaactaggcttctgttttcttctgttaacctgaacgatgtcatttgggtcagaggtcctcccctctcagattatgttaacgtctgactctgtccaaatgagttcacttccattttcaaattttaaacaatcatattttcaatttatatattgtatttcttaatattatgaccaagaattttatcggcattaatttttcagtgtagtttgttgtttaaaataatgtaatcatcaaaatgatacacgttacactactattagctaggcttcagtctatcagtgtttatctccttgtgttaaatgtatacttgtaaataaagtagctgcaaaccttaaaaaaaaaa

SEQ ID NO: 3238 - DNA, 5957 bp, Rattus norvegicus
  Genbank Accession No. NM_013217
cttgcacactgccgtggtttggaagaagcgaacactgaagacgctactgttgttaatgaccatcttcctgctgtcagggtaacctggtccctgacataaggagaccccaggcagggaacgtctccctagagggcagttccccttctggaaggcagaaagcgagcggctgaacgcccgggacacgcagcgggaccgggacagcatcgcggagccagcgggatggagggcgggaggacgcgcggcggctgcggcggcggcggtggtggtggtgaggcggcctgaggtgttccggcccagcgggtcgcggagaggagccgccgcgatcatgtcggcgggcggccgcgacgaagagcggcggaagctggccgacatcattcaccactggaacgccaaccggctggacctgttcgagatcagccagccgaccgaggatttggagtttcatggagtcatgagattttattttcaagataaagctgctggaaactttgcaacaaaatgtattcgggtctctagcacagcaaccactcaagatgtcattgaaacactggcagagaagttccgccctgatatgcgcatgctctcctctcccaagtactccctctatgaagtgcatgtcagtggagaaagaagattggacattgatgagaaacctctagttgtacagttgaattggaacaaagatgatcgggagggtagattcgtccttaagaacgagaatgacgccattcctgccaagaaggctcagagtaatggacctgagaagcaggagaaagaaggtgttattcagaacttcaaaagaactctgtcaaagaaagaaaagaaggaaaaaaagaagagagagaaggaggctttgagacaagcctctgataaggaagaaaggccttctcaaggggatgacagtgagaattctcgtctggctgctgaagtttacaaagacatgcctgaaaccagctttactcgaacgatttctaatcctgaagttgttatgaaacggcggcggcagcaaaaactggagaagagaatgcaagagtttcggagctcagatgggcggcccgactcgggtggaacactgagaatctatgcagacagtttaaaaccaaatattccatacaagacaatcctgctgtctactacagatcctgcagactttgctgtagcagagtccttagagaagtatggtctggaaaaagagaaccccaaggactactgcattgctcgggttatgcttcctcctggagcccagcattctgatgagagaggtgctaaggaaataattcttgatgacgatgaatgccctttacaaatcttcagggaatggccaagtgacaaagggattttagtctttcagttgaagaggagaccaccggactacattccaaagaaaatgaagaaacatgttgaaggcaagccattgaaggggaaagatagagctgacgggtctggctacggctctgctcttcctcctgagaagctgccctacttagtagagctcagcccagggagaaggaatcactttgcctactacagctatcacacttacgaagatggctctgactccagagacaagccaaagttataccgccttcagttaagtgtgactgaagttgggacagagaagttcgatgacaattctattcagctgtttggtcctggaattcagccccatcactgtgatctcaccaacatggatggagtggtcactgtgacacccagaagtatggatgcagagacctatgtggatggtcagcgcatctcagagaccacaatgctacagagtggcatgagactgcagtttggcacctcgcatgtgtttaagtttgtggaccccatccaggaccacgttctttccaagagatctgtggatggaggcctgatggtcaagggcccaagacataaacctggagccgttcaagagacaacctttgaattgggaggagatatccacagtgggacagcattgccggcaagcaggagcactactagattggacagtgacagggtgtcctctgcctctagcacagctgagcgagggatggtgaagccaatgatccgactggaccaggagcaggactaccggcgaagagaaagcaggactcaggatgctgctgggcctgaactgatgctgcctgccagcattgaattccgggaaagctctgaagactcttttttatctgccattataaactataccaatagctctacagttcattttaagttgtcacctacatatgtgttatacatggcatgccggtatgtattgtccagccagcacaggcccgacatcagtcctacagagcggacacataaggccattgctgttgtgaacaagatggtgagcatgatggaaggggtcatccaggaagtagaccaggttgatcagaaacagaagaacattgcaggagcacttgctttctggatggcaaatgcatctgagcttctcaacttcatcaagcaggaccgagaccttagtcggattactctggatgcccaggatgttctagcacacttggttcagatggcatttaagtacttggttcactgccttcagtcagaacttaataactacatgccagcctttctggatgatcccgaggagaacagtctgcagagaccaaaaatagatgatgtgctgcatacgctcacaggagccatgtccttgttgcggcgctgcagagtcaatgccgccttgaccatccagctgttctctcagcttttccacttcatcaatatgtggctattcaacagactggtgactgacccagattcaggcctgtgttcccactactggggcgcaattatccgccagcagctggggcatattgaagcttgggcagagaagcagggactagagttggcagctgactgtcacttgagcaggatcgtgcaggctactacgttgcttacaatggataagtatgtacctgatgacattccaaatataaacagcacatgctttaagttaaattctctgcagcttcaagccctcttacagaattaccactgtgcacctgatgagccttttattcctacggatctcatagaaaatgtcgtggctgttgctgagaacacagctgatgagcttgcccgcagtgatggcagagatgtgcagttagaggaggaccctgatctacaactgccctttcttctgccagaagatggctattcctgtgatgttgtcagaaacattccaaatggtttacaagaatttttagaccctctgtgccagagaggattttgcaggttggttcctcacacacgttctccaggtacctggacaatatattttgaaggagcagattatgaaagtcacctcatgcgtgagaacacagaactgacccagcctctgaggaaggagcctgaggtaatcactgtgaccctgaagaagcagaatggaatgggcctcagcattgttgcagcaaagggtgctggccaggataaactgggaatctacgttaagtccgttgtcaaaggaggtgctgcagatgtggatggacgcctagctgctggtgaccaactccttagtgtggatggacgaagtctggttggactttctcaggaaagggcagcagaactcatgacaagaaccagttccgtggtaacactggaagttgcaaagcaaggcgctatctatcacggactggccactctccttaaccagccatcacccatgatgcagagaatttcagatcgtcgtggctcaggtaaacccagaccaaagagcgaaggttttgagctctataataattcagctcaaaacggctccccagagagtcctcagatgccttggacagagtacagtgagccaaagaagctgcctggtgacgacaggctgatgaaaaacagagctgaccaccgttccagccccaatgtggcaaatcagccccctagtcctggagggaagagtccatatacctctggaacagcagctaaaataacatctgtctctactggaaacctctgcactgaggagcagacccctccacctagacctgaagcctatcctatccctactcagacatataccagagagtattttacctttccagcttcaaagtcgcaggatcggatggctcctgttcaaaaccagtggccaaattatgaggaaaaaccacacatgcacacagaaagtgatcatgccagtattgcaatccagcgtgttacccgttcccaggaagagcttcgggaagagaaggtttaccaacttgagcgtcatcgagtagagtcaggcatggatcgcaagtgtgacagtgatatgtggatcaatcagagctcctcagtggaatctagcacgtctagccaggagcacctgaaccattcctccaagtcagttacccctgcttccactctgaccaagagtggtcctggtcgttggaaaaccccagcagctgtgctccccacccctgtggctgtctcccaacccattcgaacagacctccctccaccaccacctccaccacctgcccactacaccagtgattttgatggtatttcaatggatttgcccctcccacctcctcctgccaaccaagcagctccccagtctgctcaggtggctgctgcagagaggaaaaagagagaggagcatcagaggtggtatgaaaaagagaaggcccgcctggaggaggaacgagagagaaagcgcagggagcaagagaggaagttggggcagatgcgcactcagtccctgaaccctgcttccttctctcctttggccacacaggccaagccagaaaagccttccacactgcagaggccccaagaaacggtcattcgggagctgcagccccagcagcagccccgtactattgagcgcagggatctgcagtacataaccatcagtaaagaggagctgtcctctggggatagtctgtctccagacccatggaaacgagatgccagggagaagctggagaagcaacagcaaatgcacattgtagacatgctaagcaaggagatccatgagctgcaaaacaagggggaccgtactgcagaggagagtgaccgcctgcggaagcttatgctggagtggcagttccagaagagactacaggagtccaagcagaaggatgaggatgatgatgaagaggaagatgatgatgttgacaccatgctgatcatgcagcgactggaggcggagcggagagccaggttgcaggatgaagagcgcaggcgccagcaacagttggaagagatgcgcaaacgagaagttgaagacagagtaagacaagaggaagatggacgccatcaggaggaggagcgagtaaagagagatgctgaagaaaagaggcgacaggaagaagggtattacagccgcctagaagctgagaggcgcagacagcatgaagaggcagcacgcaggttgctggagcccgaagaacccgggctgagccgacctccacttccacaggactacgagcccccatcccagtcctcagcacccagtgcccctcctcccccacctcagcgaaatgcctcctacctcaaaacacaggtcctctccccagactcgctgttcactgccaagtttgttgcgtatgatgatgatgatgaggaggagaactacgtcccagcaggaccaaactcttattcgggatctgctggcacaactgctggaacttatgatgctcctcgggacacaagagaaaaactcagtagaagccaagatgcagacttacctggcagttctggagcccctgaaaacctgacatttagagagcgtcagcgcctcttttcacaaggtcaagatgtgtcagacaaagtgaaagcttctcgtaaattaacagagcttgagaatgaactcaacaccaagtgagaagagagaggtcacctgtactcaagcaggtctgaccttggcagtggatttgtggggtgggcctgaagaggaaggaacaattgtacttctaagtgatgtttaatttctttctgaaatggttgcaattgagagatgttccaaa

SEQ ID NO: 3239 - DNA, 1061 bp, Rattus norvegicus
  Genbank Accession No. NM_013218
ggccaggccaggccgcagttcagcgtctgcgcacgttcggccaccgttgccaccatgggggcatcggggcggctgctgcgcgccgtgatcatgggggccccgggctccggtaagggcactgggtcgtcacgcatcaccaaacacttcgagctgaagcacctctccagcggggacctgctccgccagaacatgctgcagggcacagaaatcgctgtgttggccaagagcttcattgaccaaggaaagctcatcccggatgatgacatgactcggctggccctccatgagctgaaaaaccttacccagtgtagctggctgttggacggatttccaaggacacttccacaggcagaagccctggatagagtttatcagatagacacagtgataaatctcaacgtgccctttgaggtcattaaactacgccttactgctcgctggattcatcctgccagtggccgagtttacaacattgaattcaaccctcccaagactgtgggcatcgatgacctaacgggagaacctctgattcagcgtgaggacgacaaaccagagacggtgatcaagagattgaaagcgtatgaagcccagacagagccggtcctgcagtattaccagaaaaaaggggtgttggaaacattctccggaacagaaaccaacaagatcaggccccacgtatactccttcctgcaaatgaaagttccagaaaccatccaaaaagcctctgttactccctgaggaaggcacttggcgggatgaagcagggcctcctccactcctcccctcgcctctgtatttcgaagctgttttcctaagacttctctgaaaattatgatttaagtcctaatggccttgcctaatgagtcagaaactaaggctgaccgtgtgtttatgtasgttgtccttccatggatgtgcaattgaaaacgtcagacatgttgaaacaaacaaactcagagcacaattaagagagcaactggtggggttggggatttagctcagtggtagagcgcttgcctaggaagtacaaggccctgggttcggtccccagctccgaaaaa

SEQ ID NO: 3240 - DNA, 1866 bp, Rattus norvegicus
  Genbank Accession No. NM_016986
agagccaacagagcaggaaggcatcatggcagcagcgctccgcagaggctacaaggtcctgagaagtgtctctcattttgagtgtcgagcacaacacacaaaaccatctctcaagcaggagccgggactagggtttagcttcgagttgacggagcagcagaaagagtttcaaacaattgctcggaagtttgccagagaggaaataatcccggtcgccccagactacgataaaagcggggaatacccgttccctctcatcaagagagcctgggaacttgggttgatcaacacacacattccggagagttgtggtggtcttggcctgggaacttttgatgcgtgtttaattacggaagagttggcatatgggtgtacaggggtgcagactgctattgaagcaaattctttggggcaaatgcctgtgattattgctggaaatgatcaacagaagaagaagtatttggggaggatgacggagcagccgatgatgtgtgcctactgcgtgacagaaccctcagcaggctctgatgtggcgggcattaagaccaaagcagagaagaagggtgatgaatatgtcatcaatggccagaagatgtggataaccaacgggggaaaggccaactggtattttgtattgacgcgatctaacccagatcctaaagtacctgctagtaaagccttcaccggattcatcgtggaggccgacaccccgggaatacacatcggaaaaaaggaactaaacatgggtcagcggtgctctgacaccagaggaatcaccttcgaagatgtcagagtgcctaaggaaaatgtgttaattggtgaaggagcaggtttcaagattgcaatgggggcttttgatagaaccaggccgacggtcgcagctggtgctgtcgggctagcccagagagccctggacgaagctactaagtatgccctggacaggaaaacatttggaaagctgctagtggagcaccaaggagtttcatttctgctcgcagaaatggcgatgaaagttgaactggccagactcagttaccagcgagcagcctgggaggttgactccggccgccggaacacgtactttgcctctattgcgaaggcctttgctggagatattgccaaccagctcgctaccgatgctgtgcagattttcggaggctatggattcaacactgagtacccagtagaaaagctgatgcgggacgccaagatctatcagatttacgaaggtactgcacaaattcagaggctgatcatagctcgtgagcacattgaaaagtataaaaattaacagaaattactatcgaacgatgcttcaccctcatgtaactacgctcagagcactgttgctgcttcagggggaaagggctttacttgtcttcccacagaaatgagataaaagacgcgtgtcacagatctgtgcaatggggtcccacggcggagggtgcctctgttgagttccacagtgaccctttctagataggtttggttttggacagtgagtggtcagtccttggccccgaattgtgttaatttgctccttgatcacttgagatggagaaataccctggagttctaatgctcattcaagtgacaagaaaggtagcctgtcacgaaagaactcaggattctacacagacactgaggaatgtggcggattggacccatcacactgtgaagagagagcatttctgtgctgagctgtttcataattttgattatatttcccttgtattgcagaagagtaaaaaagtttatatgcattttctcccattataaaactaaaaactttctggaaaatcttaattctgaactggcattttatttgtcttgattacaatgattcaataaagctagccttaactt

SEQ ID NO: 3241 - DNA, 4269 bp, Rattus norvegicus
  Genbank Accession No. NM_016987
taagctggtgcttacggacagagagccacactcgggctttctcgaagaggtaaaccaggtccctctgcagccatgtcagccaaggcaatttcagagcagaccggcaaagaactcctttacaagtacatctgtaccacctcagccatccagaaccggttcaagtatgcccgggttactcccgacacagactgggcccatctcctgcaggaccacccctggctgcttagccagagcttggtagtcaagccggaccagctgatcaaacgtcgaggaaagcttggtctagtcggggtcaacctctctctggatggagtcaaatcctggctgaaacctcgactgggacatgaggccaccgtcggcaaggccaaaggcttcctcaagaactttctgattgagcccttcgtcccccacagtcaggcggaggagttctacgtgtgcatctatgctacccgggaaggagactacgtcctgttccaccatgaagggggtgtggatgtgggcgatgtggacaccaaagcccagaagctgcttgtgggtgtggacgagaaactgaacgctgaagacattaagagacacctgttggtccacgcccccgaagacaagaaagaaatcctggccagcttcatctccggcctattcaatttctacgaagatctttacttcacctaccttgagatcaacccccttgtggtgaccaaagatggtgtctacatccttgacctggcggccaaggtggacgccactgctgactacatctgcaaagtcaagtggggtgatatagagttccctcccccctttgggcgtgaggcatacccagaggaagcctacattgcagacctggatgccaaaagtggggcgagcttgaagctgaccttgctgaaccccaaggggcggatctggaccatggttgccgggggtggcgcctctgtcgtgtacagtgataccatctgtgatcttggaggtgtcaacgaactggcgaattacggggagtactctggtgcccccagtgaacaacagacctatgactacgccaagaccatcctctcacttatgactcgagagaagcacccggatggcaagatcctcatcattggaggcagcattgcaaacttcaccaacgtggccgccaccttcaagggcattgtgagagcaattcgagattaccagggttccctgaaggagcacgaggtcaccatctttgttcgaagaggtggcccgaactatcaagagggattacgagtgatgggagaagttgggaagaccactggaatccccatccatgtctttggcacagaaactcacatgacggccattgtgggcatggcctgggcaccggccattcccaaccagccacccacagcggctcacactgccaacttcctccttaatgccagtgggagcacatcgacaccagcacccagcaggacagcgtctttttccgagtccagagctgacgaggtggcccctgcaaagaaagccaagccagccatgccccaagattcagtcccaagtccaagatccctgcaaggaaagagtgccaccctcttcagccgacataccaaggctatcgtatggggcatgcagacccgggctgtgcaaggcatgctggactttgactacgtgtgctcccgagatgagccttcagtggctgctatggtctacccgttcacgggggatcataagcagaagttttactggggacacaaggaaatcctgatccctgtcttcaagaacatggctgacgccatgaaaaagcatccggaggtagacgtgctgatcaactttgcatctctgcgatcggcttatgacagcaccatggagaccatgaactatgcacagatccggaccatagccatcatagcagaaggcatccctgaggctctcacacggaagctcatcaagaaggcagaccagaagggcgtgaccatcattgggccagccacggttgggggcatcaagcctggatgctttaagattgggaatactggtgggatgctggacaacatcctggcctccaaactgtatcgcccaggcagtgtggcctacgtctcgcgttcaggaggcatgtctaacgaactcaataatatcatctctcggaccacagatggtgtctacgagggtgttgccatcggcggggacaggtaccctgggtccacattcatggatcacgtgctgcgttaccaagacactccaggagtcaagatgattgtagttcttggggagatagggggtacagaagaatataagatctgccggggcatcaaggagggccgcctcaccaagccagtggtctgctggtgcatcgggacctgtgccaccatgttctcttctgaggtccagtttggccacgctggggcttgtgccaaccaggcttctgaaacggcagtagccaagaaccaggccttgaaggaagcgggagtgtttgtgccccgaagctttgatgagctcggagaaatcattcagtccgtgtatgaagatcttgtggccaaaggcgccattgtacctgctcaggaagtgccacctccaacagtacccatggactactcttgggccagggagctgggtttaatccgaaaacctgcctcattcatgaccagcatctgtgacgagcgggggcaggaactcatttatgcgggcatgcccatcaccgaggtcttcaaggaagagatgggcattggtggtgtcctgggcctcctctggttccagagaaggttgcccaagtattcctgccagttcattgagatgtgtctcatggtcaccgctgatcacgggccagctgtctccggggcccataacactatcatctgtgctcgggctgggaaggacctggtctccagcctcacctcagggctgctcaccattggggaccggtttgggggtgccttggacgcagcagcgaagatgttcagtaaagcctttgacagcggcattattcccatggagtttgtgaacaagatgaagaaggaggggaaactgatcatgggcatcggccatcgagtcaaatcgataaacaacccagacatgcgagtgcagatcctcaaagactttgtcaaacagcacttccccgccaccccgctgctcgactatgcactggaagtggagaaaatcaccacctcaaagaagccaaatcttatcctgaacgtggatggtttcatcggcgttgcgtttgtggacatgcttaggaactgtggctccttcacccgggaggaagctgacgagtatgttgacattggagccctcaatggcgtctttgtgctgggaaggagtatgggcttcatcgggcactatcttgaccagaagaggctgaagcaagggctgtatcgtcacccctgggacgacatttcctatgttctcccggaacacatgagcatgtaaccgagccagcagccctaccgtagaaaaaggaagacaaaaactccctcctcgacaatatagcggacagacagctggaaacagagcccgttatgggctgggcctggaatggaaatagccattgatgtgcaggcatggaaagccaacaccacaggcccattcagtccacacagagaagcttagtatttttttttatatatatatctatatatatataagcatagaaatttaaaaccaagccaatacttgtgacgtttgcgctgctacctgctgtatctattacatggaagactgtaagcaagcgctgtcagaataatgttcttctagggccttatgatgttgctttctttttttaattagttgaaaatttatttttcctctagaactagtggatccgacttttaagacttcaggatactatctgtttgtaggaccactgtctggtatcccacctcccactcatcttcacaccacatgaagaacactgtattaatctgattttttaggatctttttttttttttttgtgttatgtgttaagggtttatttagtatcccactgaaacgttctgtgtttcggaccaatgtctacttatgtcaaggggaggagggttggggccattgtacccttagccatcgtcacacatgtggagtagtaacttaaatgtaaagttgtaacatacaagtgtttaaaatggaaaccgcaaagcaaaaagctgtgaaacgtctcgtgtcttgtgttctctgtgttcatgcagctgacttgtctgttactgaagtgtgggtccaaagactcacatctgttccgcatctgtaacccacagagattctggcagctgccacctcagtctcttctctgtattatcatgtttggtttaaataaactagatagtaaaaa

SEQ ID NO: 3242 - DNA, 2009 bp, Rattus norvegicus
  Genbank Accession No. NM_016988
ccggtgatggccggcagacagtctggttggagccaggcggctcttctccagttccttcttggcatgtgcctaatggtgatgccacccatacaagcccggagtctgcgctttgttaccttgctgtatcgacacggagatcggtcaccagtgaaggcatatcctaaggacccctatcaggaagagaaatggccccagggatttggtcagctaaccaaggaagggatgctacagcattgggagctgggccaggccctgcggcaacgctaccatggctttctgaacgcctcttaccacaggcaagaggtttacgtgcgaagcacagactttgaccgtactctcatgagtgcagaggccaacctggccggactcttccctcccactgaagttcagcacttcaacccgaacatttcatggcagcctatccctgtccacaccgtgcccattactgaagacaggttgctgaagtttcctttgggtccatgtccccgttatgagcagttgcagaacgagactcggcagacaccagagtatcagaacatgagtattcagaatgcacaatttctggacatggtggccaatgagacagggcttatgaacttgaccctagagaccatctggaatgtgtatgacacactcttttgtgagcaaacacatgggctgctcctgccaccctgggcctctccccaaaccgtgcaggctctgagccagctaaaggacttcagcttcctcttcctcttcgggatccacgatcaagtacagaaggcccggcttcaggggggagttctgctggctcaaatattgaagaatctgaccctaatggcaactacctctcaattccctaagcttctggtttattctgcgcatgacactaccctggttgctctgcaaatggcactgaatgtctacaatggtaaacaagccccctatgcttcctgccacatatttgaactgtaccaggaagataatgggaatttctcagtcgagatgtactttcggaatgacagtaagaaggcaccctggccactgaccctgcctggctgtcctcaccgttgcccactgcaggacttccttcgcctcacagaacctgtcatacccaaggactggcagaaggagtgccagctagcaagcgatactgcagacacagaggtgattgtggcactggctgtctgtggctccatcctcttccttctaatagtgttgctcctcactgtcctcttccggatgcaggcccagcctcctggctaccaccatgttgcagacagggaagaccatgcttgacaaccactcagtccccttccctctgcctcctaggggatgtgggctgagtccttgctcctgactattgccgatcccagagggacaggtttagccttcctgattacctacgcccaaatgaatgagtgaggctgggctggtcgcacgtcacctgtgacttaccatcctcatgcctgatgtttaccatgtactgtgttggacactggctttctctaaatgggatttgcctcttctatactccctaaggacttgagatacagacaagcattcaggttttactcaagaccttgggattaaaaaaacaaaacaacaacagaaaaaaaaccccaaaccctgaagaagctggtacttgatctgtctagctcttcccccaagccttgctctttgtcttctagcccatatctttggcaaatggcttggagacattgtcccttggtacttttgcagttcatataaatggctcattttatatggatcacccaacagcaaagtttccctctgactgaggcctgccgtcagtgtcaacctcaggcaggttgaaggacactggtgctgcacctggatgacagtgggaggacacaggagtgaaacacatggaatcatgacgtgactctccctcagctgggctggactcttcagggacttgaagtaaatgcagctggtgaactgtacaccttgactgtggcccgaaacagagctgaagtaactccgaggaaatgaaggttttgactgag

SEQ ID NO: 3243 - DNA, 2681 bp, Rattus norvegicus
  Genbank Accession No. NM_016989
tttattggatatgaattttacaaatattacgtcaattagcggtaacggtggagctgaagagtgttgcgccttctccaggctgcacggcgagacccaccaatggtgtggtggaacttgtggccctttccaaggccacggctcttgcggccagcagatgtcagcccacgcatctccctgtgcttgtggactggtttggtaatccattgggtgtcgggatttcttctgatagctttatggaatggatcaatgaggataacctcaaaaaatttatatgtggaatcttcaccaacccagtaggaattcaggactctcaaagctccacaatggcgcccagctctctcctcagcaacagactgaaggcttcggctagttttgtgcgtctacaaagctttgagcggaattttagcttcggcaaacaagtccccccagctcctccagctaattcccgcgacttctctccagacaccagctccagacagtgactgatgcctctctggttgtgattccagcgcagaaactcgaaggagccctttgcccgccgtcctatttagtcaactctttcctagccgcgaatgaccatgtgtagcggagcaaggttggccctgttggtctacgggataataatgcataacagcgtctcctgttcacctgccgccggactcagcttccctgggatcagaccagaagaagaggcttacgatcaggacggaaacccgctgcaagacttctacgactgggaccctccgggcgcagggagccccgcctccgcgctgcgtgacgcctacgccctttactacccagccgacaggagagatgtcgcccacgaaatccttaacgaagcctaccgcaaagtcttggaccagctgtccgccaggaagtacctgcagtccatggtggccaggggcatgggcgagaacctcgccgccgccgcggtggacgaccgggcaccccttaccaaacgccactcggacggcatcttcacagacagctatagccgctaccgaaaacaaatggctgtcaagaaatacttggcggccgtgctagggaaaaggtataaacagagggttaaaaacaaaggacgccgaatagcgtacttgtagcgatgagttgccagctaccgtgtgtataaaatgaaaagtcgttttccaaattgactgaccagtcatcactcatgtgttctttccaaacatgtatttatgtatcaagtaaagccattaaatgactattttgataataatattgtttttctttttacgaagcactggagaatgcacagatatactttgtggaccaattattgatatatattataagtatatattaagaatatatataggtatagcagagagcaattcataagcgtgcacaaagattgaaaattcgcctgagctgtttatgtttttatataaaatgaatagagaaaatagacaaccattgttttgaatattactcctatttttgtaaactggaattaaaggatagtatttttatccacaaccggcttgaagataccaataatggccatttgtacaaaaaaatgatgccctgctccaggagaattctgaggtaatgacttcccaaattgctgaagggctttctttccttgtgagtctctggggcaggctgcttgaaccccagcctaactaactcaagtgggcattgtcccactggttgcgggacaattccaacactttcattttctttgactatacctttatgtgtatctgtctctcctcagagtcccagcccataaggaaattctaattactgaacagctcgatccaaattgtgcttctccccaaaattcatgtcatttccttggagaagagtcgaggaactgtacagaagagaccagcttggagagaaagcgctcttttttgtacttcctgattcttcagggaactgactatcctaaagctagggcaattggaacaaagtgaaagataaagagaggactggaaggggcagagcatggggtgtggaggaggaccctgtagagggactgatttgagagttgcctcaggtctgagaatctgggggcaagtctagtccctctgcaggttccactgcctgacagatcaggtgctggtgttggaatgaatgaatgcaaagtacaatgtgtttttctccagtgctgtccatgcttttcatgtcgtgaaatgaccaggatcctcccctttgaacactgctctgcagaagccacccctattctttgtggtttttctggagaacctccttcctacccttgccctcctgcactgtttaagaatctcgtatgccattttccactcacttatcttaaatttgtgaatgctagttattttttgttgttgtttgatgcaagcagttactgtgaagtttaggaacccctgtttagctaccacagagtgagtatgcactaaatatgaaccttttgtttcttgtttattgagtttgtaggtaaaatgtatttttctatattatggcttattgcttagtaaagcaagcccagcttcctgaggggccttttgtcctgttagcaattgaggcatttgcagaacactgtacagaccccgctctcccctgtacattcctccctggtggtgcccggtccccacttggggatgggagttttgtagactgtacagaaatcggcaccctattttcttgcagctctcagattttgttaatctggattatac

SEQ ID NO: 3244 - DNA, 602 bp, Rattus norvegicus
  Genbank Accession No. NM_016992
gctgcacgcagtgcccacctatgctcgccatgatgctcaacactacgctctctgcttgcttcctgagcctgctggccctcacctctgcctgctacttccagaactgcccaagaggaggcaagagggccacatccgacatggagctgagacagtgtctcccctgcggccctggcggcaaagggcgctgcttcgggccgagcatctgctgcgcggacgagctgggctgcttcctgggcaccgccgaggcgctgcgctgccaggaggagaactacctgccctcgccctgccagtctggccagaagccttgcggaagcggaggccgctgcgctgccgcgggcatctgctgcagcgatgagagctgcgtggccgagcccgagtgtcgagagggttttttccgcctcacccgcgctcgggagcagagcaacgccacgcagctggacgggccagcccgggagctgctgcttaggctggtacagctggctgggacacaagagtccgtggattctgccaagccccgggtctactgagccatcgccccccacgcctcccccctacagcatggaaaataaacttttaaaaaatgcaaaaaaaaaaaaaaaaaa

SEQ ID NO: 3245 - DNA, 1179 bp, Rattus norvegicus
  Genbank Accession No. NM_016993
cctcatgaaataaaaagctgaaaggaatttgaataaaaatttcctgcatctcatgccaagggggaaacaccagaatcaagtgttcgtcataactaaagacaccccttcatccaagaatgcaaagcacatccaataaaagcgctggatataacttcttttttctctctttcggccgtggggcgggagccgggacgcgaagtgctattggtacctgcagcttctttccccggaaggatggcgcaagccgggagaacagggtatgataaccgggagatcgtgatgaagtacatccattataagctgtcacagaggggctacgagtgggatactggagatgaagactccgcgcccctgagggctgcccccacccctggcatcttctccttccagcctgagagcaaccgaacgcccgctgtgcaccgagacacggctgccaggacgtcgcctctacggccccttgtcgccaacgctgggcctgcgctcagccctgtgccacctgtggtccacctgaccctccgccgggctggggatgacttctctcgtcgctaccgtcgcgactttgcagagatgtccagtcagctgcacctgacgcccttcaccgcgaggggacgctttgccacggtggtggaggaactcttcagggatggggtgaactgggggaggattgtggccttctttgagttcggtggggtcatgtgtgtggggagcgtcaacagggagatgtcacccctggtggacaacatcgctctgtggatgactgagtacctgaaccggcatctgcacacctggatccaggataacggaggctgggatgcctttgtggaactatatggccccagcatgcgacctctgtttgatttctcctggctgtctctgaagacgctgctcagcctggccctggtgggggcctgcatcactctgggtgcatacctgggccacaagtgaggtcagcagacctgccccaaacaaatatgaaaaggttcactaaagcagtagaaattaatatgcattatcaaggatggaccatgaaacaaagttgtgatttttttttaaagcagaacacacacacacacacacacacacacacacacacacacacacacacacacacattcaggcaaatggtcaaatcagctatttactgccaaagggaaatattatttattttttacattattt

SEQ ID NO: 3246 - DNA, 5066 bp, Rattus norvegicus
  Genbank Accession No. NM_016994
ctaccccttacccctcactccttccacctttgtcctttaccatgggacccacgtcagggtcccagctactagtgctactgctgctgttggccagctccctgctagctctggggagccccatgtactccatcattactcccaatgtcctgcggctggagagtgaagagactttcatactagaggcccatgatgctcagggtgacgtcccagtcactgtcactgtgcaagacttcctaaagaagcaagtgctgaccagtgagaagacagtgttgacaggagccactggacatctgaacagggtcttcatcaagattccagccagtaaggaattcaatgcagataaggggcacaagtacgtgacagtggtggcaaacttcggggcaacagtggtggagaaagcggtgctagtaagctttcagagtggttacctcttcatccagacagacaagaccatctacaccccaggctccactgttttctatcggatcttcactgtggacaacaacctattgcctgtgggcaagacagtcgtcatcgtcattgagaccccggacggcgttcccatcaagagagacattctatcttcccacaaccaatatggcatcttgcctttgtcttggaacattccagaactggtcaacatggggcagtggaagatccgagccttctatgaacatgcaccaaagcagaccttctctgcagagtttgaggtgaaggaatacgtgctgcccagtttcgaagtcctggtggagcctacagagaaattttattacatccatggaccaaagggcctggaagtttccatcacagccagattcctgtatgggaagaacgtggacgggacagctttcgtgatctttggggtccaggatgaggataagaagatttctctggccctgtccctcacccgcgtgctgatcgaggatggttcaggggaggcagtgctcagccgaaaagtgctgatggacggggtacggccctccagcccagaagccctagtggggaagtccctgtacgtctctgtcactgttatcctgcactcaggtagcgacatggtagaggcagagcgcagtgggatcccaattgtcacttccccgtaccagatccacttcaccaagacacccaaattcttcaagccagccatgcctttcgacctcatggtgtttgtgaccaaccctgatggctctccagcccgaagagtgccagtagtcactcagggatccgacgcgcaggctctcacccaggatgacggtgtggccaagctgagcgtcaacacacccaacaaccgccaacccctgactatcacggtaagcaccaagaaggagggtatcccggacgcgcggcaggccaccaggacgatgcaggcccagccctacagcactatgcacaattccaacaactacctgcacttgtcagtgtctcgggtggagctcaagcctggggacaacctcaatgtcaacttccacctgcgcacggacgctggccaagaggccaagatccgatactacacctatctggttatgaacaaggggaagttactgaaggcaggccgtcaggttcgggagcctggccaggacctggtggtcttgtcactgcccatcactccagaatttataccttccttccgcctggtggcttactacaccctgattggagctaatggccaaagggaggtggtggccgactcagtgtgggtggatgtgaaggactcctgtgtaggcacgctggtggtgaaaggtgacccaagagataaccgacagcccgcgcctgggcatcaaacgacactaaggatcgaggggaaccagggggcccgagtggggctagtggctgtggacaagggggtgtttgtgctgaacaagaagaacaaactcacacagagcaagatctgggatgtagtagagaaggcagacattggctgcaccccaggcagtgggaagaactatgcgggtgtcttcatggatgctggcctgaccttcaagacaaaccaaggcctgcagactgatcagagagaagatcctgagtgcgccaagccagctgcccgccgccgtcgctcagtgcagttgatggaaaggaggatggacaaagctggtcagtacaccgacaagggtctgcggaagtgttgtgaggatggcatgcgtgatatccctatgccgtacagctgccagcgccgggctcgcctcatcacccagggcgagagctgcctgaaggccttcatggactgctgcaactatatcaccaagcttcgtgagcagcacagaagagaccatgtgctgggcctggccaggagtgatgtggatgaagacataatcccagaagaagatattatctctagaagccacttcccagagagctggttgtggaccatagaagagttgaaagaaccagagaaaaatggaatctctacgaaggtcatgaacatctttctcaaagattccatcaccacctgggagattctggcagtgagcttgtccgacaagaaagggatttgtgtggcagacccctatgagatcacagtgatgcaggacttcttcattgacctgcgactgccctactctgtggtgcgcaatgaacaggtggagatcagagctgtgctcttcaattaccgtgaacaggagaaacttaaggtaagggtggaactgttgcataacccagccttctgcagcatggccactgccaagaagcggtactaccagaccatcgaaatccctcccaagtcctctgtggctgtgccttatgtcattgtccccttgaagatcggcctccaggaggtggaggtcaaggccgccgtcttcaaccacttcatcagtgatggtgtcaagaagatactgaaggtcgtgccagaaggaatgagagtcaacaaaactgtggctgtccgtacactggatccagaacacctcaatcaagggggagtgcagagggaggatgtgaatgcagcagacctcagtgaccaagtgccagacacagattctgagaccagaattctcctgcaagggaccccggtggctcagatggccgaggacgctgtggacggggagcggctgaaacacctgatcgtgaccccctctggctgtggggagcagaacatgattggcatgacacccacggtcattgcagtacactatctggatcagaccgaacagtgggagaaattcggcctagagaagaggcaagaagctctggagctcatcaagaaagggtacacccagcagctggctttcaaacagcccatctctgcctatgctgccttcaacaaccggcctcccagcacctggctgacagctatgtggtcaaggtctttctctctggctgccaacctcatcgccatcgactctcaggtcctgtgtggggctgtcaaatggctgattctggagaaacagaagccagatggtgtctttcaggaggacggaccagtgattcaccaagaaatgattggtggcttccggaacaccaaggaggcagatgtgtcgcttacagcctttgtcctcatcgcactgcaggaagccagagatatctgtgaggggcaggtcaacagccttcccgggagcatcaacaaggcaggggagtatcttgaagccagttacctgaacctgcagagaccatacacagtagccattgctgggtatgccctggccctgatgaacaaactggaggaaccttacctcaccaagtttctgaacacagccaaagatcggaaccgctgggaggagcctggccagcagctctacaatgtggaggccacctcctacgccctcctggccctgctgctgctgaaagactttgactctgtgcctcctgtggtgcgctggctcaacgacgaaagatactacggaggtggctatggctccacgcaggctaccttcatggtattccaagccttggctcaataccgggcagatgtccctgaccacaaggacttgaacatggatgtgtccctccacctccccagccgcagctccccaactgtgtttcgcctgctatgggaaagtggcagtctcctgagatcagaagagaccaagcagaatgagggcttttctctgacagccaaaggaaaaggccaaggcacactgtcggtggtgacagtgtatcacgccaaagtcaaaggcaaaaccacctgcaagaagtttgacctcagggtcaccataaaaccagcccctgagacagccaagaagccccaggatgccaagagttcgatgatccttgacatctgcaccaggtacttgggagacgtggatgctactatgtccatcctggacatctccatgatgactggctttattccagacacaaacgacctggaactgctgagctctggagtagacagatacatttccaagtatgagatggacaaagccttctccaacaagaacaccctcatcatctacctagaaaagatctcacactccgaagaagactgcctgtccttcaaagtccaccagttctttaacgtgggacttatccagccggggtcggtcaaggtctactcctactacaatctagaggagtcatgcacccggttctatcatccggagaaggacgatggaatgctgagcaagctgtgccacaatgaaatgtgccgctgtgccgaggagaactgcttcatgcatcagtcacaggatcaggtcagcctgaatgaacgactagacaaggcttgtgagcctggagtggactacgtgtacaagaccaagctaacgacgatagagctgtcggatgattttgatgagtacatcatgaccatcgagcaggtcatcaagtcaggctcagatgaggtgcaggcaggtcaggaacgaaggttcatcagccacgtcaagtgcagaaacgccctaaagctgcagaaagggaagcagtacctcatgtggggcctctcctccgacctctggggagaaaagcccaataccagctacatcattgggaaggacacgtgggtggagcactggcccgaggcagaggaacgtcaggatcagaagaaccagaaacagtgcgaagacctcggggcattcacagaaacaatggtggttttcggctgccccaactgaccaccacctccaataaagcttcagttgtatttt

SEQ ID NO: 3247 - DNA, 1396 bp, Rattus norvegicus
  Genbank Accession No. NM_017000
tgggccaatacaatcagggctcttctcaccgccatggctccagaagttgggggcggatcgtagtgtcaagcgctgattggctgagcagagaggacatcattcaactatgccatgaaggaggctgctgtggaggctctgaagaagaaaggatgggaggtggtcgaatctgacctctatgctatgaactttaaccccctcatttccagaaacgacatcacaggggagccgaaggactcggagaactttcagtaccctgttgagtcatctctggcgtataaggaaggccgcctgagcccggatattgtagctgaacagaaaaagctggaagctgcagacctagtgatatttcagttcccattgtattggtttggggtgcccgccattctgaaaggctggtttgagagagtgcttgtagcaggattcgcctacacgtatgccaccatgtatgaccaaggtcctttccagaataagaagaccttgctttccatcaccaccgggggcagcggctccatgtactctctgcagggtgtccacggggacatgaacgtcattctctggccaattcagagtggcattctgcgcttctgtggcttccaggtcttagaacctcaactggtgtacagcattggccacaccccacccgatgcccgcgtgcaggtcctggaagggtggaagaagcgtctggagaccgtctgggaggagtcaccactctactttgctccaagcagcttgtttgacctaaacttccaggcaggattcttactgaaaaaagaggttcaagaggagcagaaaaagaacaagtttggcctttctgtgggccatcatttgggcaagtccattccagccgacaaccagatcaaagctagaaaataaggttttccataccatgtagttagacccaggtttctttttccccagtttgcctggcttgctttcagttttcgcctttgttccacaaggataggaaaaggaggaggctcgcctcatgcgtttttggatagttctgccacggctgtgacagcaaaatgaacgaggtcagattaggggcctcaggtggcctgggatatgaatcagggagaggtgtagccgcgagcggggaaaatactcttctaggtcttttgtacactataagcttttttcttcgggctagccttggctaaatggcatccaatcctccacccacttgttgctattagttacctctctgtggtttagggcaggagggaattgctcaaacaatggctgagggactaacttgtttagcagttagctaaagcctgtttatgatccatcctggtttcaattactgtgcagtgactgacaagcctcgggggattgctctccagctcttctctgccttgtacatagcacacccaggtcctgggaaatgaataca

SEQ ID NO: 3248 - DNA, 1589 bp, Rattus norvegicus
  Genbank Accession No. NM_017005
ctttccatccacgtacagcagcaccatgaaccgcgcattctgtctcctcgctcgctcgcgtcgcttcccgcgggtcccctccgccggtgctgtattgtcaggggaagcggccaccctcccacggtgtgctccgaacgtcgtgcgaatggcaagccaaaattccttccgtatagaatacgacacctttggtgaactgaaggtcccaaccgataagtattatggtgctcagactgtaagatctacgatgaactttaagattggaggtgcgacggagagaatgccaatcccagtcattaaagcatttggcatcttgaagcgagctgctgctgaagtgaaccaggagtatggtctcgatcccaagattgctagtgcaataatgaaggccgcagatgaggtagctgaaggtaaattaaacgatcactttcctctggtggtatggcagactgggtcaggaacccagacgaacatgaatgtaaatgaagtcattagcaacagggcaatcgaaatgctaggaggtgaacttggcagcaagaagcccgtgcaccccaatgatcacgttaacaaaagccagagctcgaatgacaccttccccacagcaatgcacattgctgctgcactggaagttcaccaggtcctgttgccaggattacagaagctgcacgatgccctcagtgcaaaatccaaagagttcgcgcaggtcataaaaattgggcggactcatacgcaggacgctgtccctcttactcttggacaggagttcagtggttatgttcagcaagtccagtatgcgatggagaggataaaagctgccatgcccagaatctacgagctcgctgctggcggcactgccgtcggcacgggactaaacaccaggatcggcttcgcagaaaaggtggctgcaaaagtcgcagcactcacaggtttgccttttgtcactgccccgaataagtttgaagctctggccgctcatgatgctctggtggagcttagtggagccatgaacactacggcctgcagtctgatgaagattgccaatgacattcgcttcctcggttctggtcctcggtccggtttgggggagctgatcttgcctgaaaatgagccagggagcagcataatgccaggaaaggtgaaccctactcagtgtgaggcgatgaccatggttgcagcccaagtcatggggaatcatgtcgctgttactgttggaggcagcaatggacatttcgaactgaatgtttttaaaccgatgatgattaagaatgtgttgcactcagccaggctactgggagatgcttcagtgtccttcacagagaactgtgtggtagggatccaggccaacacagagaggatcaacaagctaatgaacgagtctttaatgttggttacagctcttaatccgcatatagggtatgacaaagcagcgaagattgccaagactgcacacaagaacggatcaaccttaaagaaaacggctattgaacttggctatctcacagcagagcagtttgatgagtgggtgaaacccaaggacatgctgggtccaaagtgacttaaataaatttatattaaaataaacatgtatgaaattt

SEQ ID NO: 3249 - DNA, 2324 bp, Rattus norvegicus
  Genbank Accession No. NM_017006
gtgaacgtgtttggcagcggcaactaaattcagaaaacatcatggcagagcaggtggctttgagccggacccaggtgtgtgggatcctgagggaagagttgtaccagggtgatgccttccaccaagctgatacacacatatttatcatcatgggtgcatcgggtgacctggccaagaagaagatttatcctaccatctggtggctgttccgggatggccttctacccgaagacaccttcattgtaggctatgcccgctcacgactcacagtggatgacatccgcaaacagagtgagcccttctttaaagtcactccagaagaaagacccaagctagaggagttctttgcccgtaactcctatgtagctggccagtatgatgatccagcctcctacaagcacctcaacagccacatgaatgccctgcaccagggaatgcaggccaaccgtctgttctacctggccttgccccccactgtctatgaagcagtcaccaagaacattcaagagatctgcatgagtcagacaggctggaaccgcatcatagtggagaagcccttcgggagagacctgcagagctccaatcaactgtcgaaccacatctcctctctgtttcgtgaggaccagatctaccgcattgaccactacctgggcaaagagatggtccagaacctcatggtgctgagatttgccaacaggatctttggacccatctggaatcgagacaacattgcttgtgtgatccttacatttaaagagccctttggtactgagggtcgtgggggctattttgatgaatttgggatcatcagggatgtcatgcagaaccacctcctgcagatgttgtgtctagtggccatggaaaagcctgcctctacagattcagatgatgtccgtgatgagaaggtcaaagtgttaaaatgtatctcagaggtggaaactgacaacgtggtccttggccagtatgtggggaaccccagtggagaaggagaagctaccaatgggtacttagatgaccccacagtaccccatgggtctaccactgctacctttgcagcagctgtcctctatgtggagaatgaacggtgggatggagtacccttcatcctgcgctgtggcaaagctctgaatgagcgcaaagctgaagtgagacttcagttccgcgatgtggcaggtgacatcttccaccagcagtgcaagcgtaacgagctggtcatccgtgtgcagcccaatgaggcggtatacaccaagatgatgaccaagaagcctggcatgttcttcaaccctgaggagtctgagctggacctaacctatggcaacagatacaagaatgtgaagctccctgatgcctatgaacgcctcatcctggatgtcttctgtgggagccaaatgcactttgtccgtagtgatgaactcagggaagcctggcgtatcttcacaccattgctgcacaagattgatcgagagaagccccagcccatcccgtatgtctatggcagccgaggtcccacagaggcagatgagctgatgaagagagtgggcttccagtatgagggtacctacaagtgggtgaaccctcacaagctctgagccctggaaacttacaccatctgcactctgcctcttctggccaccctttctgcatctgcccttctcaccatctaaccctctattaggactattgacctcatattggaaagactttgggaccataggccttagctacacattctagtccctgggcttaggccaccattctgtcctatgctgctgccactgccactaccactaagcccagctacattcctcagataccaggcattcaaaacgcattgcaatgctttcaggaccaccactgtccctatctgagccacccatctttccacaagacctgaatcacctcctcccctcaatcccctgcagaaagaacgcctatcagtctgtccctggactccttaagataggagttaggaacaattgggaggagccttgggccttggagggacaatgaccaaaccacacttccctgagactgtgggcaagctcctcaaaacttaaagtgatcaaggacacccatctgagaggacctgcccatagccacactagccttagtgctacttgacattcctcctcaccagctggaagaactctcatgctgcctagcaatattttgggggccatagatatctcctaaacaattccatagtccatagtcagcctcatccaacccatgggcagcctccttaccaaaggaaggtaagagcagcagctagaattttcctaccccaaccctgccattaaatcctcaaaaaaaaaaaaaaaaaa

SEQ ID NO: 3250 - DNA, 831 bp, Rattus norvegicus
  Genbank Accession No. NM_017013
agttgggagctgagtggagaagaagccacgattctcgctagacagtgaagcacagttgctgctatgtctgggaagccagtgcttcactacttcaatgcccggggcagaatggagtgcatccggtggctcctcgctgcagcaggagtggagtttgatgagaagtttatacaaagtccagaagacttggaaaagctaaagaaagacgggaatttgatgtttgaccaagtgcccatggtggagattgacgggatgaagctggcacagaccagagccattctcaactacatcgccaccaaatatgacctctatgggaaggacatgaaggagagagccctgattgacatgtacaccgaaggcattttagatctgactgaaatgattatgcaattggtaatatgtcccccagaccaaaaagaagccaagaccgccttggcaaaagacaggaccaaaaaccggtacttgcctgcctttgaaaaggtgttgaagagccatggccaagactaccttgtaggtaacaagctgacccgggtagacatccacctgctggaacttctcctctatgttgaagagtttgatgccagccttctgacctctttccctctgctgaaggccttcaagagcagaatcagcagcctccccaatgtgaagaagttcctgcagcctggcagtcagagaaagcttcccatggatgcaaaacaaatcgaagaagcaaggaagattttcaagttttagcggagctgcactgtccaatttctttatgttttgcaaaaaatgagaagcaattgttgatcctaggtatttttgaaataataaacacgaaaaaatactcta

SEQ ID NO: 3251 - DNA, 1055 bp, Rattus norvegicus
  Genbank Accession No. NM_017014
gctgaagcaaattgagaagaccacagcgccagaaccatgcctatgatactgggatactggaacgtccgcgggctgacacacccgatccgcctgctcctggaatacacagactcaagctatgaggagaagagatacgccatgggcgacgctcccgactatgacagaagccagtggctgaatgagaagttcaaactgggcctggacttccccaatctgccctacttaattgatggatcgcgcaagattacccagagcaatgccataatgcgctaccttgcccgcaagcaccacctgtgtggagagacagaggaggagcggattcgtgcagacattgtggagaaccaggtcatggacaaccgcatgcagctcatcatgctttgttacaaccccgactttgagaagcagaagccagagttcttgaagaccatccctgagaagatgaagctctactctgagttcctgggcaagcgaccatggtttgcaggggacaaggtcacctatgtggatttccttgcttatgacattcttgaccagtaccacatttttgagcccaagtgcctggacgccttcccaaacctgaaggacttcctggcccgctttgagggcctgaagaagatctctgcctacatgaagagcagccgctacctctcaacacctatattttcgaagttggcccaatggagtaacaagtaggcccttgctacactggcactcacagggaggacctgtccacattggatcctgcaggcaccctggccttctgcactgtggttctctctccttcctgctcccttctccagctttgtcagccccatctcctcaacctcaccccagtcatgcccacatagtcttcattctccccactttctttcatagtggtccccttctttattgacaccttaacacaacctcacagtccttttctgtgatttgaggtctgccctgaactcagtctccctagacttaccccaaatgtaacactgtctcagtgccagcctgttcctggtgggggagctgccccaggcctgtctcatctttaataaagcctgaaacac

SEQ ID NO: 3252 - DNA, 2472 bp, Rattus norvegicus
  Genbank Accession No. NM_017015
ccccgcatgtccccaagacggagtgtgtgttggttcgtactgggccagctgctgtgcagctgcgccgtggcgctgcagggcgggatgctgttcccgaaggagaccccttcgcgggaactcaaggtgctggacggcctgtggagcttccgtgccgattactcgaacaatcggttgcagggcttcgagaagcagtggtaccggcagccgctacgggagtcgggcccaaccttggacatgccggtcccttccagcttcaatgacatcacccaagaagcagagcttcggaacttcattggctgggtgtggtatgaacgggaagcagtgcttccacagcgatggacccaggacaccgacaggagagtggtgttgagaatcaacagcgcccattactatgcagttgtgtgggtgaatgggattcatgtggtggaacatgagggaggtcacctcccctttgaggctgacatcaccaagctggtccagagtgggcccctgaccaccttccgggtcaccatcgccatcaacaacacactgaccccttatacccttccaccggggaccattgtctacaagactgatccttccatgtatcccaagggttacttcgtccaggacataagcttcgacttcttcaactatgcggggctgcaccggtctgtggtcctgtacaccacccctaccacctatatcgatgatatcactgtgaccactgacgtggaccgggacgttgggctggtgaactactggatttctgtccagggcagtgaccatttccagctagaagtgcgtcttctggatgaggatggcaaaattgtggcccgtggaacagggaatgagggtcaacttaaggtgccgcgtgcccacctctggtggccttacctgatgcatgagcatccagcctacctgtactccttggaggtgacgatgacaacacctgagtctgtgtctgacttctataccctccctgtcgggattcgaacagtggctgtcacaaagagcaagttcctcataaatgggaagcctttctacttccaaggcgtcaacaagcatgaggattcagatatccgagggagaggcttcgactggcctctgctgataaaggatttcaacctcctccgttggctcggggcaaattcctttcgtaccagccactatccctactcggaggaggtacttcagctctgtgaccgatatggaattgtggtcatcgatgagtgtcccggtgtgggcatcgtgctgccccagagttttggcaacgtgtctcttcggcaccacctagaggtgatggacgagctggtgcgcagggacaaaaatcaccctgcggtcgtgatgtggtctgtggccaatgagcctgtctcttctctgaaacctgccggatattacttcaagacgctgatcgcccacaccaaagccctggaccccacccgtcctgtgacctttgtgagcaataccagatatgacgcagacatgggggccccgtacgtggacgtgatttgtgtgaacagttacttatcctggtatcatgactacgggcatctggaggtgattcagctgcagctgactagccagtttgagaactggtataagatgtaccagaagccaattatccagagcgagtatggagcagacgccgtctcggggcttcatgaggatccacctcgcatgttcagtgaggagtaccagacagctctcctggagaattatcatttgatcctggatgagaaacgaaaagaatatgtcatcggagagctcatctggaattttgctgacttcatgacgaaccagtcaccactgagagtaacaggaaacaagaaggggatcttcactcgacagagaaaccccaagatggcagccttcattttgcgagagagatactggaggattgccaacgaaaccagaggttacggttcagtgccgaggacccagtgtatgggaagcagaccgttcacattctaaagctacgactacctcaccgcagacagggcctgatgaagtgaaaggtattctctcagcagaagagtttttcctctggagtttgtgaaccaacacaaggaggactttagaagtgacatggaagttttccttgtgtggggataatgacttgcagtgccttaggctcagtaatgtgtcctgctgagaagtgtcccaggtcatttctgtcaggttttttttggccttggctttgtgtactcttgaaaacctactgtgtgaatactcacactaagagctcctggttaccggctaagggacggctcacaatttaagaatactgactgttctaccaggggttccagattcgattcctagcacccacgtggtcgttaactatgagctgttgccccatttctcaggtgatgtacgaacatacatgtggggggaggggaatagtcatacgtgtaaaatgaaaataaatctaaataaaactgttttctttcattataaaaaaaaaaaaaaaaaaccaactaatagaaacgt

SEQ ID NO: 3253 - DNA, 4614 bp, Rattus norvegicus
  Genbank Accession No. NM_017020
aattccgtgggcggcgggcggcggagaagctccgagcggggccgggcggcggcagattggagtcgcgacacagccgccgtccgcttcgggctccacgtagaaggaaccatgctggccgtcggctgcaccctgctggtcgccctgctggccgcgcccgcagtcgcgctggtccttgggagctgccgcgcgctggaggtggcaaatggtacggtgacgagcctgccaggggccactgttaccctgatctgccctgggaaggaagcagcaggcaatgctaccattcactgggtgtactcaggctcacagagcagagaatggactaccacgggaaacacactggttctgagggccgtgcaggtcaatgacactgggcactatttgtgcttcctggatgatcatctggttgggactgtgcccttgctggtggatgttcccccagaggagcccaagctctcctgcttccggaagaacccccttgtaaatgccttttgtgagtggcatccaagcagcactccctctccaaccacgaaggctgtgatgtttgcaaagaaaatcaacaccaccaatgggaagagtgacttccaggtgccttgccagtattctcagcagctgaaaagcttctcctgcgaggtggagatcctggagggtgacaaagtgtaccacatagtgtcactgtgcgttgcaaacagtgtcggaagcaggtccagccacaatgtagtatttcagagtttaaaaatggtgcagccggatccacctgccaaccttgtggtatcagccatacctggaagcctcgttggctcaaagtcagttggcaagaccctgagtcctgggacccaagttactacttgttgcaattcgagcttcgataccgacctgtatggtcaaagaacgttcacggtgtggccgctccaggtggcccagcatcaatgtgtcatccatgatgccttgcgaggagtaaagcatgtggtgcaggtccgagggaaggaggagtttgacattggccagtggagcaaatggtccccggaggtcacaggcactccttggctagcagagcccaggaccactccggcagggatcccggggaaccccacacaggtctctgttgaagactatgacaaccacgaggatcagtacggaagttctacagaagcaacgagtgtcctcgccccagtgcaaggatcctcgcctatacccctgcccacattcctggtagctggaggaagcctggcgtttggattgcttctctgtgtcttcatcatcttgagactcaagaagaaatggaagtcacaggctgagaaggaaagcaagacgacttctcccccaccgtatcccttgggaccgctgaagccgaccttcctcctggttcctctcctcaccccatcagggtcccataacagctctgggactgacaacaccggaagccacagctgcctgggtgtcagggacccacagtgccctaatgacaacagcaacagagactacttattccccagataattgtctggagggtacctggcagctggcacgcaagtttctcactgccggccccgtccaccagggctgggggcggggtgggcggggctgcagcttcacgatcccacaggagccttgcaaaggttctgagtgggagaagactggtgtgctgcacgggcttcgaaagaaggggctgtgaggagcacgagccatcatgaagagagcctgtgatgactctgaatagagacgcccgcccatcagctacacacctgatggtggctctcaagctatcctctcaggaagcctctgggaggggcgacaaaggctgccccagttgcctagctctggctcactggcccaagctgccttttagcttgaactcctaaaatccaagcaccttggccattctcttcctaggccaccgaggccgcggggaagcttggttctactttccttctcaacacctggagaagcagctgcccggtggtggtgactaacgtatcagggcctgatggcttatgaggaatgacaattaattcctcataagcagtttttaaatgtgaatagtaatcctaggcactgctgacttgaggttttattttcttcgatctcaggacttcaggagagaagcagagcagaagtagagagaggatgggtgtccattgtccgtgtggtacttgagggggatacagcctggaaaacacgtttcctgtccccctactctcccagaagaggtagggggtggcgcctcttccagggcagagagtataactactttacctggccttgcccatactggtttcaactggacttgagctactaggaaaaatgacattcatgcaaaaagaaaactttaactagcaagaatgcacttccactttggtttctagaggactgttgctcctcttgagacgctggaagaggccgctcactgtaccctggtgtatgagccctcaccccccaccccagggtaagtgcagtaactttagtctaaacaccgagtcaggtaaaaatcgaggaaaaaacaaccctgtttcctgtaacagaaaagcctttggtttcgttttgtattttgattttttttttgtcttaaaaagtgtaaaaatagtctgtccatactctgcttcagggaatgacctgtgaatactccccaggcgtgggcaggaagggtgtctgcttcctgctacacctcactgccacctcggccttccttgctttacattcaactgagttgcctcagctgctttcccctggggcgctgaaaaagccagtgatgttggtggtcaccgagaagaccacagagccacagagtaatgctgtgattgaagcgagttacgcaaccacagcaccccacatttgctgtattatagaactatgctaggagcttgccttttcacaaaataccaccaccacgagacgtggcagagctcggaagctgtcaccttgtgccatctgcttgccagctccaaggggccactgacttaagcagttattttctttgtgggctttgttcatttcagggcctgttgctgtcttagaaaaagctctgtcggttgacaaaaacatcagacaggtagtcatgtttatttattttttttccttctttgctaagtctttgggactcaagggtagtaaaaaatgctgtgaaaagggaaacattagaaacagcgatcttcggggaataggtgactgtgcccacgcactgttcttcagtccctcacgtggctctgcccgagtgctgttccaagccaggcagagcaggctggcggaagattgaaatccagatagctcgttatctctgagagctaaatagctttgatctccaagctgttattgctttcactattgtaacaggatagcctccccccccatgtcaaaaggatgcttttcccttttgactttttataagctaagtcagtgaagtctgtttcatctgagctccagcttcgttcagttcgcacaggtgtatgccctcagctgcttcgggcctcagatctgtgctagttgaatggttgtcccatccttgggtcatccttaccagagtttctgcagcccacaggtctgccttgtcaacagtaccacttaacaccagcattcagtgcccaggcagccagatgtggagggtttacccagagatgatttaaacatgaccttaaacgtgtatggtagaacgaggggaacccataccagctcaggttctaaagagatctttgattcttctggcattagtgaaatagctttaaactatttcaaggaagaagccttggccacacccacgacatttggtgacaatcctttctctccatgagccttgtctttacaccttctcacctggctgaaagctcacactgaatctttcctatgtccctggtgtcttgggagaaaggaaactggtatgggcttcactgctggaattggcttggagccagcgtgtggcgcagccctggcagggtgggccaggcttagttatggtgtgctggtttaaggaatgcctggcttgcctggttgcttgggttctgagctgcagagtttcctagcagttctttatggctgacctagttggggaagattcccacactcaactgcaggtggaggtggtgagaaagctgttttcatttggagaggcaggatcagcccaagaagctttcagtgggagagcctacagtgaggctgtacctcactgtgggaggaggcaggccagctggctcaggtcctgggactggcactggggagggtctgccaaaggtccctccagcctgtagtcctagcatagtcgggtgccagttccaggaagtttctatggcaaccttagtgctcattaaggaacattgtcagttttgtgaacatatgctcagatggagatcttgttttcagagaaaggactggtacagtgtgtaacaagctggagcagacagagagactttttggcaagagatcacatccgttaagcagaatacctcagtgctacatgtttttgtctttgagacaatgtttttaaggtttttatgctctgttacctgtaagctgatacctaaaactttctgcaaagtcagggtttttcaatgccttttttttttttttgccattgtttgctttaaagtgaagattgtaactgtttgaaataaataatttctaaaactg

SEQ ID NO: 3254 - DNA, 2069 bp, Rattus norvegicus
  Genbank Accession No. NM_017023
caatcacacaactccactcgagttagccattgaaagccaatgcaagtaaatgtcattccaaagcttaagattcattaaggtgggcctaaaagaagacagctgctgtgcagacaacgtcgaacaagcaccacttgcttgctttgcccagcatgggcgcttcggaacggagtgtgttcagagtgctgatcagggcactgacagaaaggatgttcaaacacctccgaagatggtttatcactcacatatttgggcgttcccggcaacgggcaaggctggtctctaaagaaggaagatgtaacatcgagtttggcaatgtggatgcacagtcaaggtttatattctttgtggacatctggacaactgtgctggacctgaaatggaggtacaaaatgaccgtgttcatcacagccttcttggggagttggttcctctttggtctcctgtggtatgtcgtagcgtatgttcataaggacctcccagagttctacccgcctgacaaccgcactccttgtgtggagaacattaatggcatgacttcagcctttctgttttctctagagactcaagtgaccataggttacggattcaggtttgtgacagaacagtgcgccactgccattttcctgcttatcttccagtctattcttggagtgatcatcaattccttcatgtgtggtgccattttagccaagatctctagacccaaaaaacgtgctaaaaccattacgttcagcaagaatgcggtgatcagcaagcgtggcgggaagctctgcctcctcatccgagtggccaatcttaggaagagccttctgattggcagccacatatatggcaagcttctaaagacaaccatcactcctgaaggcgagaccatcattttggatcagaccaacatcaactttgtcgtcgacgctggcaatgaaaatttgttcttcatatccccactgacgatctaccacattattgaccacaacagccctttcttccacatggcagcagaaactctttcccaacaggactttgagctggtggtctttttagatggcacagtggaatccaccagtgcaacctgccaggtccgcacgtcatacgtcccagaggaggtgctttggggctaccgtttcgttcctattgtgtccaagaccaaggaagggaaataccgagttgattttcataacttcggtaagacagtggaagtggagacccctcactgtgccatgtgcctctataatgagaaagatgccagggccaggatgaagagaggctatgacaaccctaactttgtcttgtcagaagttgatgaaacggacgacacccagatgtagcagtggcttttccacctacaaaaagcctcccaaggacctaagggttgactgtgttcagaagcatctgacgggggtctgaaagcaggatgagaacatgcgaaatctgctagcacagtcacccctgaaccccagggctatggttctacaagacacatagctctataaggctgcatacggtgcatgcatgtgaatgaaactgtggaagccaaaggggcccacttggatcctcactatgactgtgtaagctcatatcgtgttgatggaaacaaagtcattcaaggacaaaacttaggagctttagaaagcttcaggaactagccacatttcctgtttgattctatggatgagaaagatgccatttttatcttaaagtagacttctatcaatggaaaatctgccctctgcgctgggaagtgagccagccaatcagtgacaataagagactgtcatacaaagaatcagtaaagactctaaccttctcaagctctggtgtttgaagcctttgtctgagtctgggtccatgcttcagaaggggtaaggtgacatccactgactgtacctctctgaacccaaggtacagaagaacaggaagccccaatcaacttcataatcaacccagatgctgcagcccatacagaatttggcctgaatgatttcctgtggagcattaaatggaggccaagtccactctttagatattaaatgaatattcttttgcaaaggaaaaaaaaaaaaaaaaaaaaa

SEQ ID NO: 3255 - DNA, 1609 bp, Rattus norvegicus
  Genbank Accession No. NM_017025
gtgtgctggagccactgtcgccgatctcgcgcacgctactgctgctgctcgcccgtcgtcccccatcgtgcactaagcggtcccaaaagattcaaagtccaagatggcagccctcaaggaccagctgattgtgaatcttcttaaggaagaacaggtcccccagaacaagattacagttgttggggttggtgctgttggcatggcttgtgccatcagtatcttaatgaaggacttggctgatgagcttgcccttgttgatgtcatagaagataagctaaagggagagatgatggatcttcagcatggcagccttttccttaagacaccaaaaattgtctccagcaaagattatagtgtgactgcaaactccaagctggtcattatcaccgcgggggcccgtcagcaagagggagagagccggctcaatttggtccagcgaaacgtgaacatcttcaagttcatcattccaaatgttgtgaaatacagtccacagtgcaaactgctcatcgtctcaaacccagtggatatcttgacctacgtggcttggaagatcagcggcttccccaaaaacagagttattggaagtggttgcaatctggattcggctcggttccgttacctgatgggagaaaggctgggagttcatccactgagctgtcacgggtgggtcctgggagagcatggcgactccagtgtgcctgtgtggagtggtgtgaacgtcgccggcgtctccctgaagtctctgaacccgcagctgggcacggatgcagacaaggagcagtggaaggatgtgcacaagcaggtggttgacagtgcatacgaagtgatcaagctgaaaggttacacatcctgggccattggcctctccgtggcagacttggccgagagcataatgaagaaccttaggcgggtgcatcccatttccaccatgattaagggtctctatggaatcaaggaggatgtcttcctcagcgtcccatgtatcctgggacaaaatggaatctcagatgttgtgaaggtgacactgactcctgacgaggaggcccgcctgaagaagagtgcagataccctctggggaatccagaaggagctgcagttctaaagtcttcccagtgtcctagcacttcactgtccaggctgcagcagggtttctatggagaccacgcacttctcatctgagctgtggttagtccagttggtccagttgtgttgaggtggtctgggggaaatctcagttccacagctctaccctgctaagtggtacttgtgtagtggtaacctggttagtgtgacaatcccactgtctccaagacacactgccaactgcatgcaggctttgattaccctgtgagcctgctgcattgctgtgctacgcaccctcaccaaacatgcctaggccatgagttcccagttagttataagctggctccagtgtgtaagtccatcgtgtatatcttgtgcataaatgttctacaggatattttctgtattatatgtgtctgtagtgtacattgcaatattacgtgaaatgtaagatctgcatatggatgatggaaccaaccactcaagtgtcatgccaaggaaaacaccaaataaaccttgaacagtg

SEQ ID NO: 3256 - DNA, 1842 bp, Rattus norvegicus
  Genbank Accession No. NM_017033
cgccagagccgcagcttctctcgccccgcagcccgtcgccaccatggtgaagatcgtgacagtgaagacgcaggcatatccggatcagaagccgggcaccagcgggttgcggaagcgagtgaaggtgttccagggcaacgctaactatgcggagaatttcatccaaagcatcgtctccaccgtggagccggcgttgaggcaggaggctaccctggttgtgggcggggacggtcgcttctacatgaccgaggccatccagctcatcgtacgcatcgccgcagccaacgggattggccgcctggttattggacagaatggaatcctctccactcctgctgtatcctgcattatccgaaaaatcaaagccattggtgggatcattctgacagctagccacaatccaggagggcccaatggagattttggaattaaattcaatatttctaatgggggtcctgctccagaagcaatcactgataaaattttccaaatcagcaagacaatcgaagaatatgccatttgccctgacttgaaggtagacctcggtgttctggggaagcagcagtttgacttggaaaacaagttcaagcccttcacagtggagatcgtggactcagtcgaggcctatgccacaatgctgagaaacatctttgatttcaacgcactgaaggagctactctctggcccaaacagactgaagatccgcatcgacgccatgcacggagttgtgggaccgtacgtcaagaagatcctctgtgaagaacttggtgcccccgcaaactcagctgtgaactgtgttcccctggaggattttggaggccaccaccctgaccccaacctcacctacgctgctgacctggtggaaaccatgaagtcaggagagcatgatttcggggctgcctttgatggtgatggggataggaacatgattctgggcaagcacgggttctttgtgaacccttctgactctgtggctgtcattgcagccaacatcttcagcattccgtatttccagcagactggggtccgcggcttcgcacgcagcatgcccaccagtggtgctctggaccgggtagcaaacgccacaaagatcgcttcgtatgagaccccaactggctggaagttttttgggaatttgatggatgcaagcaagctttccctctgtggagaggagagctttgggactggttcagaccacatccgagagaaagatggactgtgggctgtcctggcctggctctccattctggccacccgcaaacagagggtggaggacattctcaaagaccactggcagaagtttggtcggaacttcttcaccaggtatgactacgaggaggtggaagccgagggggcaaacaaaatgatgaaggacctggaggccctgatgctggaccgctcctttgtggggaagcagttctcagcaaacgataaagtctacacggtggagaaagctgataacttcgaatatagtgacccagtagatggaagcatttcaaaaaatcagggcttgcggcttatttttgcagatggttctcgtatcatcttcagactgagcggcaccgggagtgctggggctaccatccggctctatattgatagctacgagaaggacgctgccaagatcaaccaggacccccaggtcatgctggcacccctgatctccattgctctgaaagtgtcccagctccaggagaggacaggccgcactgccccaactgtcatcacctagagagatggctggatgtggcacatcctccccaggaactgtccacactgcctgattgaagagcacagacagaacagtgtattcgacctggcctttagactcatcttatttta

SEQ ID NO: 3257 - DNA, 1804 bp, Rattus norvegicus
  Genbank Accession No. NM_017039
ctggggccgcaggaagcaccccggggagcggcggcggcgtgtgcgtgtggcccgggtgcgggcggcggcgcgggagcagcgcagagcggcagccggttcgggcgggcggcatcatggacgagaagttgttcaccaaggagctggaccagtggatcgagcagctgaacgagtgcaagcagctctccgagtcccaggtcaagagcctctgcgagaaggctaaagaaatcctgacaaaagaatctaatgttcaggaggttcgatgtccagtcactgtgtgtggagatgtgcatgggcaatttcatgacctcatggaactctttagaattggtggtaaatcaccagatacaaattacttgtttatgggagactatgtggacagaggatattactcagttgaaacagttacactgcttgtagctcttaaggttcgttaccgagagcgtatcaccatactccgagggaatcacgagagcagacagatcacacaagtttatggtttctacgatgagtgtttaaggaaatacggaaatgcaaatgtttggaaatacttcacagacctttttgactaccttcctctcactgccttggtggatgggcagatcttctgtctacatggtggtctttcaccatccatagacacactggatcacatccgagcacttgatcgcctacaagaagttcctcatgagggtccaatgtgtgacttgctgtggtcagatccagatgaccgtggtggctgggggatatctcctcggggagctggttatacctttggccaagatatttctgagacatttaatcatgccaatggcctcacgttggtgtccagagctcaccagctggtgatggagggatataactggtgccatgaccggaatgtagtaacaattttcagtgctccaaactattgctatcgttgtggtaaccaagctgcaatcatggaacttgatgacactcttaagtattctttcttgcagttcgatccagcacctcgtagaggcgagccacatgtcactcgtcgtaccccagactacttcctgtaatgaaagtttaaccttgtacagtattgccatgaacaccgtctgttgacctaatggaatcgggaagagcagcagtaactccaaagtgtcagaaatagttaacattcaaacttgtttccacacggaccaaaagatgtgccatataaaatacaaagcctcttgtcatcaacagccgtgaccactttagaatgaaccagttcattgcatgctgacgcgacattgttggtcaagaatccagtttctggcatagcgctatttgtagttacttttgctttcttgagagactgcagatctaggatgtaacattaacacctgtgagtccagttgacttccacttagctgtagcttactcagcatgactgtagatgaggatagcaaacaatcattggagcttaatgaacatttttaaatgagtaccaaggcctcccctcttgttgtgttctttcagggatactattaatttaattgtatgatttctctgcactcagtttctcccttctcaaatctcggccccgcgttgttctttgttactgtcagaaaacctggtgagttgttttgaacagaactgtctccctcctgtaagatgatgtactgcacaagtcaccgcagtgttttcataataaacttgagaactgagaaagtcaggtttgaattgtatcagtgggcacgactggtgctgtttattaaacaagataaatctattgatcaatttcagaatttgtagaattccaggtaaagaaaaataaagatcaaggccactatat

SEQ ID NO: 3258 - DNA, 1843 bp, Rattus norvegicus
  Genbank Accession No. NM_017040
ggcacgagcgccgagagaaccgcggccagagcgcggagaggcctgcgggcggcgacggcagcgggagggcgggcgccgtcgggccggagcctcccccgagccgcgccgcgctctggctccgagccgtgagccctttttgccgcgccccgagcgcgtggccgggggccgggcggggcgggcgctcccggaggccggggccggcggctgcccgctgggcttgggcggggcgcgggctgcccgctccgcggctcggtggtcccgccgggggccggcggcgggggaggcggcggggacgcgcggctcgccgccatggacgacaaggcgttcaccaaggagctggaccagtgggtggagcagctgaacgagtgtaagcagctgaacgagaaccaagtgcggacgctgtgcgagaaggctaaggaaattttaacaaaagaatcaaatgtacaagaggttcgctgtcctgttaccgtctgtggagatgtgcatggccaattccatgaccttatggaactcttcagaattggtggaaaatcaccagacaccaactatctattcatgggtgactatgtagacagaggatattattctgtggagaccgtgactcttcttgtagcattaaaggtgcgctatccagagcgtatcacaatattgcgaggaaatcatgaaagccggcagatcacacaagtatatggcttttatgatgaatgcctacgaaagtatgggaacgccaacgtgtggaaatactttacagatctctttgattatcttccacttacagctttagtagatggacagatattctgcctccacggtggcctctctccatccatagatacactggatcacataagagccctggatcgcttacaggaagttccacatgagggcccaatgtgtgatctcttatggtcagatccagatgaccgtggtggctggggcatttctccacgtggtgctggctacacatttggacaagacatttctgaaacatttaaccatgccaacggcctcacactggtgtcccgtgctcaccagcttgtaatggaaggatataattggtgccatgatcggaatgtggtcaccatttttagtgcacccaattactgctaccgctgtgggaaccaggctgctatcatggaattagacgacactttaaaatactcttttcttcagtttgacccagcacctcgtcgtggagagcctcatgtgacccggcgcaccccagactacttcctataaattcctccccaggacctgtctttgtatgttgaagtatacctggctttttaaaaaatatatatacatatatatatttaaaaacaacagttatctgtgtgtctctgtaacaaattgtgctatgtcttgacgttaaaacacatcatggaccaaaacgtgccatactaatggtgagccatcagcacggtgtgaacttgagtccactgtcctagccgagtcaaccaggcagccgcctgcccgcctgcctgctgtagtagccgtccttcgtgactggttaagggaaagggtcactggtggcttcatctcctttgcgcttacttggaaatttagttacaagtttaactggcatggattatagagttggagttttatttttaagaattgacaagctgacttccacttaaattcataaccctttattttgttgaaatgtatgactaactgaagaagagattcttggagtatgttgtcataacactaagatttcctttcaagtttcctgaactgaattactgttggatgttgacctgcacattctgtatatttgtcctgacagtgttgcatcctccttgctgtactgaacaaataaacttcccaatttagagag

SEQ ID NO: 3259 - DNA, 2337 bp, Rattus norvegicus
  Genbank Accession No. NM_017041
cgggaggaggagtgaaggcggcggcggcggaggagggacgcgcggagccggcagtaactttcgagccagcccagagcccggagctccagccgagcggtttgcagcgcggcggcgcggcgctgagtgtctggcccgccggtgcggtcggggtgtgcagtcggacgggaccagcagcgcgtcgctgtccccccctcccggtgactggagatgtccgagcccaaggcgattgatcccaagttgtcgactacggacagggtggtgaaagccgttccatttccgccaagtcaccggctgacagcaaaggaagtgtttgataacgatgggaagcctcgtgtggatatcttaaaagcacatctcatgaaggaaggcaggctggaagaaagtgtcgcgttgagaataataacagagggtgcttcgattctccgacaggaaaaaaacttgctggatattgatgccccagtcacagtttgcggggacatccatggacaattctttgacttgatgaagctctttgaagtgggaggatctcctgccaacactcgctacctcttcttaggggactatgttgacagagggtacttcagtatcgaatgtgtgctgtatttgtgggccttgaaaattctttaccccaaaacactgtttttacttcgtggaaaccatgaatgtaggcacctaacagagtatttcacgtttaaacaagaatgtaaaataaagtattcagaacgcgtttatgacgcctgtatggatgccttcgactgccttcccctggctgcgctgatgaaccaacaattcctgtgtgtacacggtggtttgtctccagagattaacactctagatgacatcagaaaattagaccgattcaaagaaccacctgcttatgggcctatgtgtgacatcttgtggtcagaccccctggaggactttggaaatgagaagactcaggaacatttcactcacaacacagtcaggggttgttcgtacttctacagttacccggctgtatgtgacttcctgcagcacaataatttgttgtccatactccgagcccacgaagcccaggacgcagggtaccgcatgtacaggaaaagccaaacaactggcttcccgtctctaattacgatcttctcggcaccaaattacttagatgtgtacaataataaagctgcagtgttgaagtacgagaacaacgtgatgaacatcaggcagttcaactgctccccccatccgtactggctcccaaatttcatggatgttttcacctggtcgctgccatttgttggggagaaagtgactgagatgctggtaaacgtcctgaacatctgctcagatgatgaactggggtcagaagaagatggatttgacggagccacggctgcagcccggaaggaggtcatcaggaacaagatccgagcaataggcaaaatggccagagtattctcagttctcagagaagagagtgagagcgttctaactctgaagggcctgaccccgactggcatgctccccagcggagtgctctctggcgggaaacaaactctgcaaagcgctactgttgaggccattgaggctgatgaagccatcaaaggattctcaccacaacataagattaccagcttcgaggaggccaagggcttagaccgaattaacgagaggatgccgcctcgcagagacgccatgccttccgacgccaaccttaactccatcaacaaggctctcgcctcagagactaacggcacagacagcaacggcagtaatagcagcaatattcagtgaccacttcctgttcactttttttttttgagctgcagggcatgatgggtttgctgcatctcagcagttggatgttcttgcctctgacggtagcttgtttgctctgggggggccaggaattggattcagtttacactatcatgaaaaaaaaaaagagggagagagagagagataataaaactatattttggtgagggtggtgattaaacacctcttttgggtatgcctttaaaaatgcttctaggaaaaaaaaagttttaaaaagaaagctaatgctagtctatacttcaatgttaggggaatgaacacgttttcctagcgcactggggacttttagataggttaatgaaaggccttttattctgttactggacacgaaaactttgtctaatttcttatactctattgtacgtttacagtcgcagcactaaaaatggatgacatcaaacatttttaaacagaaaaaaaagatgtacaaactaaataaggactatttattgataatgttttgctactcttgtcagacaatggctataaactgaattaggcagtcttaaaaaaaaaccg

SEQ ID NO: 3260 - DNA, 1663 bp, Rattus norvegicus
  Genbank Accession No. NM_017047
cagccacattttgtccacaaactctgtcctgaaaggggactgactgaagaaaacatccagcaagctctgggcaaggaaggacagcagcagagagcgagggccgtgttcgctgtgccagaggatggaggtgcacaacgtatcagcccctttcaatttctccctgccgcctggctttggccaccgggccacagacaaggcgcttagcatcatcctggtgttaatgttgctgcttatcatgctctcactgggctgcaccatggaattcagcaagatcaaggctcacttgtggaagcccaaaggggtgatcgttgccttggtggcccagtttggcatcatgcccctcgctgcttttcttctcggcaagatctttcacctgagcaacattgaagctctggccatcctcatctgtggctgctctcccggggggaacttgtccaacctcttcaccctggccatgaagggggacatgaacctcagcatcgtgatgaccacctgctccagcttcagtgccttgggcatgatgccactcctcttatacgtctacagcaaaggcatctacgatggagaccttaaggacaaggtgccctacaaaggcattatgatatcactagtcatagttctcattccttgcaccatagggatcgtcctcaagtccaaaaggccacactatgtaccctacatcctcaagggaggcatgatcatcaccttcctcctctctgtggctgtcacagccctctctgtcatcaatgtgggcaacagcatcatgttcgtcatgacaccacacttactggctacctcctccctgatgcccttctctggctttctgatgggttacattctctctgctctcttccaactcaatccaagctgcagacgcaccatcagcatggaaacaggattccaaaacattcaactctgttctaccatcctcaatgtgaccttcccccctgaagtcattgggccacttttcttctttcctctcctctacatgattttccagcttgcagaaggacttctcatcatcattatcttccggtgctatgagaaaatcaagcctccaaaggaccaaacaaaaattacctacaaagctgctgcaactgaggatgctactccagcagctctggaaaaaggtacccacaatgggaatattcctcctctccaacctggtccttcccctaatggcctgaattctggtcagatggcaaattagaatgtgaaacttcgaagcagcaagaaaaggaacgaacgtcgacgttgccggaatgtttgtctagcacttcgggcaaaccatcagaaccatggagccatgaactgagacagaagggcatctatctatccagtaactgtaacccataccaatttgcttttgtttaaattttctatttaaaagataaacaagaattaggcaaaaatgttcctgcctataatcccgatgctcagaaactcaagatcaaccttaagtatacaaaacaagactgtctcaagaaaccaaaaacacttttcagtggctatgaactctatgaaagctgaaccaaacagcttcatctgataaacattaacttcactatttccaaactttccagtaagcaggtgttttgttcattaaacatccacaacctgcttcatgttactcaaaatgaaataaagtgcaactcctagttct

SEQ ID NO: 3261 - DNA, 650 bp, Rattus norvegicus
  Genbank Accession No. NM_017050
gttttgcaccttcgtttcctgcggcggcttctgtcgtctccttgctttttgctctcccaggttccgaggccgccgcgcgtctcccggggaagcatggcgatgaaggccgtgtgcgtgctgaagggcgacggtccggtgcagggcgtcattcacttcgagcagaaggcaagcggtgaaccagttgtggtgtcaggacagattacaggattaactgaaggcgagcatgggttccatgtccatcaatatggggacaatacacaaggctgtaccactgcaggacctcattttaatcctcactctaagaaacatggcggtccagcggatgaagagaggcatgttggagacctgggcaatgtggctgctggaaaggacggtgtggccaatgtgtccattgaagatcgtgtgatctcactctcaggagagcattccatcattggccgtactatggtggtccacgagaaacaagatgacttgggcaaaggtggaaatgaagaaagtacaaagactggaaatgctggaagccgcttggcttgtggtgtgattgggattgcccaataaacattccctatgtggtctgagtctcagactcatctgctgtcctgctaaactgtagaaaaaaaccaaaccattaaactgtaatcttaacagtt

SEQ ID NO: 3262 - DNA, 1492 bp, Rattus norvegicus
  Genbank Accession No. NM_017051
gagcagacgcgcggctgctagcgaacggccgtgttctgaggagagcagcggtcgtgggcgcctcagcaatgttgtgtcgggcggcgtgcagcgcgggcagaagactgggccccgcggccagtaccgcgggctcccggcacaagcacagcctccctgacctgccttacgactatggcgcgctggagccgcacattaacgcgcagatcatgcagctgcaccacagcaagcaccacgcgacctacgtgaacaatctgaacgtcaccgaggagaagtaccacgaggcgctggccaagggagatgttacaactcaggttgctcttcagcctgcactgaagttcaatggcgggggccatatcaatcacagcattttctggacaaacctgagccctaagggtggtggagaacccaaaggagagttgctggaggctatcaagcgtgactttgggtcttttgagaagtttaaggagaaactgacagctgtgtctgtgggagtccaaggttcaggctggggctggcttggcttcaataaggagcaaggtcgcttacagattgccgcctgctctaatcaggacccactgcaaggaaccacaggccttattccactgctggggattgatgtgtgggagcacgcttactatcttcagtataaaaacgtcagacctgactatctgaaagccatttggaatgtaatcaactgggagaatgttagccaaagatacatagtttgcaagaagtgaagcccttccgccagctgtgtgtcaggcccgtggtgggtgttttgtagtagtgtagagcattgcagcactgtggctgagctgttgtaatcttcattgatgcctatccacatatgtgtaagcatacagttatgataatttcttaattaaatgtattgttaggcactgtttgagaacagtacatacttggtgtgagctgctcttgattgaacattttcattagaggcttgaattgcttggacgctgtcactgtcatcataaggccatcaaagatattccatctctgtgttggggcctgtggggaggctgtaatcctgttctactgcagttaggaaaaaaatgagttaccccccccccccagaattgttgaataataaaatagagaactgaatagttctcttttgtgttaaaaattgctatttttcataagtaatcctttgtttagcggatatcacctagtggtctttatttatggccacagtttcacagaaacatcattttttcacttgaaacgtgtaactaggctaaggatggatggagtggtagacctttgcctgtcttatgtgaggccctgggctctacctcactactgaacaaatcaacagacccaagctaggctcctgactgacaactgttaattcggagaggagtgacattgtgcctctgggtttttttataggctgagatgcaaaaactgttaccttgtctattaaaaccgactgtgtattgtatgaaagtgctcaagatggacaaagtat

SEQ ID NO: 3263 - DNA, 2275 bp, Rattus norvegicus
  Genbank Accession No. NM_017055
ccacacacaccgagaggatgaggttcgctgtgggtgccctgctggcttgtgccgccctgggactgtgtctggctgtccctgacaaaacggtcaaatggtgcgcagtgtctgagcatgagaacaccaagtgtatcagtttccgtgaccacatgaaaaccgtccttccagctgatggcccccgcttgccctgtgtgaagaaaacctcctatcaagattgcatcaaggccatttctggaggtgaagctgatgccattaccttggatgggggttgggtgtacgatgcaggcctgactcccaacaacctgaagcctgtggcagcagagttttatggatcacttgaacatcgacagacccactacttggctgtggccgtggtgaagaagggaacagacttccagctgaaccagctccagggcaagaagtcctgccacactggcctgggcaggtctgcaggctggattatccccattggcttacttttctgtaacttgccagagccccgcaagcctcttgagaaagctgtggccagtttcttctcgggcagttgtgtcccctgtgcagatccagtggccttcccccagctgtgtcaactgtgtccaggctgtggctgctccccgactcaaccgttctttggctacgtaggcgccttcaagtgtctgagagatggaggtggagatgtggcctttgtcaagcatacaaccatatttgaggtcttgccacagaaggctgacagggatcaatatgagctgctctgccttgacaatacccgcaagccagtggatcagtatgaggactgctacctagcccggatcccttctcatgctgttgtggctcgaaatggagatggcaaagaggacttgatctgggagatcctcaaagtggctcaggaacactttggcaaaggcaaatcaaaagacttccaactgttcggctctcctcttgggaaagacctgctgtttaaggattctcgctttgggctgttacgtgcccccaaggatggactacaggctgtacctcggccacagctatgtcactgccattcgaaatcagcgggaagctgtccggatgccatcgacagcgcgccagtgaaatggtgtgcactgagtcaccaagagagagccaagtgtgatgagtggagcgtcacaggcaatgggcagatagagtgtgagtcagcagagagcactgaggactgcattgacaagattgtgaatggagaagcagatgccatgagcttggatggaggtcatgcctacatagcaggccagtgtggactagtgcccgtcatggcagagaactatgatatctcttcgtgtacaaacccacaatcagatgtctttcctaaagggtattatgccgtggctgtggtgaaggcatcagactccagcatcaactggaacaacctgaaaggcaagaagtcctgccatactggagtagacagaaccgccggctggaacatccctatgggcctgctgttcagcaggatcaaccactgcaagttcgatgaatttttcagtcaaggctgtgctcctggctataagaagaattccaccctctgtgacctgtgtattggcccagcaaaatgtgctccgaacaacagagagggatataatggttatacaggggctttccagtgcctcgttgagaagggagacgtagcctttgtgaagcaccagactgtcctggaaaacacgaacggaaagaacactgctgcatgggctaaggatctgaagcaggaagacttccagctgctgtgccctgatggtaccaagaagcctgtaaccgagttcgccacctgccacctggcccaagctccaaaccatgttgtggtctcacgaaaagagaaggcagcccgggttagcactgtgctgactgcccagaaggatttattttggaaaggtgacaaggactgcactggcaatttctgtttgttccggtcttccaccaaggaccttctgttcagagatgacaccaagtgtttgactaaacttccagaaggtaccacatatgaagagtacttaggagcagagtacttgcaagctgttggaaacataaggaagtgttcaacctcacgactcctagaagcctgcactttccacaaaagttaaaatccaagaggtgggtgccactgtggtggaggaggatgcccccgtgatccatgggcttctcctggcctccatgccctgagcggctggggctaactgtgtccgtcttcactgctgtgtgttaccacatacacagagcacaaaataaaaaatgactgttgactttaaaaaaa

SEQ ID NO: 3264 - DNA, 966 bp, Rattus norvegicus
  Genbank Accession No. NM_017060
  misc_feature (1)..(966): n = a or c or g or t
ggcgtgaggaggttggagagttttttctgggacctaaacaaaggcacccncggccctnctaanctgaagttgagcctcacatatcctggaaaggaaaatgcccataccagaacccaagcctggagatctgattgagattttccgccctatgtacagtcactgggccatctatgttggtgatggatatgtgatccacctggctcccccaagtgaaatcccaggagctggggcagccagcatcatgtctgctttgacggacaaggccatagtgaagaaagagctgctgcgtgatgtggctgggaaggacaagtaccaggtcaacaacaagcacgacaaggagtacactccgctgcctctgaacaagatcatccagcgagctgaggagctggtggggcaggaggtgctgtacaggctgaccagtgagaactgtgagcacttcgtgaacgaactgcgttatggagtccctcggagtgaccaggtcagagataccgtcaaggtggcgaccgtcactggagtgggcttggcggccttgggcctcattggagtcatgctctcaagaaacaagaaacagaagcagtgagctgaatgactatccagctttagggctcttcttttgctagagggntggagtttgatttatagattctactgctttataattaggtatattttcacaatatacaataaaccacaagaagggaattttcatggagtacactgtagctatcttcagacacaccagaagagggcaccagatcccattacagatggttgtgagccatcatgtggttgctgggatttgaactcaggacctccggaagagcaatcagtgctcttaaccgctgagccacctctccagccctgaagggctctttcaaaggtttattctttctcctttcacaagtcggcatcgaaacttccaagtgtcctcaaagtccagggctccttggactccataacgtttct

SEQ ID NO: 3265 - DNA, 1548 bp, Rattus norvegicus
  Genbank Accession No. NM_017068
gtcggtggtcgcccgtgctttcgctttctcagggctgtgagggtgttcgttggaattgtcggtccagtcgtcacttgtcctgagggatcacgatgcgccttcctctctccggttacggctcgaagctcgtcctgctctttctgttcctgggagcagttcggtccgatgcattgaaacttaatttgacagattcaaagggtacttgcctttatgcagaatgggagatgaatttcacaataacatatgaagctctaaaagtcaatgaaactgtaaccattacagtgcctgacaaggtgacatacaatggaagcagttgtggcgatgataagaatggtgccaaaataatgatacaatatggatccactctctcttgggctgtgaatttcaccaaggaagcatctcagtattttattaacaacatcacgctttcttacaacactaatgataccaaaacatttcctggtgctgtacctaaaggaatccttactgttatcattcctgtgggatcccagcttccattgggtgtcatctttaagtgcagtagtgttttaactttcaacctgagtcctgttgttcagcactattggggcattcacctgcaagcttttgtccaaaatggtacagtgagtaaacatgaacaagtgtgtaaggaggacaaaactgctaccactgtagcacccatcattcacaccaccgtgccatcgcctactacgacactcactccaacttcaatacccgttccaactccaacggttggaaactacaccatttctaatggcaatgctacctgtctgctggctaccatggggctgcagctgaacatcaccgaggagaaggtgcctttcatttttaacatcaaccctgccacaaccaacttcaccggcagctgtcagccccaaacagctcaacttaggctgaacaacagccaaattaagtatctcgactttatctttgctgtgaaaaatgaaaaacggttctatctgaaggaagtgaatgtcaacatgtatttggctaatggctcagctttccatgtttcaaataacaaccttagcttctgggatgctcctctgggaagttcttatatgtgcaacaaagagcaggtggtttccgtgtctcgaacatttcagataaatacctttaacctgaaggtgcaaccttttaatgtgacgaaaggagagtattctacagctcaagactgcagtgcagatgaagacaacttccttgtgcccatagcggtgggagcagccctgggaggagtacttattctagtgttgctggcttattttattggtctcaagcgccatcatactggatatgagcaattttagcacctacaatctgattgaatatattacaaaatacatacaaataacaaagttgtcttacctgtcagtttatgaaacactttgctacttaagacagactccttggaacttttatttggaaatcagtccccacaatttgagataaggctttttttgaaaaaaaacaaaaaacaacaaaaaaacaaaaaacaaaaaaatcattctctgatctgcttaaaatgca

SEQ ID NO: 3266 - DNA, 5397 bp, Rattus norvegicus
  Genbank Accession No. NM_017071
cccacccagagctgcgggaggaggagaaacgggagacccggccagggaacagcaaccttggtgagctctggactctgcgattgcggacacaggacgggcctgggtgacccggggttgatagtctgcgggccggcacagtgttgcttgcagccgaggcctgtgtgctcttcccaggactgtccccagggccctctaggctggagatctgcggcccgtaagcaccggcgtggaagagaaggacgtgcggcccctagcgcctgcctctccagcgaccttctcgcggagtatgtccccagtgggccggcgtggcgtgctctgatcgccggggtcccagcgctcctactgctatgggctccgggagaggatgtgagacgacggcggtgccgttgctgatggccgtggccgttgctggtggcacagccggccacctgtaccctggagaggtgtgcccgggaatggacatccggaacaacctgaccaggttgcatgagctggagaactgctcggtcattgagggccatctgcagatcctcttgatgttcaagaccagacccgaagatttccgagacctcagtttccccaaactcatcatgatcacagactacctgcttcttttccgtgtctatggcctagaaagtctaaaagacctcttcccaaacctcacagtcatccgaggctcccgtctcttcttcaactatgccctggtcatcttcgagatggtccacctgaaggagctgggtctttacaacctcatgaacatcacccggggctctgtccgcatcgagaagaataatgaactctgctacctggccactatcgactggtcccgcatcctggattacgtggaggacaactacattgtactgaacaaagatgacaatgaggaatgtggggacgtctgtccaggcacagccaagggcaagaccaactgccctgccaccgtcatcaatgggcagtttgtggaacggtgctggacacacagtcattgtcagaaagtttgcccaaccatctgtaagtcacatggctgcacagctgaaggcctgtgctgtcacaaggagtgcctgggcaactgttcagaacccgatgaccctaccaagtgtgtggcctgtcgaaacttctacctggatggtcagtgtgtggagacctgcccaccaccctactatcacttccaggactggcgctgtgtaaacttcagcttctgccaagaccttcactacaaatgcaggaactctcggaagcctggctgtcaccaatacgtcattcacaacaacaagtgcatccccgagtgcccgtctggctataccatgaattccagcaacttgatgtgcaccccgtgtctgggaccctgtcctaaggtctgccaaatcctcgaaggcgagaagaccattgattccgtgacatctgcccaggagctccgaggctgcactgtgatcaatggcagcctgattatcaacatccgagggggcaacaacctggcagctgaactagaggctaaccttggcctcattgaagaaatctcagggttcctaaagatccgtcgctcctatgctctggtgtcactttctttcttcaggaagctacatctgattcgaggagagaccttggaaattgggaactattctttctacgccttggacaaccagaacctgaggcagctgtgggactggaacaagcacaacctcacgatcactcagggcaagctcttcttccactacaaccccaaactctgcctgtctgagatccacaagatggaggaagtgtccggaaccaagggccgccaggagaggaacgacattgccctgaagaccaacggggaccaggcatcctgtgaaaatgaattacttaaattctctttcatccggacgtcttttgacaagatcttgctgaggtgggagccctactggccccccgacttccgagatctcctgggattcatgctgttctacaaagaggccccttatcagaacgtgacagagtttgacgggcaggatgcgtgtggctccaacagctggactgtggtggatattgacccgccccagaggtccaacgaccctaagtctcagaccccaagccaccctgggtggctgatgcggggcctcaaaccctggacccagtatgccatctttgtcaagaccttggttaccttctctgatgaacgccggacctatggagccaaaagtgatatcatctatgtgcaaacagatgccaccaatccttccgttcccctggatcccatatcagtttccaactcctcatctcagattatcttaaagtggaagcccccctcggaccccaatggcaacatcacacactacctggtctactgggagaggcaggcggaggacagtgagctgttcgagttggattattgtctcaaagggctgaagctcccctcacgcacctggtccccaccttttgagtctgacgattctcaaaagcacaatcagagtgagtatgacgactcggccagcgagtgctgctcatgtcctaagactgactctcagatcctgaaggagctggaggagtcttcattcaggaagaccttcgaggattacctgcacaacgtggtttttgttcccagaaaaacctcttcaggcaatggtgctgaggacactaggccatcccgaaagcgaagatcccttgaagaggtgggcaatgtgacagccactacacccacacttccagattttcccaacatctcctccaccatcgcgcccacaagccacgaagagcacagaccatttgagaaagtagtaaacaaggagtcacttgtcatctctggcctgagacacttcactgggtaccgcattgagctgcaggcatgcaatcaggactccccagaagagaggtcaggcgtggctgcctacgtcagtgcccggaccatgcctgaagctaaggcagatgacatcgttggccctgtgacccatgaaatctttgagaacaatgttgtacacttaatgtggcaagagccaaaggaacctaatggtctgattgtgctatatgaagtgagctatcggcgatatggtgatgaggagctgcacctctgtgtctcccggaagcattttgccctggagcggggctgcaggcttcgagggctctctccaggaaactacagtgttcgagtccgggctacctctctggcaggaaatggctcctggacagaacccacctatttttatgtgactgattatttagatgtcccatcaaatattgccaaaattatcatcgggcccctcatcttcgtcttcctcttcagtgtcgtgatcggaagtatttatctattcttgaggaagaggcagccagatgggccaatgggaccactgtacgcttcttcaaacccagagtacctcagtgccagtgatgtctttccatcttccgtatacgttccggatgagtgggaggtacctcgagagaagatcaccctcctccgagagctggggcagggatccttcggtatggtgtacgaaggcaatgccaaggatatcatcaagggtgaggtagagacccgtgttgcggtgaagacggtcaatgagtcagccagtcttcgagaacggatcgagttcctcaatgaggcatcagtcatgaagggcttcacctgtcatcacgtggtccgccttcttggggtggtgtccaaaggccagcccacattggtagtgatggaactgatggctcatggagacctgaaaagtcacctccgttctctgcggcccgatgctgagaacaacccaggccgtcctccccctaccttgcaagaaatgattcagatgacagcagaaattgccgatggcatggcatacttgaacgccaagaagtttgtgcaccgggacctggcagctcggaactgcatggttgcccatgattttactgtcaaaatcggagactttggaatgacgagagacatctacgagacagattactatcggaaagggggcaaggggttgctgcccgtgaggtggatgtcacccgagtccctgaaggacggagtcttcactgcttcttccgacatgtggtcctttggggtggtcctttgggaaatcaccagcctggctgagcaaccttaccaaggcctgtctaatgaacaggtgttgaaatttgtcatggatggaggctatctggatccccctgataactgtccagagagactcactgacctgatgcgcatgtgctggcagttcaaccccaagatgaggccgaccttcctggaaatcgtcaacctgctcaaggacgacctccaccccagctttccggaagtttccttcttctacagcgaggagaacaaggctcccgagagtgaagagctggagatggagttcgaggacatggagaatgtccccttggatcgttcctctcactgtcagagagaagaggctggatgccgcgagggagggtcctctctgagcatcaaacggacctatgatgaacacatcccctacacccacatgaacgggggcaagaagaatgggcgggtcctcaccctgccgaggtcgaacccttcctaacagcgcctgctcgctcggggaaggattcttttcttttctttctttctttttaaaaactcttctgtagtttgactgcctccaggaaactcaggattatcgggactctacccagatgtgaaactgagctcacagatagttcgtacacatttctgtttgtctttggacctgaaaacacacaggtgtggtcgccaaccctgcgagcctgtggagggctaactgtgaacctagaggggttggggtttccatactcccttccctgcccccacggtatcaaaccaagattttattgtttgttgctggtgttttcctcatagattggaaggatgaacctgtttttacagtttttttttttctgctagtgtctgagttatagttagttgtcaaagacagactttatttatggagcacaagtcagaaagcaaagaagaaacagacagaaaaacaaaacaaaaaccaaacctgacctacagaacccagttctggaattgcgtgctttcgcggggttgggctttgagaaggtttcattaatctgagagaaggagcttattttattttagttttgttttatttttttcctcattcacaaaatcagttcctcaaattgaccaatagctgctgctttcatattttattattttgggaaagggtgtgtactcctaagtgtgtgctcatctgcacactgcgtgcatttgcgtgtgtgttgtgtccagggtagcggtcacagggtggggtgggggctgtctgtatgttacatttttctctggattgatgcttggtgacttggctcatgaagcacccgctgcttggagtgggtgacctcatattgtcctcttccttcttatgaaccgagagcttgtgccctcgagagattctcctcagtcacgtcagaactcgctcg

SEQ ID NO: 3267 - DNA, 4503 bp, Rattus norvegicus
  Genbank Accession No. NM_017072
atgacgaggattttgacagcatgcaaagtggtgaagacactgaagagtggctttggtttggccaatgtgacttcgaagcgacagtgggacttctctagacctggcatcaggctcctttctgtgaaggcacagacagcacacattgttctggaagatggaactaagatgaagggctactcctttggccatccctcctcggttgctggcgaagtggtttttaatactggcttaggagggtactcggaagcacttactgatcctgcctacaaggggcagatcctcaccatggccaaccctatcattgggaatggtggggcccctgatacaacggcacgtgatgaactgggactgaataagtacatggagtctgatggaatcaaggtggcgggtctgctggtgctgaattacagtcatgactacaaccactggctggccaccaagagtctgggtcagtggctgcaggaggagaaggtccctgcaatttatggagtggatacaagaatgctgactaaaataattcgggataagggtaccatgcttgggaagattgagtttgagggccagtctgtggactttgtggatcctaataagcagaatttgattgccgaggtttcaaccaaggatgtcaaggtgtttggcaaaggaaaccccacgaaagtggtagccgtggactgtgggataaaaaacaatgtcatccgcctgctagttaagcgaggagcggaagtgcatttggtcccctggaatcatgacttcacccagatggactatgacggacttctgatcgctggaggacctgggaacccagctctggcacagccactaattcagaacgtgaagaagattttggagagtgaccgcaaagagccgttgtttggaatcagtacaggaaacataataacaggattggctgctggcgccaaatcctacaagatgtccatggccaacagaggacagaaccaacctgttttgaatatcacaaacagacaggctttcataactgctcagaatcatggctatgctctggacaacaccctccctgctggctggaaaccactgtttgtcaatgtcaatgaccaaacaaatgaggggattatgcatgagagcaaacccttcttcgctgtgcagttccacccagaggtcagcccggggccaacagacactgagtacctatttgattccttcttctcgctgataaagaagggcaaaggcaccaccattacctcagttctgcccaagccagcattggtggcatctcgagtcgaggtttccaaggtccttatcctaggatcaggaggcctgtccattggtcaggcaggtgaatttgattactccggatctcaggctgtaaaagccatgaaggaagaaaacgtcaaaacagtcctgatgaacccgaacattgcatccgtgcagaccaacgaggtgggattgaagcaggcagatgcagtctactttctccctatcaccccccagtttgtcacagaagttatcaaggctgaacggcccgatgggttaattctgggcatgggtggccagacagctctgaactgtggagtggaactattcaagaggggtgtgctcaaggaatatggtgtgaaggtcttgggaacatcggtcgagtccattatggccacagaagacaggcagcttttctcagacaagctgaatgagatcaacgagaagattgctcctagctttgcagtggaatcaatggaggatgccttgaaggcagcagacaccattggctaccctgtgatgattcggtctgcgtatgctctgggtgggttaggctccggcatctgtcccaacaaggagaccttaatggatcttggcacaaaggcatttgctatgaccaaccagatcctggtggagcggtcagtgacaggttggaaagaaatagaatatgaagttgtccgagatgcggatgataactgtgtcacagtctgtaacatggagaatgttgacgccatgggtgttcacacaggtgattcagttgttgtggccccggcccagaccctctccaatgcagagttccagatgttgagacgcacttcaatcaatgttgttcgccacttgggcattgtgggtgaatgcaacattcagtttgctcttcaccccacttccatggaatactgtatcattgaagtgaatgccaggctctccaggagttctgccctggcctccaaggccactggctacccactggcgttcatcgcagcaaagatcgctctaggaatcccacttccagaaatcaagaatgttgtgtctgggaagacctcagcctgcttcgaacctagcctggattacatggtgaccaagattcctcgctgggaccttgaccgttttcatggaacatccagccgaattggtagctcaatgaaaagtgtaggcgaggtcatggccattggtcgcacctttgaggaaagtttccagaaggctctgaggatgtgccatccatctgtggatgggttcactccccgtctcccaatgaataaggaatggccagcaaacctggatctgaggaaggagctgtctgaaccctccagcacccgcatctatgccattgctaaggccttggaaaacaacatgtcccttgacgaaatcgtgaagctcacatccattgacaagtggtttttgtataagatgcgtgacattttaaacatggataagacactgaaagggcttaacagtgagtctgttacagaagaaactctgagacaggccaaagagattgggttctcagacaagcagatttcaaaatgtttaggactgaccgaggctcagacaagagagctgagattgaagaaaaacatccacccttgggttaaacagattgatacattggctgcagaatacccatcagtgacaaattacctgtatgttacctacaatggccaggagcacgacatcaaatttgatgaacatggaataatggtgctgggctgtggcccataccacattggcagcagtgtggaatttgattggtgtgctgtctccagtatccgcacactgcgccaacttggcaagaagacggtggtggtgaattgtaacccggagactgtgagcactgactttgatgagtgtgacaaactctactttgaagagctgtctttggagagaatcctagatatctaccaccaggaggcatgtaatggctgcatcatatcagtcgggggccagattccaaacaacttggcggttccgctatacaagaacggtgtcaagatcatgggtaccagtcctctgcagatcgatagggctgaggatcgctccatcttctcggctgtcttagatgagctgaaggtggcccaggctccttggaaagctgttaacactttgaacgaggcgctggaatttgcaaactctgtgggctatccctgcttactgagaccttcctatgttttgagtgggtctgccatgaacgtggtattctctgaggatgagatgaaaaggttccttgaggaggccactcgagtctctcaggaacacccagtggtgctgaccaagtttattgagggggctcgggaagtggagatggacgctgttggcaaagaaggacgggtcatctcccatgccatctctgaacatgttgaagatgcaggtgtccactcaggggatgccacactgatgctacctacgcagaccatcagccaaggagccattgaaaaggtgaaggatgccacacgaaagattgcaaaggcttttgccatctctgggccattcaatgttcagtttcttgtcaaaggaaatgatgtcttggtgattgagtgcaatctgagagcctctcgatccttcccctttgtctccaagactcttggggtggacttcattgatgtggccaccaaggtgatgatcggagagagtgttgatgagaagcatctacccacactggaacaacccatcatcccctctgactatgttgccattaaggctcccatgttttcctggccccgactgagggatgctgatcctattctgagatgtgagatggcttctactggagaggtggcgtgttttggtgagggcattcatacagccttcctaaaggcaatgctgtccacagggtttaagatacctcagaagggcattctgattggcatccagcaatcattccgtccaagattccttggtgttgctgagcagttacacaatgaaggtttcaagctttttgccacagaagccacatcagactggctcaacgccaacaatgttcctgccaccccagtggcttggccatctcaggaaggacagaatcccagcctctcttccatcagaaagttgataagagacggaagcattgacctagtgattaacctccccaataacaacaccaaatttgtccatgataattatgtgattcggaggacagctgtggacagtggaattgctctgctcaccaatttccaggtgaccaaactttttgctgaggctgtgcagaaagctcgtactgtggactccaagagtctgttccactacaggcagtacagcgctggaaaggcagcatag

SEQ ID NO: 3268 - DNA, 2793 bp, Rattus norvegicus
  Genbank Accession No. NM_017073
acagccgagaatgggagtagggcggagtgtttgagcagcacacccatttcctctccgctcttcgtctcgttctcgtggcctgtccacccatccatcatctgccggccaccgctctgaacaccttccaccatggccacctcagcaagttcccacttgaacaaaggcatcaagcagatgtacatgaacctgccccagggcgagaagatccaactcatgtatatctgggttgatggtaccggggaagggctacgctgcaagacccgtactctggactgtgaccccaagtgtgtagaagagttacccgagtggaactttgatggttctagtacgtttcagtctgaaggctccaacagcgacatgtacctccatcctgtggccatgtttcgagaccccttccgcagagaccccaacaagctggtgttctgcgaagtattcaagtataaccggaagcccgcagagaccaacctgaggcacagctgtaagcgtataatggacatggtgagcagccagcgcccctggtttggaatggaacaggagtatactctcatgggaacagacggccaccctttcggctggccttctaatggcttccctggaccccaaggaccctattactgcggtgtgggagctgacaaggcttatggccgagatatcgtggaggctcactaccgggcctgcttgtatgctggaatcaagatcacagggacaaatgccgaggttatgcctgcccagtgggaattccagataggaccctgcgaagggatccgcatgggagatcatctctgggtagcccgttttatcttgcatcgggtatgcgaagactttggggtgatagcaacctttgaccccaagcccattccagggaactggaatggggcaggctgccacaccaactttagcaccaaggccatgcgggaggagaatggtctgaggtgcattgaggaggccattgataaactgagcaagaggcaccagtaccacatccgtgcctacgaccccaaggggggcctggacaacgcccgccgtctgactggattccacgaaacctccaacatcaacgacttttccgctggcgttgccaaccgcagcgccagtatccgcattccccggattgtcggccaggagaagaagggttactttgaagaccgtcggccttctgccaattgcgacccctatgcggtgacggaagccatcgtccgcacgtgtctcctcaacgaaactggcgacgagcccttccaatacaagaactaagcggactcgacttccagtgatcttgagcccttcctagttcaccccactcccaactgttccctctcccactggtccccactgtaactcaaaaggatggaataccaaggtctttttattccttgcgcccagttaatttttgcctttattggtcagaatagaggggtcaggttcttaatctctacacacccaaccccttctttcctagctagctttccagtgggggaacgggagggggtggggaagggtaacccaccgcttcatctcagcgggaatgcatgtcctgtaggcatagctgtcacaaatcgggtgtacttgtggtgagggaggactggttttttttttccttcaggataattgaaagggcaggcccaacagcttagattaacattttctctgtcagtagagagctgttatttcttccggtgaaaccagctttctattgaagtctggtgaggagttggaggttggtctcttggcttccttagcttagggaaggggagttcaccctcccttcatgaaacacagttcacctgacaaatggccctactgtaaaggaagaaaaaagtttcttggtcctccatttataactcaaagcagagtagtatttttatatttaaatgttaaaaacaaaaaagttatatatatgggtgtgtggatatatatgtcttttctaattgagaaaaccatcctattccctgggtgccaagtttgagtgaggagctcggtgtagaagtgaggcactcttgaggtaggggtggggatgcagtactgggaaagttggttatcttgggggttcagcttcattactacttagggtttccctgcccactctgcaggagcagatgttggacaggtagccagtgggatgccactgcttgccgccactgtccctgggcttagtttaaggggacgtgtatacctaatccacacacgagttagaagtatgagttggctggtcaacttgaacattgttacaggcgggtgggtgttagtggggggttattttttggtgggactagcatgtcactaaagcgggccttttgatatattaaattttttaaagcaaaacaagtttagattttaatcaagttcgtagggtttctaactttacagaattgcctgtttgtttcaatgactccttccacttggctcttaggggaactgaggacaggcctggagttaatacacttgtcattctgtgtcctagtgtcctcttcctccggcagactgtccccttccttctgaaaaagccgatagagtcttgttttatttttcttttataataaacacaccccacctccatcccagcttgttgccttgcagttttctggatgtttgtgtcggcagcaggcagctgtggtttttttctcttgccacgatgactctaattaccatgtatagtatgttcagttagataactcactgtaaacagactgtaactgagagcagagcttgtaaatcaacctaacgtttataagatttcctctgacttgtttctttgtggttccaaaaaaaaaaaaaaaaaaaaaaacctcaaaaact

SEQ ID NO: 3269 - DNA, 1743 bp, Rattus norvegicus
  Genbank Accession No. NM_017074
ccgtcccagcatgcagaaggacgcctcctccagcggcttcctgcccagcttccagcactttgccactcaggccatccacgtgggaccagagccggagcaatggagttcgcgtgctgtggtgctgcccatttcgctggccaccacgttcaaacaggactctccaggccagtcctcgggttttgtatacagccgctctggaaatccgacgaggaattgcttggaaaaagcagtggctgcactggatggggcaaagcactgtttgaccttcgctcggggccttgccgccaccacaacgattacccatcttttaaaagcaggagatgaagtcatttgcatggatgaagtgtatggaggcaccaacaggtacttcaggagggtggcatccgagtttggactgaagatttcttttgtggattgttccaaaaccaaattgctggaggcagcgatcacaccacagaccaagcttgtttggattgaaacacccacaaacccaaccttgaagttggccgacatcaaagcctgcgcacaaattgtccacaaacacaaagacatcattctggttgtagataacactttcatgtctgcatatttccagagacctttggctctgggtgctgatatttgtatgtgttctgccacaaaatacatgaacggccacagtgatgttgtcatgggcttagtgtctgttacttccgatgacctcaacgaacggcttcgtttcctgcagaattctctcggggcagttccttctcctttcgattgttacctctgctgccgaggcctgaagacactgcagatccggatggagaaacacttcaggaatgggatggcagtggcccgtttcctggagtctaatccccgggtagaaaaggttatttatcctgggctaccgtctcaccctcagcatgagctcgccaaacgtcagtgcacgggctgccccgggatggtcagtttctatatcaagggtactctgcagcatgctcaggtcttcctcaaaaatataaagctgtttgctctggctgagagcctgggaggatatgagagtctggctgagcttccagcaatcatgacccatgcctccgtgcctgagaaggacagagctaccctcgggatcagtgacacactgatccgactttctgtgggcctagaggatgaaaaggaccttctcgaagacctgggtcaagctttaaaggcagcgcacccttaaagttcgagtcaaagccggcattccagtgctgccatcagcagcagcagccaaggggccagaccttctgaataactggacagaccattaaggagcatctgcagaacttcgcagtgaacattttaagaccctagtgattttacagctgtaaccttacagggatcttcccttaaggactgtcttctgctaacaggttgttctgttagtatcattctgatagttttgctgtatttgtgttcaaggaagagagttgtattattttggggatcatgttgcttcttttttcctttttctttcttcggtagcctaagatatgttttaatcatgtttacaaaatttagtattgatgttttatgaagttaaattattcaatgaacggtcttaaatcaactgtaggggttttttttttgaaaaattattgaaagtggggggtctttatttaattaccataagccaaaaaaatcaaatatttggaatatctactgtgaaattctagtgattaaaggttgtacttgatacttgttgtttttcttaaatgg

SEQ ID NO: 3270 - DNA, 1715 bp, Rattus norvegicus
  Genbank Accession No. NM_017075
gacaagcttttccggtctccatggctgccctggcggttctacacggcgtcgtccgcaggcctctgctccgcgggctgctgcaggaagtaagatgcctgggacgaagttatgcatccaaacccactttgaatgatgtggttatagtgagtgctacacgaactcccattggatccttcctgggcagccttgcctctcagccagccaccaagcttggtactattgcaattcagggagccattgaaaaggcagggattccaaaagaagaagtgaaggaggtctacatgggcaacgtcatccaagggggagaaggacaggccccgaccaggcaagctacactgggtgcaggtctacccattgccactccgtgcaccacagtaaacaaggtgtgtgcctcaggaatgaaagccatcatgatggcctctcaaagtcttatgtgtggacaccaggatgtgatggtggcaggcggaatggagaccatgtcaaatgtcccgtacgtaatgagcagaggagcaacaccatacggtggggtaaaacttgaagacctgattgtgaaagacgggctaaccgatgtctacaataaaattcatatgggcaattgtgctgagaacaccgcgaagaagctgagtatctcgcgggaggagcaggataagtacgccatcggctcttacacccgaagtaaagaggcgtgggatgcagggaagtttgcaaatgagattacgcccatcaccatctcagtgaaaggtaaaccagacgtggtggtgaaggaagatgaagagtacaagcgagttgacttcagtaaagtgccaaagctcaagacagtgttccagaaagaaaacggcacagtaacagctgctaacgccagcacactgaacgacggagcagctgctgtggttctcatgactgcagaggcagcccagcggctcaaggttaagccactggcacgaatcgcagcatttgctgatgctgctgtagaccccattgatttcccactcgcacctgcatatgctgtacctaaggttcttaaatatgcaggactgaaaaaagaagacattgccatgtgggaagtaaatgaagcattcagtgtggttgtactagccaacattaaaatgctggagattgaccctcaaaaagtaaatgtccatggaggagctgtttctctgggccatccaatcgggatgtctggagctcggattgttgttcacttggctcatgccttgaagcaaggagaattcggtctggctagtatttgcaatggaggaggaggggcttccgccgtgctgattgagaagctgtagacatcttgttttaggagacagttccacgtgacccgctgaagtgaactaccccttgggccagattatattcaggataagctatttcattttttattattttctactaaaaatttttaaaaatcacatccaaaaacccattgaaattgcaaataaaaatttctcctcctttaatattttgtaaacagtcggatactctactattgaaatatactgtaggtactagaggcatggctcagccgttaagagcacttgttgctacctgtgtggtgcatggctttaatcccagcacttggagacagaggcaagtgcatctttctgagttaaagttagcctggtccacagagctagtgccctgacagccaagactacacagagtagtagaaactctgggggaaaaaaaaaaaacaaataaaaaaaaaa

SEQ ID NO: 3271 - DNA, 1497 bp, Rattus norvegicus
  Genbank Accession No. NM_017077
cgcccgtagagagaccgaagcgctcggttcccccggggggaccgcagcctgggcgtgtgggggcacaggcccgggggatgctgggctcagtgaagatggaggcccatgacctggccgagtggagctactacccggaggcgggcgaggtgtattctccagtgaatcctgtgcccaccatggcccctctcaactcctacatgtccttgaaccctcttagctctccctaccctcccggagggcttcaggcctcccctctgcctacaggacccctggcacccccagcccccaccgctcccctggggcccaccttcccaggcctgggcgcaggcagcggcaccggaggcagtgcttccgggtatggcgccccagggcccgggcttgtacacggaaaggaaatggccaaggggtaccggcggccactgactcatgccaaaccaccttattcctacatctctctcatcaccatggctatccagcaggcaccaggcaagatgctgaccctgagtgaaatctaccaatggatcatggacctcttcccgtactaccgggagaaccagcaacgttggcagaactccatccggcactcgctgtccttcaatgactgcttcgtcaaggtggcacgctccccagacaaaccgggcaaaggctcctactgggccttgcatcccagctctgggaacatgtttgagaacggctgctatctccgccgtcagaagcgcttcaagctggaggagaaggcaaagaaaggaaacagtgccacatccgccaccaggaatggaacagtggggtcagccacctctgccaccactacagctgccactgcagtcacttccccggctcagccccagcctacgccgccgtctgagcccgaggcccagagtggggaagatgtggggggtctggactgcgcctcgcctccttcatccgcaccctatttcactggcctggagctcccaggggaactgaagttggatgcgccctacaacttcaaccaccctttctctatcaacaacctgatgtcagaacagacatcaacaccttccaaactagatgtggggtttgggggctacggtgctgagagtggggaacctggggtctactaccagagcctctattcccgctctctgctcaatgcatcctagcggcgcaactgggagaaatgcggtgatgggggtttgctgtgacagatgaccggttcttcggccctgatctttctggttacactctgcttatccagttaattaacatcgtatttggtctattactgtgatatgacccattggctactgtggtaactgcatggactcttcggtgggcctagggttggggtattgtgaaggcagatgcatttgggagtgttacgaaggtggccatgtcggacataccgtgaaggcaattagactggtgtactataaaagctgcatgttaagtgagtgatccactgggtgcctgatggccgcgatgtcggaggacatattgtttggccctttggatgct

SEQ ID NO: 3272 - DNA, 1265 bp, Rattus norvegicus
  Genbank Accession No. NM_017080
cggcctgggaggttgtagaaagagctgcaggttttctttgtgtgtcctacagagctccctgagccaggtccctgttggacggcagttatgaaaaaatacctcctccccgtcctggtgctctgcctgggttactactattctacaaatgaagagttcagaccagaaatgctccaggggaagaaagtgattgtcactggggccagcaaagggatcggaagagaaatggcatatcatctgtcaaaaatgggagcccatgtggtattgactgcaaggtcggaggaagggctccagaaggtggtgtctcgctgccttgaactcggagcagcctctgctcactacattgccggcactatggaagacatggcttttgcagagcgatttgttgttgaggcaggaaagctcttgggtggactggacatgctcattctcaatcacatcacacagaccactatgtctctcttccacgatgatatccactctgtgcgaagaagcatggaggtcaacttcctcagctatgtggtcctgagcacagcagccttgcccatgctgaaacagagcaatggcagcattgccatcatctcctccatggctgggaaaatgacccaacctctgattgcttcctactctgcaagcaagtttgctctggatgggttcttttccaccattagaaaagaacacttgatgaccaaggtcaacgtgtccatcactctctgtgtcctcggcttcatagacacagaaacagctttgaaagaaacctctgggataatcttgagtcaagctgctcccaagcaggaatgcgccctggagatcaaaggcacagttctgcgcaaagatgaggtatactatgacaaatcatcttggactccacttctgcttgggaatccaggaaggaggatcatggaatttctttcattacggtcatataacagggacctatttgtaagcaactaggaactcctgaggcctggtgaagggtcttggaacagtcctgcctgatatttctgtgagccctacccacaaatttctctgagcccctttccagagatacacaaattttggggtacacctcaccatgagaaattcttgcaacacttgcacagtaaaaatgtaattgtaataaatgtcacaaaccactttgtagcctgcagttgtgaacttgattgtaactatggatttaagcacacagttgtatcaattttacctcatacagaatgaaacaatgatgcctaatgtaacattaaataaaataaaggtaatatcaaccg

SEQ ID NO: 3273 - DNA, 988 bp, Rattus norvegicus
  Genbank Accession No. NM_017084
caggatggtggacagcgtgtaccgtacccgctccctgggggtggcggccgaagggatccccgaccagtatgcggatggggaggccgcacgtgtgtggcagctgtacatcggggacacccgcagccgtactgcagagtacaaggcgtggttgcttgggctgctgcgccagcacgggtgccaccgggtgctggacgtggcctgtggcacaggagtggactcgattatgctggtggaagagggctttagcgtcacgagtgtggatgccagcgacaagatgctgaaatacgcactgaaggagcgctggaaccggaggaaggagccagcctttgacaagtgggtcattgaagaagccaactggttgactctggacaaagatgtgccagcaggagatggctttgacgctgtcatctgccttgggaacagttttgctcacctgccggacagcaaaggtgaccagagtgagcaccggctggcgctaaagaacatcgcaagcatggtgcggcccgggggcctgctggtcatcgaccaccgcaactacgactacatcctcagcacgggctgtgcacccccagggaagaacatctactataagagtgacctgaccaaggacattacgacgtcagtgctgacagtaaacaacaaagcccacatggtaaccctggactacacagtgcaggtgccaggtgctggcagagatggcgctcctggcttcagtaagtttcggctctcttactacccacactgtttggcgtctttcacggagttggtccaagaagcctttgggggcaggtgccagcacagcgtcctgggtgacttcaagccttacaggcccggccaggcctacgttccctgctacttcatccacgtgctcaagaagacaggctgagcctggctccggctcccaccctaagaccatcgcctaccacagatattgcagagatgtggggggcaggcaaacagggagtcgacaatacagccttcccttgcc

SEQ ID NO: 3274 - DNA, 2950 bp, Rattus norvegicus
  Genbank Accession No. NM_017094
gaattccggagagaccacaagatagaggattattaatttatggggattttttggagatttatatacccaagcaacaactcctagatgctacagaccaagacaccaagaaataaccacgaaattctactttcaaccctagcttctctaccagattttaactaaacaagatcttcttgcaaaggtctcaggtatggatctttggcgggtgttcttaaccctggcactggcagtctccagcgacatgtttcctggaagtggggctacaccagctactcttggcaaagcttccccggttctgcaaagaattaatccaagcctgagggaaagttcctctggaaagcctcgattcaccaagtgtcgttcccctgaactggagaccttttcatgctactggacagaaggggatgatcataatttaaaggtcccgggatctattcagctatactatgctagaagaattgctcatgaatggaccccggaatggaaagaatgccctgattatgtctctgctggagcaaacagctgttacttcaactcatcgtatacctccatttggataccctactgcattaagcttactacaaatggtgatttgttggacgaaaagtgtttcactgttgatgaaatagtgcaacctgatccgcccattggcctcaactggactttactaaacatcagtttgcctgggatccgtggagatatccaagtgagttggcagccaccgcccagtgccgatgttctgaagggatggataattctggagtatgaaattcagtacaaagaagtaaatgaaacaaaatggaaaacgatgagcccgatatggtcaacatcagtcccactgtactcactgagactggataaagagcacgaagtgcgtgtgagatccagacaacggagcttcgaaaagtacagcgagttcagtgaagtactccgtgtaacgtttcctcagatggacacactggcagcatgtgaagaagatttccggtttccatggttcttaattattatctttggaatatttggagtagcagtgatgctatttgtagttatattttcaaagcagcaaaggattaagatgctgattttacccccagtaccagttccaaagattaaagggattgatccagatcttctcaaggaaggaaaattggaggaggtgaacaccatcttgggcattcatgataactacaaacccgacttctacaatgatgactcctgggttgagttcattgagctggatattgatgatgcggatgagaagactgaagagtcagacaccgacagacttctaagcgatgaccaggagaaatcagctggtatccttggagcaaaggatgacgattctggacgtaccagctgttatgaccctgacattttggataccgatttccacaccagtgacatgtgcgatggtacctcggagtttgctcagccgcagaagttaaaagcagaagctgatctcttgtgccttgaccagaagaatctgaagaactcgccttatgatgcttcccttggctctctgcacccctccattaccctgacaatggaagacaaaccacagccacttctgggcagtgaaactgagtcaacccaccaactcccctctacaccaatgagcagtcccgtgtcactggcaaacattgacttttatgcccaagtaagcgacattacaccagcaggtggtgtagtcctttctccaggccaaaagattaaggcagggttagcccagggcaacacccagctggaggtggccgcgccctgccaagaaaattacagcatgaacagtgcctacttctgtgagtcagatgccaaaaagtgcatcgctgcggcccctcacatggaggccacgacatgtgtaaaaccaagctttaaccaagaggacatttacatcaccacagaaagccttaccactactgcccgaatgtccgagacagcagataccgctccagatgctgagcctgtcccagactacaccacggttcacaccgtgaagtccccaaggggccttatactcaacgcgactgctttgcctttgcctgacaaaaagaagtttctctcctcatgtggctatgtgagcacagaccaactgaacaaaatcatgcagtagcctttcctatctttaatggcaaaagaaatgactgggcacgaacgcctaaaccaaaactatgttttaaatctgtgttgggagagcgtgagagtgaatgtggattcaaaaataccttttctggaaacgtcgaaacattatcataacgtggaaaatcaagaatatgtaatcagatagatactcccattgtgaattttaaatattttaagatcgtctttaagactgtttgtggcagtgattgtctgtgctgtgggtcttaactttgtgatactaagttattaaatagctacgtttttcatgtatgtagatcattgctttttttgaaaaagcaaaacaatcaggtggcttttgcagttcaggaaattgaatgcagattttagcacagactgatttctttttcctttttaaatagctaggagctaaaactctaggggagaaggtaaaactagtttggatatgcaaaacatttattttgacataaaattgataaagatatttttaataatttacactgtaagcatgagtattttataatacactacagatatattgttagttcacaacaatccatctacggatgtaacaactacaatgtgtagaggggttgatgctttggtcaatgaacctaaagaaaaatgaacaagttagatttttacaaagcccttttttataactcccaaaacttcttaaatctaaaaatgtctgcattattggaacaaacccattttaaatttgtaaatgaatatttttttaattttgaaaactttaattttttatacaaattaacgtatcatacaccaaacagtaacagaagtgattataataatggaagaaacagtttcttcc

SEQ ID NO: 3275 - DNA, 693 bp, Rattus norvegicus
  Genbank Accession No. NM_017096
atggagaagctactatggtgtcttctgatcacgataagcttctctcaggcttttggtcatgaagacatgtctaaacaggccttcgtatttcccggagtgtcagctactgcctatgtgtccctggaagcagagtcaaagaagccactggaagccttcactgtgtgtctctatgcccacgctgatgtgagccgaagcttcagcatcttctcttacgctaccaagacgagctttaacgagattcttctgttttggactaggggtcaagggtttagtattgcagtaggtgggcctgaaatactgttcagtgcttcagaaattcctgaggtaccaacacacatctgtgccacctgggagtctgctacaggaattgtagagctttggcttgacgggaaacccagggtgcggaaaagtctgcagaagggctacattgtggggacaaatgcaagcatcatcttggggcaggagcaggactcgtatggcggtggctttgacgcgaatcagtctttggtgggagacattggagatgtgaacatgtgggactttgtgctatctccagaacagatcaatgcagtctatgttggtagggtattcagccccaatgttttgaactggcgggcactgaagtatgaaacacacggtgatgtgtttatcaagccgcagctgtggcccttgactgactgttgtgagtcctga

SEQ ID NO: 3276 - DNA, 1850 bp, Rattus norvegicus
  Genbank Accession No. NM_017097
gaattccggttctagttgttgttttctctgccatctgctctccgggcgccgtcaaccatgggtccgtggacccactccttgcgcgccgccctgctgctggtgcttttgggagtctgcaccgtgagctccgacactcctgccaactgcacttaccctgacctgctgggtacctgggttttccaggtgggccctagacatccccgaagtcacattaactgctcggtaatggaaccaacagaagaaaaggtagtgatacacctgaagaagttggatactgcctatgatgaagtgggcaattctgggtatttcaccctcatttacaaccaaggctttgagattgtgttgaatgactacaagtggtttgcgtttttcaagtatgaagtcaaaggcagcagagccatcagttactgccatgagaccatgacagggtgggtccatgatgtcctgggccggaactgggcttgctttgttggcaagaagatggcaaatcactctgagaaggtttatgtgaatgtggcacaccttggaggtctccaggaaaaatattctgaaaggctctacagtcacaaccacaactttgtgaaggccatcaattctgttcagaagtcttggactgcaaccacctatgaagaatatgagaaactgagcatacgagatttgataaggagaagtggccacagcggaaggatcctaaggcccaaacctgccccgataactgatgaaatacagcaacaaattttaagtttgccagaatcttgggactggagaaacgtccgtggcatcaattttgttagccctgttcgaaaccaagaatcttgtggaagctgctactcatttgcctctctgggtatgctagaagcaagaattcgtatattaaccaacaattctcagaccccaatcctgagtcctcaggaggttgtatcttgtagcccgtatgcccaaggttgtgatggtggattcccatacctcattgcaggaaagtatgcccaagattttggggtggtggaagaaaactgctttccctacacagccacagatgctccatgcaaaccaaaggaaaactgcctccgttactattcttctgagtactactatgtgggtggtttctatggtggctgcaatgaagccctgatgaagcttgagctggtcaaacacggacccatggcagttgcctttgaagtccacgatgacttcctgcactaccacagtgggatctaccaccacactggactgagcgaccctttcaacccctttgagctgaccaatcatgctgttctgcttgtgggctatggaaaagatccagtcactgggttagactactggattgtcaagaacagctggggctctcaatggggtgagagtggctacttccggatccgcagaggaactgatgaatgtgcaattgagagtatagccatggcagccataccgattcctaaattgtaggacctagctcccagtgtcccatacagctttttattattcacagggtgatttagtcacaggctggagacttttacaaagcaatatcagaagcttaccactaggtacccttaaagaattttgcccttaagtttaaaacaatccttgatttttttcttttaatatcctccctatcaatcaccgaactacttttctttttaaagtacttggttaagtaatacttttctgaggattggttagatattgtcaaatatttttgctggtcacctaaaatgcagccagatgtttcattgttaaaaatctatataaaagtgcaagctgccttttttaaattacataaatcccatgaatacatggccaaaatagttattttttaaagactttaaaataaatgattaatcgatgct

SEQ ID NO: 3277 - DNA, 1580 bp, Rattus norvegicus
  Genbank Accession No. NM_017099
ccgcgacatcccccggatatgcacttcgggaggcccctgctcccgggatgcgagagctagggacctgtccgccctgtgcggagctccagccgccgccgggcgcgcaaccctgagtctaggacgcgttgtggaggaaaggagtcagggcaggtgcctaggcgggctatgctgaaaggaagatgctggccaggaagagcatcatcccggaggagtatgtgctggcccgcatcgcggcggagaacctgcgcaaaccgcgcatccgcgaccgcctccccaaagcccgcttcatcgccaagagcggagcctgcaacctggctcacaagaacatccgagagcaaggtcgcttcctgcaggacatcttcaccaccttggtagacctgaagtggcgtcacacgctggtcatcttcaccatgtccttcctctgcagctggctgctcttcgctatcatgtggtggctggtggccttcgcccacggggacatctatgcttacatggagaaaggcatcacggagaagagtggcctggagtctgccgtctgtgtgaccaatgtcaggtcattcacttctgcgtttctcttctccatcgaggttcaagtgaccattgggtttggagggagaatgatgactgaggagtgccctctggccatcacggttttgattctgcagaacattgtgggtctgatcatcaacgcggtcatgttgggctgcatcttcatgaagacggcccaggcccacagaagggcagagacgctgattttcagccgccatgctgtaattgcggtccgtaatggcaagctgtgcttcatgttccgggtgggtgacctgaggaaaagcatgatcattagcgcctcggtgcgcatccaggtggtcaagaaaaccacgacgccagaaggagaggtggtgcctattcaccagcaggacatccctgtggataatcccatcgagagcaataacatcttcctagtggcccctttgatcatctgccatgtgattgataagcgtagccccctgtacgatatctcagccactgaccttgtcaaccaagacctggaggtcatagtgattctcgagggcgtggtggaaaccacgggcatcaccacgcaagcgcggacctcctacattgcagaggagatccagtggggacaccgcttcgtgtcgattgtgactgaggaggagggagtgtactctgtggactattctaaatttggtaatactgtgagagtggcggcgccaagatgcagtgcccgggagctggacgagaaaccttccatcttgattcagaccctccaaaagagtgaactgtcgcaccagaattctctgaggaagcgcaactctatgagaagaaacaactccatgaggaggagcaactccatccggaggaataactcttccctcatggtgcccaaggtgcaattcatgactccagaaggaaaccagtgcccatcagaatcatgagggcaggacgaccctagacagccactcactgagtcccgatgactgacagaccatcctgagacagtttgctgagttctggtgatcgaagtatcggacctgtcgccaattcagggcaggaacacaaca

SEQ ID NO: 3278 - DNA, 743 bp, Rattus norvegicus
  Genbank Accession No. NM_017101
ctttgcagacgccgctgtctcttttcgccgcttgctgcagacatggtcaaccccaccgtgttcttcgacatcacggctgatggcgagcccttgggtcgcgtctgcttcgagctgtttgcagacaaagttccaaagacagcagaaaactttcgtgctctgagcactggggagaaaggatttggctataagggttcctcctttcacagaattattccaggattcatgtgccagggtggtgacttcacacgccataatggcactggtggcaagtccatctacggagagaaatttgaggatgagaacttcatcctgaagcatacaggtcctggcatcttgtccatggcaaatgctggaccaaacacaaatggttcccagttttttatctgcactgccaagactgagtggctggatggcaagcatgtggtctttgggaaggtgaaagaaggcatgagcattgtggaagccatggagcgttttgggtccaggaatggcaagaccagcaagaagatcaccatctccgactgtggacaactctaatttctttgacttgcgggcattttacccatcaaaccattccttctgtagctcaggagagcacccccaccccatctgctcgcaataccctgtaatctctgctctcactgaagttctttgggttccatattttcctcattccccttcaagtctagcaggattgcaaagttaagtttatgattatgaataaaaactaaatgagaagtgtt

SEQ ID NO: 3279 - DNA, 3715 bp, Rattus norvegicus
  Genbank Accession No. NM_017108
ctgctggggcctacgaacctgggccgggcatagccccccgacggctactctagggggcgcggggcccggcggggggcggccgagccaggcgccctcccccggcgctgagtccccgcgccccggagggatggggcgggcggtccccgccgcctaagatgccggccatgcgggggctccttgcgccgcagaacaccttcctggacaccatcgccacccgcttcgacgggacgcacagtaacttcgtcctgggcaacgcccaggtggcagggctcttccctgtggtctactgctccgatggcttctgtgacctcacgggtttctccagagctgaggtcatgcagcgaggctgtgcctgctccttcctctatgggccagacaccagtgagttggtccgccaacagatccgaaaagccctggatgagcacaaagaattcaaggctgaactgatcctgtaccggaagagcgggcttccattctggtgtctcctggatgtgatacctataaaaaacgagaagggggaggtggccctcttcctggtctctcacaaggacatcagtgagaccaagaaccgaggaggccctgacaactggaaggagagaggtggtggccgacgcagatatggtcgggcaggatccaaaggctttaatgccaatcggaggcgcagccgggcggttctctaccacctctctggtcacctgcagaaacaacccaagggcaagcacaaactcaataagggtgtgtttggagagaagccaaatttgcccgaatataaagtcgctgctatccggaagtcaccctttatcctgctgcactgtggggctctgagagccacctgggatggcttcatcctgctcgccacgctctacgtggctgtcactgtgccatacagcgtgtgtgtgagcacagcacgggagcccagtgctgcccgtggcccacctagtgtctgtgacctggccgtggaagtcctcttcatcttagatattgtgctgaattttcgtactacatttgtgtccaagtcaggccaggtggtattcgccccaaagtccatttgcctccactacgtcaccacctggttcctgctggatgtcatagcagcactgccctttgacctactacatgccttcaaggtcaatgtgtacgttggggctcacctactgaagaccgtgcggctgcttcggctgctgcgcctactaccaagactggaccggtactctcagtatagcgctgttgtgctcaccttgctcatggctgtgtttgccctgctcgcccactgggtggcctgcgtttggttctacatcggccagcaagagattgagaacagcgagtcagagctgcctgagatcggctggctgcaggagctggcacgcaggctggagacgccctattacctggtgagccggagtccagatggagggaacagctctggccagagtgaaaactgcagtagcagtggcggcggcagcgaagccaacgggactgggctggagctgctgggtggcccatccctacgcagcgcctacatcacctccttgtacttcgcgctcagcagtctcaccagtgtgggcttcggcaatgtgtccgctaacacagacactgagaagattttctccatctgcaccatgcttattggagctctgatgcatgcagtggtgtttgggaatgtgacagccatcatccagcgcatgtacgctcgccgctttctgtaccacagccgcacccgtgacctgcgagactacattcgcatccaccgcatccccaagcccctcaagcagcgcatgctcgagtacttccaagccacctgggccgtgaacaacggcatcgataccactgagctgctgcagagccttccggatgagcttcgagcagacatcgccatgcacctgcacaaggaggtcctgcagctgccattgttcgaggcagcgagccgtggctgcctgcgggcactgtctctggccctgaggcccgccttctgcacgccgggcgagtacctcattcaccaaggcgatgctctccaggctctctactttgtgtgctcaggttccatggaggtcctcaaaggtggcaccgtcctcgccattctagggaagggtgacctgatcggctgtgagctgccccagcgagagcaagtagtgaaggccaatgccgacgtaaaggggctgacatactgcgtcctacagtgcctgcagctggctgggctgcacgagagcctcgcactgtaccctgagtttgccccacgctttagccgtggcctccgaggggagctcagctacaacctgggagctggaggagtgtctgcagaggtggataccagctcactgagtggtgacaacaccctcatgtccacactggaggagaaggagacagatggggagcaaggacacacgatctcaccagccccagcagatgagccctccagccccctgctgtcacctggctgtacctcctcctcctcagcggccaaactactctccccacgtcgaactgcaccccggccgaggctgggtggcagagggcggccaagtagggcaggggttttgaagcctgaggctggtccttctgctcatccacggacacttgatgggttgcagctgccccccatgccatggaatgtacctccagacctgagccccagggtcgtagatggcattgaggatggctgcggctctgaccagcacaagttctctttccgggtgggtcagtctggcccagaatgtagcagcagcccctccccaggaacagagagtggcctgctcactgtccccttggtgcccagtgaggcaagaaacacagacacactggacaagctacggcaggcggtgacggagctgtctgaacaggtgctgcagatgcgagagggactgcagtcacttcgccaggctgtgcagctcatcctggtgccccaaggggaaggccagtgtccccgggtatcaggagaggggccatgcccagccactgcctctgggctcctacaacccctgcgtgtggacactggggcatcatcctactgcctgcagcccccagcaggttcagtcttgagtgggacctggcctcacccccgtccagggcatccccctcccctcatggcaccctggccctggggccccccagcatctcagagctccccctggcctcgagccacagctttatggacctccacctcagactcagagccccctggctctggagacctctgctctgagcccagcaccccagcctcaccccctcctcctgaggaaggagctaggactgggactcctgcacctgtgagccaggctgaggctaccagtactggagagccccctccggggtcagggggccgagccttgccctgggatccccacagcctagagatggtgctcatcggctgccatggccctggctcggtccagtggacccaggaggagggcacaggagtctgaccacaggcagggagaggggttctgcaaacacccgccacctgctgaccgcccagcctcacagggctgccctctggctcagggcagggaacctaaggaaggaggagggtgagctggagcctcaggccccaggccagggatccacgggttctgctccactgacctgacccaatgggggcagaggcctgaggacgaggaggggttctgccattccttgcatgtgcccatctccactgtcctctgtcctcatgttttttatattaaaaaacataaaaaaaaaccaataaagaaactacttt

SEQ ID NO: 3280 - DNA, 2113 bp, Rattus norvegicus
  Genbank Accession No. NM_017113
gcgcaggcaagaccatgtggatcctggtgagctggctggccttagtggcaaggctggtggctggaacacagtgcccagatggtcaattctgccctgttgcctgctgccttgaccagggaggagccaactacagctgctgtaaccctcttctggacacatggcctataataacgagccgtcgtctagatggctcctgccagatccgtgaccactgtcctgatggctactcttgtcttctcactgtgtctgggacttccagctgctgcccgttctctgagggtgtatcttgtgatgatggccagcactgctgcccccggggcttccactgtagtgcggatgggaaatcctgctctcagatatcagatagcctcttgggtgctgtccagtgtcctggtagccagttcgaatgtcctgactccgccacctgctgtattatgattgatggttcctgggggtgctgccccatgccccaggcctcttgctgtgaagacagagtgcattgctgtccccacggggcctcctgtgacctggttcacacgcgatgcatttcacccacgggcacccaccccttactaaagaaattccccgcacaaaggaccaacagggcagtggcttccttttccgtggtgtgccctgatgctaagacccagtgccctgatgactctacctgctgtgagctacccactgggaagtatggctgttgtccaatgcccaacgccatctgctgttccgaccacctgcactgctgcccccaggacactgtatgtgacctgatccagagcaagtgcatatccaaggactacaccacagatctcatgaccaagctgcctggatacccagtgaatgaggtgaagtgcgacttggaggtgagctgtcctgatggctacacctgctgccgcctcaacactggggcctggggctgctgtccattcaccaaggctgtgtgttgtgaagaccacattcactgctgcccagccgggtttcagtgtcacacagagacaggaacctgtgaactgggagtccttcaggtaccctggatgaaaaaggtcacggcctccctcagcctgccagacccacagatcttgaagaatgatgtcccctgtgatgacttcagtagctgtccttctaacaatacctgctgcagactcagttctggggactggggctgctgtcccatgccagaggctgtctgctgcttagaccaccagcattgctgccctcagggtttcaaatgtatggatgaggggtactgtcagaagggagacagaatggtggctggcctggagaagatgcctgtccgccagacaactctgctccaacatggagatattggttgtgaccagcataccagctgcccagtagggcaaacatgctgcccaagcctgaagggaagttgggcctgctgccagttgccccatgctgtgtgctgtgaggaccggcagcactgttgcccggctgggtacacctgcaacgtgaaggcgagaacctgtgagaaggatgcaggctctgtccagccttccatggacctgacctttggctctaaggttgggaatgtggaatgtggtgccggacatttctgccatgataaccagtcctgttgtaaagacagccaaggaggctgggcctgctgtccctatgtaaagggtgtctgctgtagagatggacgtcactgttgtcccattggcttccactgttcagccaagggaaccaagtgtttgcggaagaagacccctcgctgggacatacttttgagggatccagccccaagaccgctactgtgaggaagggctaacgactaaagaactccacagtcctgggaaccctgttctgagggtatccaccactcaggcctccctggcacctcttcctttagtctccccggcctactcattctgagtcaccccatcaccatggaaggtggggcctcaaactaagaccttctcttatggaaagaaggctgtggcaaaagccccgtatcaaactgccatttcttatgatttctgtggaccttgtggccaggtgctcttctcgatccacaggtgttgtgtgagcttgcttttgtgtgtgtgtgtgtgcgcgcgtgcgagcgtgttgctccaataaagtttgtacc

SEQ ID NO: 3281 - DNA, 3252 bp, Rattus norvegicus
  Genbank Accession No. NM_017116
agctcccgcagtccgctgcagcgccccgggcttggccgcgccccaaccgagtgctgcgccccgcctctccgcgacccctctctctgtgctgtgcgccatcccgatcgctaccatggcgggcatcgcgatgaaactggccaaagaccgcgaggcggccgaggggctggggtctcacgagagagccatcaagtacctcaaccaggactacgagacactgcggaacgagtgcctggaggccggggcgctcttccaggatccttccttccccgccctgccgtcgtccctgggcttcaaggagttggggccctactccagcaaaactcggggcatcgaatggaagcggcccacggagatctgcgcagacccccagttcattattggaggtgctacccgcacagacatctgccaaggagcccttggggactgctggcttctggctgccatcgcctccctcaccttgaatgaagagatcctggctcgagttgtgcctctagaccagagcttccaggaaaactatgcaggcatcttccatttccagttctggcaatatggcgaatgggtggaggtggtggtggacgacagactgcccactaaggacggggagctgctctttgttcattcagctgaggggagcgagttctggagtgcccttctggagaaggcctatgccaagatcaatgggtgctatgaagcactctcagggggtgccaccactgagggctttgaagacttcacaggaggcattgccgagtggtatgagctgaggaagcctcctcccaatttgttcaagatcatccagaaggctttggagaaaggttctctgcttggctgctctatcgatatcaccagcgctgcggattctgaggccgttacgtaccagaagttggtgaaaggacatgcgtactccgtcactggagccgaggaggttgaaagctcaggaagcctgcagaaattgatacgtatcaggaacccctggggacaagtggagtggaccgggaagtggaatgacaactgccccagctggaacacggttgacccagaagtaagggcaaatctaacagaacggcaggaggacggagaattctggatgtccttcagtgacttcctgaggcactactctcgtctagaaatctgcaacctgaccccggacaccctcacctgtgactcctacaagaagtggaaactcaccaagatggatgggaactggaggcgaggctccactgcagggggctgcaggaattacccaaataccttctggatgaaccctcagtacctaatcaagctggaggaagaagatgaagatgatgaggatggggagaggggctgtaccttcctggtgggcctcatccagaagcatcggcggcggcagaggaagatgggtgaggacatgcacaccattggcttcggcatctatgaggtcccagaggagctaacagggcagaccaacatccacctcagcaaaaactttttcctgacaacccgagccagggagcggtcagataccttcatcaacctccgggaggtcctcaaccgcttcaagctgcccccgggagaatatgtccttgttccttccaccttcgagccccacaagaatggcgatttctgcatccgagtcttctcagagaagaaggctgactaccaaactgtcgatgatgaaatcgaggccaacattgaagagattgaagccaatgaggaggacattggagatggattcagaaggctgtttgctcagctggctggagaggatgcggagatctctgcctttgagctgcagaccatcttgagaagagttctagccaagcgcgaagacatcaagtcagatggcttcagcatcgagacctgtaagatcatggtggacatgctggatgaagatgggagcggcaagctggggctgaaggagttctacatcctctggacgaagattcagaaataccaaaaaatttaccgagagatcgacgtggacaggtcgggaaccatgaattcctatgagatgcggaaggctttggaagaagcaggtttcaagctgccctgtcaacttcatcaagtcatcgttgcccggtttgcagatgacgaactcatcatcgactttgacaactttgtgcggtgtttggttcggctggaaatactattcaagatattcaagcagctggaccctgagaacactggaacgatacagctcgaccttatctcgtggctgagtttttcagtactctgaagttacatgcctgaagatttctggtggaagaaaacagccaatgcctacacttaaatactttgtatctggaccttgaacgtacgggaacatttacttcatcgggtgattgtaactgaagctctaaccgtcagaggtggatgaactttcacatatcagagtaatggatctgcataccattaaccaaatgcaaatgaattgcataaccctcggtaaggtcagagagagctttatgcctgtacatagtatatcctttctacttctacacatcgtctcttcatagcaatattaaaccaggaaggactgttgagaggtttaagtaattgggcaaacagcaattgatctcagaggccacaatgccttgatgggaatatttaaagaaatttaaaaatttaagatgcagtggtggcatcttccacagcaggccagagagaaacagagagagagagagagagacttggaaatacaataataaagtaatctgtgtggagcgtctaaagaatccagtctgatggaggcatctaaagaatccagtctgatggaggcatctaaagaatccaggagccaggagtatctgacacaaggccaacctgggctacctagcaagacctgatctcaaaaaataaatgtcaattaaaaaaaaagaaggcatgtttccatcatttggttctaacaaaagatggtttttatacacctttgtgaacagcaagccctcttagactcaagtccttgaccatatttggccttagacattgaagtagtgagtagtgagatcatttgactgaccaactgagccaggtctgccatctgaaagaaaatcgtgatacaaccccagggatggtgcctacggctcgggagaacagggctcagaagatccttcttaaaacaaccaagctggcttcgtggtccgaggaaaatgctagcaaccatacagacatactgccttatccacttccaaacgtactgttaataaagagttgcaatgcatgcacgccgtgccttgtttttcctcgtagagcgtggcccccgtggagggtttc

SEQ ID NO: 3282 - DNA, 838 bp, Rattus norvegicus
  Genbank Accession No. NM_017126
gggacccaggggacccttggcactgcgcaggaccccgcgggacccggaaccttccgacagggttatggcggccgctccgggcgcccgactcctgcgcgctgcctgcgcctccgtcgcttttcgtggtctggactgccgtcggctgctggtctgcgggacccgtgcgggacctgccgtccctcagtggaccccgagcccccacacgcttgcagaggccggacctggccggccactgagcgtgtctgcgcgcgcgcggagtagctcagaagataaggtaacagtccacttcaagaaccgagatggtgaaacgctaacgaccaaggggaaagttggtgactctctgctagatgttgtgattgagaataacctagatatcgatggatttggtgcgtgtgaggggactttggcttgctctacctgtcatcttatctttgaggaccatatatatgagaagttagatgccattactgatgaagagaacgacatgcttgacctggcttttggactaacaaacaggtcacggctgggctgtcaagtttgtctgaccaaggctatggacaatatgactgtccgtgtgcctgaagcagtggcagatgtccgacagtctgttgacatgagcaagaattcctaagctacaataaaaagaatattttcattaaatttttacctatttttataattatttcttagcataattgattatatggccaaaatatgtagctgtgctgtcttagttcagttttgtagtactgaaaatttgcagtttttattttgattaaattattaaaatatcagtctattagaagacagctgatacaataaactccttatgtatttt

SEQ ID NO: 3283 - DNA, 1386 bp, Rattus norvegicus
  Genbank Accession No. NM_017134
ctcagctgcaggaaccctggatgagcatgagctccaagccaaagcccatagagattatcggagcgcctttctctaagggacagcctcgaggaggggtagagaaaggtcccgcagcattaaggaaagctggcctggtggagaagcttaaagaaacagagtacaatgtgagagaccacggggatctggcctttgtggatgtccccaatgacagcccctttcaaattgtgaagaacccacggtctgtgggaaaagccaatgaacagctggctgctgtggtagcagagacccagaagaatggaacaatcagtgtggtgctgggtggagaccacagtatggcaattggaagcatctctggccacgccagggtccaccctgacctatgcgtcatttgggtggatgctcacactgacatcaacactccgctgacaaccagctctgggaatctgcacgggcaaccggtggcctttctcctgaaggaactgaaaggaaagttcccagatgtaccaggattctcctgggtgaccccctgcatatctgccaaggacatcgtgtacatcggcttgcgagatgtggaccctggggaacactatataataaaaactctgggcattaagtatttctcaatgactgaagtggacaagctgggaattggcaaagtgatggaagagaccttcagctacctgctgggaaggaagaaaaggcccattcacctgagttttgatgttgatggactggacccagtattcaccccggctacgggcacacccgttgtgggaggcctatcttacagagaaggtctctacatcacagaagaaatttacaagacagggctactttcaggactagatatcatggaagtgaacccaactcttgggaagacaccagaggaggtgactcgtactgtgaacacggcagtgccgttgaccttgtcttgttttggaacgaaacgggaaggtaatcataagccagagactgactaccttaaaccaccgaaataaatgtgaatacatcgcataaaagtcatctggggcatcacagcaaaccgaacagaaccaggccaacgctgctcctcccaagggcttgttcttttagaaaaaagaatgttttttcccaatatgtatgtattctagcagttcctttctggaatgaaattcagggtgtgggaattaaaacagctatgaaattaggagacacgtacttcccattttagcagaagttatccttaagaagtagtataaattaatatctaattaaaaaatgcaccaggagttaaaatacacagtgatgtcaagtgtcaactcacggttggaagcaaaggcatctggagacgaggcctgcatccacgtcgttcaaaacatgtgatttttgtaataaactctttataat

SEQ ID NO: 3284 - DNA, 2199 bp, Rattus norvegicus
  Genbank Accession No. NM_017136
ccggaaggagttcggcaggtctcccggaccccctttgtgaactacattttgggtagaacattttaatcaccgaaacccttctgaggaaaaaaagactcccactgccccctgcaaaaaaacaaaagcaaaaacaaaaaaaccaaaccccaaacccccaaatctcagtcttagctggtgccaccaaagaagcttttgagccatgtggacttttcttggaattgctactttcacctatttttataagaaatgcggggatgtcaccctggccaacaaggagctcctgctgtgcgtactggtgttcctgtcgctgggcctggtgctctcctaccgctgtcgccatcgaaacgggggcctccttggccgccatcagagcggctcccagttcgctgccttctcagatattctctctgctttgcctcttattggcttcttctgggccaaatcaccccctgaatcagaaaagaaagaacagctggagtccaagaggcgcagaaaagaagtcaatctgtcagagacgacgttaacgggagcagctacctcagtatcgacatcatctgtgacggacccagaagtgatcatcatagggtctggtgtacttggctctgctttggcaacagtactctctagagatggaagaacggtgacagtaatcgagagagatttaaaagagcctgacagaatacttggagagtgtctgcagcccggtggctatcgagttcttcgagagctgggccttggagatacagtagaaagtcttaatgcccatcatatacacggctacgtaattcatgactgtgaaagcaggtctgaagttcaaattccatacccggtgtcagaaaacaaccaagtacagagtggggttgctttccaccatggcaagttcatcatgagtctccggaaagcagctatggcagagcccaatgtaaagtttatagaaggtgttgtgcttcggttactagaggaagatgatgctgtgattggtgtgcaatacaaggacaaggagactggggacaccaaggagctccatgccccgctcactgttgttgccgacgggctcttctccaagttcaggaagaacctcatctccaataaagtctctgtttcctcccacttcgttggcttcattatgaaggatgcaccacagtttaaagccaatttcgcggagcttgttctggtcgatcccagtccagttctcatctaccagatttcacccagcgaaactagggtgcttgtcgatattcgaggagaattgccaagaaacttaagagaatacatgacagaacaaatttacccacagatacctgatcacttgaaggaatcatttctggaggcctgtcagaatgctcgtctgcggaccatgccagcaagcttccttcctccttcctcagtgaacaaacgaggcgtcctacttctgggagatgcgtataacctgaggcatcctcttactggtggaggaatgacagtcgctttaaaagatataaaaatatggagacaactgttaaaagatattcctgacctttatgatgatgccgctattttccaggccaaaaagtcattcttttggtcaagaaaaaggagccattcctttgttgtgaacgtgctggctcaggcgttgtatgaactattttctgctacagatgattccttgcgtcagctccgaaaagcttgctttctttattttaaacttggtggagaatgtttgactggtcctgttgggttgctttctatattgtctcctgaccctctcctattgattcgacacttcttctccgttgcagtctatgccacgtatttctgcttcaagtcagagccatgggctacaaaacctcgggctcttttcagtagtggtgctatactgtacaaagcgtgctctataatatttcctctcatctattcagaaatgaagtatctggttcactgaaagggaaaccacatggaagtcattgggacttgaggaggatgtacatagcctaggactgtgtgtgtgacttctgcagtggtgactcaaggaccaagcttgtgtataagcatgtaaatatatgccttaattcacaattgagaatgaagggtcaataagctagatgtttaaaagaatgattgtttccacaaattaatgttaacactcaagtgtttggatttcagtattggggtgattcaattggggacaatgccaaataaaatgaaggagtggaactcctt

SEQ ID NO: 3285 - DNA, 1018 bp, Rattus norvegicus
  Genbank Accession No. NM_017138
gctggaacgggtccgtacggcgttgttcttggttcccatcgtaacttaaaagggaaacttacacaatgtccggaggccttgacgtcctgcagatgaaggaggaggatgtcctcaaattccttgctgcaggaacccacttaggtggcaccaaccttgactttcagatggagcagtacatctacaaaaggaaaagtgacggtatctacatcatcaacctgaagaggacttgggagaagctgttgttagccgctcgagctattgttgccattgagaaccctgctgatgtcagcgtcatctcctccaggaacactggccagcgagctgtgctgaagtttgccgctgccacaggagccactccaattgctggccgcttcacacctgggaccttcactaaccagatccaagcagccttcagggagccccggcttctagtggtgactgatccccgggctgaccaccagcccctcacagaggcctcttacgtcaacctgcccaccattgctctttgtaacacagattctcccctgcgctatgtggacattgccatcccatgcaacaacaagggagctcactcagtgggtctcatgtggtggatgctggccagggaagtactccgcatgcgaggaaccatctcccgggagcacccatgggaggttatgcctgatctttacttctacagggacccagaggagattgagaaggaggagcaggctgccgctgagaaggctgtgaccaaggaggaattccagggtgaatggacggcaccagcgcctgagttcactgctgctcagcctgaggtggccgactggtctgagggtgtgcaggtgccctctgtgcccattcagcagttccccacagaagactggagtgcacagccggccactgaggactggtcagcagctcccacagcacaggctactgagtgggttggagccaccactgagtggtcctgagctcctctgcaggtgcctgagcgaagggaaaaaaggtggaaggaaaataaagttcctgaaagctg

SEQ ID NO: 3286 - DNA, 3298 bp, Rattus norvegicus
  Genbank Accession No. NM_017141
cggcaccatgagcaaacgcaaggccccgcaggagaccctcaacggcggcatcacggacatgctcgtggaactcgcaaactttgagaagaacgtgagccaggcgatccacaagtacaatgcatacagaaaagcagcatctgtgatagcaaagtacccacacaaaatcaagagtggagcagaagctaagaaattgccaggagtaggaacaaaaattgctgaaaagattgatgaatttttagcaactggaaaattgcgtaaactggaaaagattcgtcaggatgatacaagttcatccatcaacttcctgactcgagttactggcatcgggccatctgctgcaaggaagcttgtagatgaaggaattaaaacattagaagatctcaggaaaaatgaagataaattgaaccaccatcagcgaattgggctgaaatattttgaggactttgaaaagagaattcctcgtgaggagatgctgcaaatgcaggacattgttcttaatgaagttaaaaagctggatcccgagtacatcgctacagtctgcggcagtttccgaagaggcgcagagtccagtggagatatggacgttctgctgacccacccaaacttcacgtcagaatcaagcaaacagccaaagttgttacatcgtgttgtggaacagttacaaaaagtccgtttcattacagatactcgttcaaagggtgagacaaagttcatgggtgtttgccagcttcccagcgagaatgatgaaaacgaatatccacacaggagaatcgatatcaggttgatccccaaagatcagtactactgtggtgttctctacttcactggaagtgacatctttaataagaatatgagagcgcatgccctggaaaagggcttcacaatcaatgagtacaccatccgccccctgggggtcactggggttgctggggagccccttccggtggacagcgagcaggacattttcgattacatccagtggcgctaccgggagcccaaggacaggagtgaatgacgcctgccccacccaggcctatcccacgaggagtcctaagttattgcttaacctttgctatgtaagggttgggtgttttaggtgattgcctcttctctgtgcttcccatggactatcgtcaatgaacctcttgagcagctattcagtattttcttagcacatgtgtttaaacttagatatgtttgtgatcgcagtaccatggtttactagagaaacgtaagagccgatgtgataagcagtgtttaatgacctttcacttccacctcacattgcagccacagtcggccccacttgtccctatccaccctttatgggtcagctggtctcccagagccatctccagaagtcacttcattatccttagaaacaaggggcttccaggcatggtggtgcacatccttaatcccaggacttgggaggcagagacaggcagatctctgtgagttcaaggccagcccagactacatactgaattcagggtgccagagctacatagtgaggccctatctaaaaagaaaggggccttcatagctgtaagacttctgtgaccatttcccatttgcagtgtatactgataactagaagacagtgtgtgctttacctcaggggcagccttcccctcacagctcaatggcacctaactagcattcatcagtcgtctggtggacagtccactgtttatcaaataacattctgtgacacgaacaaagaacttcaagtttaagaaagatttatttgagcagattgagccactgtgtctggatggctttattgtagagtcctgtcatgttgtagatggtagtcacaaagtcagaagtaactcatcacagcgtctggtcactgtcagttgctagaagattcagctttatttatgtgctgggtataatgtacttgcctgtaatcccaagactcactcgaggcaagaggaacatgagttcgaagcccaccctgggctatatagcttactctgagaccctgtctcagaacccttacccctccccccaaaaattatccaggaggcagaggcaggtgggtctctatgagtgtaaggccagccagggctacacagcgagaccactgtctcagaaaacaaaataaaaaatagaataaaattagtgccagggattctgtgtgaacacgagggacaagtcccatgtctgtacaacttatattctttggcatactcttagccttgtatgttgtcggttaccagtcacctgacttcgacaggacagtccagggaccacagtcacagcgctggaagatttctggggcttgggcagtgtctttgtgccccctcctggaacacacttgtccctctagtagaactggcttgcaaattttggtccaaaaatggcgagcacagcaaagtccagggccgcagtcggaggttctgagacagctttctccctcctgtcctgtaacaaggtaggctcaggctctagaggtggcagatgggttaagggtgtgtgtgtgtgtgtgtgtgtgtgtgtgtgtgtgtgtgtgttatactaatgggttgagattgggatctaggaatgaaggcctatatagcctatatataaactagcaaagccaacaggacacaggtctcacagaataagggaaattagagccctactgaacaaagacatcaaggaatgattatctaccctgagaaataggtagcactccacaaagtttgctaatacagtttttcgtgagcatcgattcctttacttataaaggggccagctagtccaatatgtgagtaggagcggctgttgtacctctccactttcaaatactctgttattcaagactttaactcgagactcctatttttgtttaaaagaatttttgtaaatccccaagtgtggtggcagacacctttaatcccagcagaagccgtcgggtctctgagttcctgaacagtctggtctacacagtgagttctaggatagcagagctacagacccttttgtactatgtacaagtctggagtgaatgcatcttctttaatccactctgtatgctgaggctataggaaaggtacgtggcacttggtacaccccagcttagggaaagccatcggttggaggtttccttcctaagctgtcatcactagggtcttgccctggcctggccaatagagtcccttgaattgctccaagagctcacagacatgaggtaaaggagtttagcttcagcctgtggggctgggagggagaaaatggtttttaaaataaaatatgctctccttaaaaaaaaaaaaaaaaaaaaaaaaaaaaaaaaaaaaaaaaa

SEQ ID NO: 3287 - DNA, 1497 bp, Rattus norvegicus
  Genbank Accession No. NM_017143
gaattcccccacatcatggagagcccggtgcgactcagccttctctatgttgtcctggccagcctcctgctcccggggagaagtgtgtttattaaccgggaacgagccaacaacgtcctgcagaggattcggagagcaaactcattttttgaggagataaagaaaggaaatctggaaagggagtgtgtggaagaaatttgttcttttgaagaggcccgcgaagtctttgaggacaatgagaagacgacagaattctggaacaaatatgaagatggtgaccagtgtgagagcagtccttgccagaaccaaggcgagtgtcgagatggccttgggagttatacatgcacctgcacggagggattcgaaggcaaaaactgtgaactctttgttcggaaactctgcagcctagacaacggagactgcgaccagttctgccgtgaggagcagaactcagtggtgtgctcctgtgccaagggttacttcctgggtaatgacggcaagtcctgcctctccacagctcccttcccctgtggaaaaaccaataaaggacgcgcgaagaggtctgtggccctaaataccagcaacagtgaacctgaccctgaagacctcatgcctgatgcagatattctatatcctactgagagtccttctgaactgctcaatctcaacaagacagagcctgaagcaaacagtgatgacgttattcggattgtgggtggccaagaatgcaagagaggagaatgtccttggcaggctctgctctttagcgacgaagagactgatgggttctgtgggggcaccatcttgaatgagttctacatcctcactgccgcccattgtctccatcaagccaagcgattcaaggtgagggtaggggacctgaacacggaacaggaagacggcggcgagatggtgcacgaggtggatatgatcatcaagcacaacaagtttcagagggacacctacgacttcgacattgccatgctgaggctgaagacccccatcacgttccgcgagaacgtggcccctgcctgcttgcctcagaaagactgggccgaggccacactgatgacgcaaaagacaggcatcgtgagcgggtttggacgcacgcacgagaagggccgccagtccaaagtcctgaagatgatggaggtgccctatgtggaccgcaacacctgcaggctctccaccagcttcagcattacgcagaatatgttctgcgcaggctatgacgccaagcaagaggacgcctgccagggggacagcggtggccctcacgtcacacgattcaaagacacctactttgtgaccggcatcgtcagctggggagaggggtgtgcaaggaaagggaaatacggcatctacacgaaggtcacggccttcctcaaatggattgacaggtccatgaaagccagggtggggcccacctctgagaccccaaggttaacccatccaccctattaaagcagtccttctccagaaaaaaaaacggaattc

SEQ ID NO: 3288 - DNA, 830 bp, Rattus norvegicus
  Genbank Accession No. NM_017144
cgcttgagcagcacagaggggacccaaccctccaaggtcaccagggacacccttctaagaccctccaggaatctgcaatcccattctctacctctggagatcagcatggcggatgagagcagcgatgcggctggggaaccccagccggcgcctgctcctgtccgacgtcgctcctcggccaactaccgagcctatgccaccgagccacatgccaagaaaaagtctaagatctccgcctccagaaaacttcagttgaagactctgatgctgcagattgcgaagcaggagatggagcgtgaggcagaggagcgacgtggagagaagggccgcgttctgagcacgcgttgccagcccttggtgttggatgggctgggctttgaagagcttcaggacctatgccggcagcttcacgctcgtgtggacaaagtggatgaagagagatacgacgtggaagcaaaagtcaccaagaacatcactgagattgcagatctgacccagaagatctatgacctgcgtggcaagtttaagcggcccactctccgaagagtgagaatctcagcagatgccatgatgcaggcactactggggacccgggccaaggaatccttggacctgagggcccacctcaagcaggtgaagaaggaggacattgagaaggaaaaccgggaggtgggagactggcgcaagaatatcgatgcactaagtggaatggaaggccgaaagaaaaagtttgagggctgagcccatggctctcacactgtgctctgaagggcatctctgaggaataaatttctttaaactggaaaaaaaaaaaaaaaaaaaaaaaaaaa

SEQ ID NO: 3289 - DNA, 1039 bp, Rattus norvegicus
  Genbank Accession No. NM_017147
gaaacatggcctctggtgtggctgtctctgatggagtcatcaaggtgttcaatgacatgaaagttcgcaagtcttcaacgccagaagaagtgaagaaacgcaagaaggcagtgctcttttgcctgagtgaggacaagaagaacatcatcctggaggagggcaaggagattctggtaggagatgtggggcagactgtggacgacccctacaccacttttgtcaagatgctgccagacaaggactgccgctatgctctctatgacgcaacctatgagaccaaggagagcaagaaggaggacctggtattcattttctgggcccccgagagtgcaccccttaagagcaaaatgatctatgccagctccaaggatgccatcaagaagaaactgacaggaatcaagcacgaattacaagctaactgctacgaggaggtcaaggaccgctgcaccctggcagagaaactaggtggcagcgccgtcatttccctggagggcaagcctttgtgagccacctccagccccctgcctggagcatctagcagccccagacctgctcttgggtgttgcaggctgcccttttcctgccagaccggaggggctgggggggttccagcagggggagggttttcccttcaccccagttgccaaacatccctcccaccccctggaccgtccttttccctccatccctgacggttctggccttcccaaactgcttttgatcttctgattcctcttgggttgaagcagaccaagtcccgtcctaggcacccagtttggggggagcctgtatttttttttttaacgacacccctactcctgatctgtcccatcccatgctgccaacttctaaccacaatagtgactctgtgcttgtctgtttagttctgtgtgtaaatgaactgtggaaatgaccctccctgcaccagctggttgccctcccctttccctttgatcttggccactcatggaagcaggaccagtaagggaccttcaatttaaaaaaaaaaaaaaacacaataaaaaggctaattaacaaa

SEQ ID NO: 3290 - DNA, 1403 bp, Rattus norvegicus
  Genbank Accession No. NM_017148
gctgtcgcccgtgcgcctcctagcagctgccagaatgccaaactggggaggaggcaagaaatgcggggtgtgccagaagacagtctactttgctgaggaggtccagtgcgagggcaacagcttccacaaatcctgcttcctgtgcatggtttgcaagaagaatctggacagcaccactgtggcagtgcatggagaagagatctattgcaagtcatgttatggcaagaagtatggaccaaaaggctacggctacgggcagggtgcaggcacgctgagcatggacaagggggagtctctgggcatcaagcatgaggaagcccccggacacaggcctaccaccaaccccaatgcatccaagtttgctcagaagatcggcggctctgagcgctgtccgcgatgcagccaggcagtctatgcagcggagaaggtgatcggtgccgggaagtcctggcataagtcctgcttccgatgtgccaaatgtggcaaaggcctcgagtcgaccaccctggcagacaaggatggtgagatctattgcaaaggatgctatgccaaaaactttgggcccaaaggttttggctttggacaaggagctggcgccttggtccattcagagtgaggctgccgctgcgtaccctgcctactcctgcactctcataagcagtccgttcctggaagccatggacacctccaagatcctctctctcactcagccctgctgcacatcactaatgccttggacttgggtgttctttggcttaggggtctgcctgagttccttccccactaagggcttcctcctgcctggcattcgatacccttatctttaggagacatctgtctagtcaccccttcccagataccaggtccctctcccccacaccttacccctacagacctctgtggccaggacactctctactggccaggacacctgaccccacatctttggagcccaaaagagcaaggcggaagacctgcgctagggaaggctgtggtctattgtatccagagtctctctctgggtaggatgctgagcttcttggtgcctctcagtctggaagtccccgtgagaggcagagaggtgcggataggattgtggggtcatcagaaggagcttgttctctgacctcttgcctttgaatgtggaaataataacttttcacttagggatgaagaagaacgcaggtcagaggaccccaaaatctagaggttgcctgacctcaagttccctgttccatgggcaagggagagcctaatgcataccttgaacaaggcattgacatggatcagtggtccagatcttagagtggtcagttctggttctaagcttgggtctggtggctgggatggacagcttctgttgcagcatagcccagggtagagctgtgttctagccactcctg

SEQ ID NO: 3291 - DNA, 630 bp, Rattus norvegicus
  Genbank Accession No. NM_017150
tcttccggtcccaggcgctcggggagccgcggcttaccgtgcagacatggccaagtccaagaaccacaccacacacaaccagtcccgcaaatggcacagaaatggcatcaagaaaccccggtcacaaagatacgaatctcttaaaggggtcgaccccaagtttctgaggaacatgcgctttgccaagaagcacaacaagaaaggcctgaagaagatgcaggccaacaatgccaaggcagtgagtgcacgagcagaggccatcaaggccctcgtgaagcctcaggctgtcaagcccaagatgccaaagggctccagccgcaaactcagccgtctggctttcatcgctcaccccaagcttgggaagaagattcgaagctacatggccaagggtcgtaggctctgccaaccaaagcccaaggttcaaaccaaggcagaggccaaagctccagctaaggcccaggccaaagctccagcccaggctcccaagggtgcccaggcccctgtgaaggccccatagaacaggctcctgccagtgtgaagacagacagactgctgtgacacacccacctacacactatctgcagatgaccagtgtcctatgctgtttttacaaataaacttgagacaaga

SEQ ID NO: 3292 - DNA, 466 bp, Rattus norvegicus
  Genbank Accession No. NM_017152
cctcttttaccgagacccgtcaacatgggccgcgttcgcaccaagactgtgaagaaggcggcccgggtcatcatcgagaagtactacacgcgcctgggtaatgactttcacaccaacaagcgcgtgtgcaaggagatcgccatcatccccagcaaaaaccttcggaacaagatagccggctatgtcacgcatctgatgaagcggattcagagaggtcctgtgagaggcatctccatcaagttgcaggaagaagagagggagaggagagataattatgttcctgaggtctcagccctagatcaggagatcattgaggtagatcctgacaccaaggaaatgctgaagcttctggactttggcagtctctccaacctccaggtcactcagcctacggttgggatgaatttcaaaacaccacgtggagctgtttaatccattatgccatattttcaataaacctgaaaac

SEQ ID NO: 3293 - DNA, 4198 bp, Rattus norvegicus
  Genbank Accession No. NM_017154
agagctcagtgactccagcagccacgatgactgcggatgagttggtcttctttgtgaatggcaaaaaggtggtggagaaaaatgcggaccctgaaacaacacttctggtctacctgagaagaaagttggggctatgtgggaccaagcttggctgtggagaaggtggctgtggggcatgcaccgtgatgatctccaagtatgaccgtcttcagaacaagattgttcatttttctgtcaatgcctgcttggctcccatctgctccttgcaccatgttgctgtgaccaccgtggaaggcataggaaacacccagaagctgcatcctgtacaggagagaattgccagaagccatggttcccagtgtgggttctgcactcctggcattgtcatgagtatgtacacactgctccggaaccagcctgagcctactgttgaggagatcgagaatgccttccaaggaaacctctgtcgctgtacaggctacagacccatcctccagggattccggacctttgccaaggatggtgggtgctgtggagggagtggaaacaacccaaactgctgtatgaaccagacgaaagaccaaacggtttctctctcaccttctttattcaacccagaggatttcaaacctttagatcccacgcaagagcccatcttccccccagagttgctgaggctgaaagacactccccagaagaagctgcgttttgaaggggaacgtgtgacctggatccaggcttcaactatggaggagctgcttgacctgaaagctcagcaccctgatgccaagctggtggtgggaaacacagagataggcattgaaatgaaatttaagaatatgctatttcctctgatcgtctgcccagcctggatccctgaactgaattcagtggtgcatgggcctgagggaatctccttcggagcttcttgcccccttagcttggtggaaagtgtcctggcggaggagattgctaaacttccagagcaaaagacagaggtgttcagaggcgtgatggagcagctgcgctggtttgccggcaagcaggtcaagtccgtggcgtccatcggagggaacatcatcactgccagccccatctctgacctcaaccctgtgttcatggccagtggagccaagctgactctggtgtctagaggtaccaggagaactgttcggatggatcataccttcttccctggctacagaaagactctgctcagaccagaggagatattgctgtccatcgagatcccctatagcaaggagggagagtttttctcagccttcaagcaggcctccaggagggaagatgacattgccaaggtgactagtggcatgagagtcctgttcaaaccggggaccattgaagtgcaggaactgtccctttgcttcggagggatggccgacagaactatctcagccctcaagaccactccgaagcagctatcgaagtcctggaatgaggagctgctgcagagcgtgtgtgccggcttggcagaggagctgcagctggcccccgatgcccctggtggtatggtggaattccggcgcaccctcaccctcagcttcttcttcaagttctacctgacagtgctccagaagctgggcagagcggaccttgaggatatgtgtggtaaactggaccccacctttgccagtgccaccctgctctttcagaaggaccctccagctaatgtccagcttttccaagaggtgccaaaggatcagtctgaggaggacatggtgggccggcccctgcctcacctggcggcaaacatgcaggcatcgggagaggccgtgtactgtgatgacattccccgctatgagaatgagctctctctcaggctggtcaccagcacccgggcgcatgctaaaatcacgtccatcgacacttcagaagccaagaaggtgccagggtttgtttgcttcctcaccgcagaggatgtccctaatagtaatgcaaccggccttttcaatgatgaaactgtctttgcgaaggatgaggttacttgtgttgggcacatcattggtgctgtggtcgctgacaccccagaacacgcacagagagctgcgagaggggtgaaaatcacctatgaagatcttccagccattatcacaatccaggatgctataaacaacaactccttttatggctctgagataaaaattgagaaaggagatctcaagaaaggcttttcagaagctgacaatgttgtctcaggagagttgtatatcggtggccaggagcacttctacctggagaccaactgcaccattgccgtgccaaaaggcgaggcaggcgagatggagctgttcgtgagcacacagaacaccatgaaaacccagagctttgttgcaaaaatgttgggcgttccggacaacagaatcgtagtccgagtgaagaggatgggtggaggctttggagggaaggagacccggagcactgtggtgtccacagcactggccttggctgcacacaagactggccggcccgtacgttgcatgttggaccgagatgaggacatgctgataactggtggcagacatcccttcctggctaaatacaaggttggcttcatgaagactgggactgtagtggctctcgaggtggctcacttcagcaatggtggtaacactgaggatctctctcggagtataatggaacgagctttgttccacatggataacgcctataagatccccaacattcgaggcactgggaggatttgcaagactaatctgccctccaacacagccttcagaggttttgggggtcctcaggggatgctaatcgcagaatactggatgagcgaggtcgccataacctgtgggctgcctgcagaggaggtacggaggaaaaacatgtacaaagaaggggacctgactcacttcaaccagaagctggaggggttcaccttgcccaggtgctgggatgaatgcatcgccagctctcagtatcttgctcgcaagagggaagtggagaaattcaacagggagaattgttggaaaaagagagggctgtgtataatcccaactaagtttggaataagctttacacttccttttctgaaccagggaggcgctctggttcacgtgtacactgatggttcggtgctgttgacccatggagggactgagatgggccaaggccttcacaccaagatggttcaggtggccagcagagctctgaaaatccccacctccaagattcatataagtgagacaagcactaacaccgtccccaacacttctcccacagctgcctctgccagtgctgacctcaatggacagggtgtttatgaagcatgccagaccatactgaaaaggctggaacctttcaagaagaagaaacccaccggcccctgggaggcatgggtgatggacgcctatacgagcgcagtgagtttgtccgcaactggattttataagacacccaaccttggctacagctttgagacaaactccggaaatcccttccactatttcagttatggggtggcttgctctgaagtagaaattgactgcttaacaggggatcataagaatctccgtacggatatcgtcatggatgttggttccagcttgaatcctgccattgatattggacaagtagagggggcatttgtccagggccttggtctcttcactatggaggagctgcactactcccctgaggggagcctgcatactcgtggccccagtacctacaaaatccctgcatttggtagcatccccattgagttcagagtatccctactccgggactgccccaacaagagggccatctatgcatccaaggctgttggggagccacctcttttcctggcttcctctatcttctttgccatcaaagatgccattcgtgcagctcgagctcagcacggagataacgcaaaacaacttttccagctagacagccctgccactccggagaagatccgaaacgcctgtgtggaccagttcaccaccctgtgtgtcactggagtaccagaaaactgtaaatcctggtctgtgaggatctgaagagaaggtctccaccattggtttgtaccgcaccaggattccttggagccacaagcacatcctgtagtatccagatttccgcatgccgcgtgggactcagcaggatgacattttcaggaagatggacattttgacccaaataagagctgcaaacaaaccaataagcaaatggggag

SEQ ID NO: 3294 - DNA, 1731 bp, Rattus norvegicus
  Genbank Accession No. NM_017158
ggcatcagtaaggagggtctccatggatctggtcactttcctggtacttactctctcctctctcattctcctctcactctggagacagagctctaggagaaggaagctccctcctggccccactcctctcccaataattggtaatttcctccagatagatgtgaagaacatcagccaatccttaaccaagttttcaaaaacctatggccctgtgttcactctgtatttgggctcacagcccactgtcatattgcatggatatgaagcaataaaggaagctctgattgataacggggagaagttttctggtagaggaagctatccaatgaatgaaaatgttactaaaggttttggcattgtttttagcaatggaaacagatggaaagagatgagacgattcacaatcatgaactttcggaatttgggaattggaaaaaggaacattgaggaccgtgttcaagaggaagcacagtgcctagtggaagaactgaggaaaacaaaaggctcaccctgtgacccctccttgatcctgaactgtgctccatgcaatgtcatctgctccattactttccagaatcattttgattataaagataaggaaatgcttacgttcatggaaaaagtgaatgagaatctcaagattatgagctccccatggatgcaggtctgcaatagttttccttcactcattgactattttcctggaactcatcacaaaatagcaaaaaatattaattatatgaaaagctatttgttgaagaaaatagaagaacaccaggaatcattggatgttacaaaccctcgtgattttgttgattattacctgattaaacaaaaacaggcaaacaacatcgaacaatcagaatattcacatgaaaatctgacatgcagtatcatggatctcattggtgcagggacagagacaatgagcacaacattgagatatgctctcctgcttctgatgaagtacccacatgtcacagctaaagtccaggaagagattgaccgtgtgattggcagacatcgcagcccctgcatgcaggatagaaaacacatgccctacactgatgccatgattcatgaggtacagagattcattaactttgtcccgaccaacctgccccatgcagtgacctgtgacattaaattcaggaactacctcatcccgaagggaacaaaagtgttaacatcactgacatcagtgctgcatgacagcaaggagttccccaacccagagatgtttgaccctggccactttctagatgagaatggaaactttaagaaaagtgactactttttgcctttctcagcaggaaaacgagcttgtgttggagagggcctggcccgcatgcagttgtttctattcttgacaaccattttacagaactttaacctgaaatctctggttcacccaaaggacattgatacgatgccagttctgaatggttttgcctctctgccacccacttaccagctctgcttcattccttcctgaatagatcaggcattttggcttctactgtgttgccttctgcaatccccttcaggtttttatccagtcccttccctctatcatccatcctgactcttgtcttaagatccagaaagcacatgcagtttctggagttatagcacaaatccacttgtattatctctttcatataacaatttatgatcccttgtgtcattgtgtatccattcctgagttaaaataaagcttcactataaaat

SEQ ID NO: 3295 - DNA, 801 bp, Rattus norvegicus
  Genbank Accession No. NM_017160
gtcggctgtgtcaagatgaagctgaatatctccttccctgccactggctgtcagaaactcatagaagtggatgacgaacgcaagcttcgtacgttctatgagaagcgcatggccacagaagtagctgctgatgctcttggtgaagagtggaagggttatgtggtccggatcagcggtgggaatgacaaacaaggttttcccatgaagcaaggcgttttgacccatggcagagtgcgcctgcttttgagtaaggggcattcttgttatagacctaggagaactggagagaggaagcgcaagtctgtccgaggatgcattgtggatgccaacctgagtgttctcaacttggttattgtaaaaaaaggagagaaggatattccaggactgacagataccactgtgcctcgtcggttgggacctaaaagagctagtagaatccgaaagctttttaatctctccaaagaagatgatgtccgccagtatgttgttagaaagcccttaaacaaagaaggtaagaagcccaggaccaaagcgcccaagattcagcgtcttgttactccccgtgtcctgcaacacaaacgccgacgtattgctctgaagaagcaacgcactaagaaaaacaaggaggaggctgcagaatatgctaaacttttggccaagagaatgaaggaagccaaagagaagcgccaggaacagattgccaagagacgtaggctgtcttcgctgagagcttctacttctaaatctgagtccagtcaaaaataagtctttaaagagtaacaaataaataatgagaccttg

SEQ ID NO: 3296 - DNA, 872 bp, Rattus norvegicus
  Genbank Accession No. NM_017165
gactcggcctcgcgcgtccattggtcggctgcgtgaggggaggagccgctgcccgccgagatgagctggggccgtctgagccgcttattgaagccagcactgctgtgcggggctctggctgtgcctggcctggctggcaccatgtgtgcatcccgcgatgattggcgctgtgcgcgctccatgcacgaattctcagccaaggacatcgatgggcacatggtttgcctggataagtacaggggttgcgtgtgcatcgtcaccaacgtggcctcgcaatgaggcaaaaccgacgtaaactacactcagctagtcgatctgcatgcccgatacgccgagtgtggtttacgaatcctggccttcccttgcaaccagttcgggaggcaggagccaggaagtaatcaagaaatcaaggagtttgcagccggctacaatgtcaggtttgacatgtacagcaagatctgtgtaaatggggacgatgcccacccactgtggaaatggatgaaagtccagcccaagggcaggggcatgctgggaaatgccatcaaatggaactttaccaagtttctcattgataagaacggctgcgtggtgaagcgctatggtcccatggaggagccccaggtgatagagaaggacctgccgtgctatctctagccctacaagtgttggcccctgcaccgagcccccctgccctgtgacccctggagccttccaccccggcactcatgacggtctgcctgaaaaccagcccgctggtggggcagtcccgaggacctggcgtgcatccccgccggaggaaggtccagacgctgtggccccgggctcgaggcttcaccttggctgccttgtgggaataaaatgtagaaatgtgc

SEQ ID NO: 3297 - DNA, 1054 bp, Rattus norvegicus
  Genbank Accession No. NM_017166
ggtccgagccgcctggcttaggcggaggcgacggcagggtagggagcagccgggaacgcggcgagcccctagccggggacacgggacgggcggagacctcgagccctgggctttccttgccagtggattgtgtagagtgtacagccagtctcttgtcttctgtccaacatggcatcttctgatattcaggtgaaagagctggagaagcgagcttccggccaggcttttgagctgattctcagccctcgatcaaaagaatctgtccccgagttccccctttcccccccaaagaagaaggatctttccctggaggaaattcagaagaaattagaagctgcagaagaaagacgcaagtctcatgaagcagaagtcttgaagcagctcgctgagaagcgggagcatgaaaaagaagtgctccagaaagccattgaggagaacaacaacttcagcaaaatggcagaggagaaactgacccacaaaatggaggctaacaaagagaaccgggaggcgcaaatggctgccaagctggagcgtttgcgagagaaggacaagcacgttgaagaggtgcggaagaacaaagaatccaaagaccccgcggacgagaccgaggctgactaagttgttccgagaactgactttctccccgaccccttcctaaatatccaaagactgtactggccagtgtcatttactttttcctccctgacaaatattctagaagctgatgtaggaaccgtataggtagatccagaccgtgagatgttttaggggctcaaggggagaaactgaaagtgttttgctcttttttaaagtgttggtctttctaacgtagctatttttctcgttgcatcttttcctctcgggcacactcggtgtgctgggttaatggctagtgctgtattgactgtggaagacgttcgtgaagagtatgtagtggcttcttccaacccattagatgctgagtatctgttcactttgcgatcccaattctgtcccaatctcaccagatgctactgtactggaatggttaataaactgcacagtgctgttggtc

SEQ ID NO: 3298 - DNA, 877 bp, Rattus norvegicus
  Genbank Accession No. NM_017169
gaattcggcacgagggtcgtccgcgtgtccggctcttgcccacgcagtcatggcctccggcaacgcgcacatcggaaagcctgcccctgacttcacgggcaccgccgtggtggatggtgcctttaaggaaatcaagctttcagactacagagggaagtacgtggtcctctttttctatccactggacttcacttttgtttgccccacggagatcatcgcttttagcgaccacgctgaggacttccgaaagctaggctgcgaggtgctgggagtgtctgtggactctcagttcacccacctggcctggatcaataccccacggaaggagggaggcttgggcccactgaatatccctctgcttgctgatgtgactaaaagcttgtcccagaattacggcgtgttgaaaaatgatgagggcatcgcttacaggggcctctttatcatcgatgccaagggtgtccttcgccagatcacagtcaacgacctacctgtgggacgctctgtagatgaggctctccgcctcgtccaggcctttcagtatacagatgagcatggggaagtctgtcctgctggctggaagcccggcagtgacaccatcaaacccaatgtggatgacagcaaggaatacttctccaaacacaactgagatgggtaaacatcggtgagcctgaatcccggatctcacctgcgcccttacctggatgtcctgtgctggcccagaaaacgctagatcttcctctacattctaaaggggctggaggctaggccgaggctttctcattacccacctggaatctggtgaatagtgaccctgccctgagcacacccagctgggcccaggtctataggaaaccaataaagtattagggacagtgta

SEQ ID NO: 3299 - DNA, 931 bp, Rattus norvegicus
  Genbank Accession No. NM_017170
atctgaagagcatagggggccaccacactttcgtcccatacccaagcaacagctgctgctgctgtcataccctggaccaagcatggacaagctgctgctttggatgtctgtcttcaccagccttctttcagaagcctttgctcagacagacctcaatcagaaggtatttgtgttccccagagaatctgaaactgattatgtgaagctgatcccatggctagaaaaaccgctgcagaattttacactgtgtttccgagcctacagtgacctttcccgctctcagagtcttttctcctacagtgtcaacagcagagacaatgagctactaatttataaagcaaagttggaacaatatagcctatacattggaaattcaaaagtcacagtccgtggtttagaagaattcccttctccaatacatttctgtaccagctgggagtcctcctctggtattgctgaattttgggtcaatggaaagccttgggtaaaaaagggtttgcagaagggatacactgtgaaatcctcacccagtattgtcctgggacaggagcaggatacgtatggaggagggtttgataagacacagtcctttgtgggagagattgcagatttgtacatgtgggacagtgtgctgaccccagagaacattcattctgtggacagaggtttcccacccaatcctaatattttggattggcgggccctgaattatgaaataaatggttatgtagtcatcaagccccgtatgtgggacaacaaaagctcatgaaaatgagatgatcagggtgttcgaggtcaaggtggcagaactcactctatctggagttttttcttctttatgaatgtcctgtctaaatatctgccaaataaaaatcctatcaaattctaaaaaaaaaaaaaaaaaaaaaaaaaaaaaaaaaaaaaaaaaaaa

SEQ ID NO: 3300 - DNA, 2741 bp, Rattus norvegicus
  Genbank Accession No. NM_017172
ccgggagcaggcgtgtgggactcctgaccggagagccggaggctgcgccttccccgcaccgggaccttcacgacacaacagatcctagtccttgccccgtgcgaacgcccacgatgaccaccaccctcgtgtccgccaccattttcgacttgagcgaagttttatgcaagggtaacaagatgctcaactacagcactcccagtgctgggggctgcctgctggacaggaaggcagtgggcacccctgctggcgggggcttccctcggaggcactcggtcactctgcccagctccaagttccatcagaaccagcttctcagcagtcttaagggtgagccggccccgaccctgagctcacgcgacagccgctttcgagaccgctctttctccgaagggggcgagcggctgctgcccactcagaagcagcctgggagcggccaggtcaactccagccgctacaaaacggagctgtgccgccccttcgaagaaaacggtgcctgtaagtacggggacaagtgccagttcgcgcacggcatccacgagctccgcagcctgacccgccaccccaagtacaagacggagctgtgccgcaccttccacaccatcggcttttgcccttatgggccccgctgccacttcattcacaacgccgaggagcgacgcgccctggcggggggccgggacctctccgctgaccgtccccgcctccagcatagctttagctttgctgggtttcccagtgccgctgccaccgccgctgccacggggctgctggacagccccacgtccatcaccccaccccccatcctgagcgccgatgacctcttgggctcacctaccctgcccgatggcaccaataaccccttcgccttttccagccaggagctggcgagcctctttgctcctagcatggggctgcccgggggaggctcccccaccaccttcctcttccggcctatgtccgaatcccctcacatgtttgactctccccccagccctcaggattctctctcggaccatgagggctacctgagcagctccagcagcagccacagtggctcagactcccctaccttggacaactcaagacgcctgcccattttcagcagactctccatctcagatgactaagccagggtagggagggaccccctgcctccttcacctctccaccctgcaccccatcccataccttcacctccccaccccctaactttccttcaaaccctacattcatacatttaagctcaacccctttcccagaaccttggtatgttacccttcccccaacataaggacaagtcaatttgttggtagcttctggcttgaaaaccccctccctccatttcatagcccacttaaccacgcataacagagtcccatctttgtcagtagatgccttttttttcggcttaagccttaagtgccaaatcacaaaagaaaaaaagcagtaaccgtttacagaagcaacttagtgccttgtaatctaactttggtcactgtgactacattacctcttcaacgccagggggcacccgtgggcctcccagagcctctgcccgtggggtttgggggcgggggagcggtgacccgcaaccagcagctccctcagctggccacacaagtgcaccttcctttcagtctcccgcacattcttcctcttccttgtagatacttgcctccctcagagaattgttgctggacttggggggggcgggggtttgggtgggtggggacctattttgacattcaaaaccttttttttcccagctcgaacccctgttgactaatcttgcctgggtttgtgtaggtctccagggacaaaggttgaacaagttggacgaaggttttgacataagtgggactttgtgatttaatttcttttttttctttttctttcttttttttttaagtggggaggaaggggaaactagatggactatgagagacttgattttggtgctaaagttccccaattcatatgtgtacatcttaaaaatgacaacaaatgagagaaaagctaaaaaaaaaaaaaaaaaaaaaagaagaaaacctatgtaaggggtgagcagtaatggtattcattccacatacaatatctgtgtaaaaacaatttcctgtagacgtagctttaatggattttgctctagaataccttaggtctaccttagagccctcacgccatgcttttgtccctgggtttaaacttcatctaactttcagaaattggagagcaaaaatgttgctttatcactgcacatcaatataaaaaagcttatttaacttatcaagacgtatttattgccaaactatgctttttttttgttaattttgttcatatttatcgggatgacaaatccatagaatatattcttttatgttaaattatgatcttcatattaatcttaaaattttgtgacgtgtctttccttttttttttccacagttttaatatattattcttcaacaacatttttgtaactttacacttttttttggttattttattttaaaaaaatgaaaaattaatttaaaaaaaatgcaaaaaactgttggattatttattttagaaattctcccctttgtgttggactgcaaattgagtttctttctccttaggcctttcacaggtaggactgagaatgtataagttctgtgacagtacagaaggaaaaccaccatttatgtatagcttctaaaagggaaaacaaaaaaaaaaagagagagagagaaaaacccttt

SEQ ID NO: 3301 - DNA, 1353 bp, Rattus norvegicus
  Genbank Accession No. NM_017180
gagcgcctctcggagctgggttttcccccgcggcgcgggagccaggagccgccttttccgctgggtgtcactcgggggtggggagggtggcccattgaaaagcgctgcgaggggccccggccagtgcccttcagtgagcgctccgcggaagacggcagagagcagcccgctcacggctccgggatcttgtggcgggtcaggactcgcctgtccctctgccgggaccccgagccaccgccgccaccgccaccgctctgtctcctgcgagtcagccttctctgtgcgctccgggcaggcggccgcggaagccgctggagcgaggacagcgcacggctgctactgctacccccagccggagcgtctggaagcctaaaggccgagcggagcagcagcaccccttatgccggaaggatgctggagagcagcggttgcaaggcgctgaaggaaggagtgctggaaaagcgaagcgacgggctgctgcagctctggaagaaaaagtgctgcatcctcactgaggaagggctactgctcataccgcccaagcaggtacaacatcagcagcagcaacagcagcagcaacagcccgggcaggggacagccgaaccgtcccaacctagtggccccgccgtcaccagccttgagccaccagccaagctgaaggaattgcacttttccaatatgaagactgtagactgcgtggagcgcaagggcaagtatatgtacttcactgtggtgatggcggagggcaaagagatcgactttcggtgtccccaggaccagggctggaacgcagagatcacgttgcagatggtgcagtacaaaaatcgtcaggccatactggcggtcaagtctacgaggcagaagcagcagcacctggtccagcagcagcctccgcagacgcagcagatccaaccccagccccagcagccgcagatccaaccccagccccagccgcagatccagcctcaaccccaaccccaaccccaacctcagccccaaccccagcagcagccccagccccaacagctccactcctacccgcacccgcatcctcatctttaccctcaccctcaccctcacgcgcactcgcacccgcacccgcaccctcaccctcatccacaccaactccagcatgcgcaccagcctctccactcgcagccacagggccaccggcttctccgcagcacctccaactctgcctgaagagggcggcacccgggccactcaaggttttgaggacttcgggaagtgggaagagtgcattactatttaagttcacttggatcaaaaccaacggaggtctccccgccctgtgccagatcaagtagtttggacatcaccctacggataacg

SEQ ID NO: 3302 - DNA, 1386 bp, Rattus norvegicus
  Genbank Accession No. NM_017181
ctgctgcccagtgctcttcagcatgtcctttattccggtggccgaggactccgactttcccatccaaaacctgccctatggcgttttctccactcaaagcaacccaaagccacggattggtgtggccatcggtgaccagatcttggacctgagtgtcattaaacacctctttaccggacctgtcctctccaaacatcagcatgtcttcgatgagacaactctcaatagctttatgggcctcggccaagcggcatggaaggaggcaagagcatctttacagaacttactgtctgccagccaagcccagctcagagatgacaaggagcttcggcagcgtgcattcacctcccaggcttctgccacgatgcaccttcctgctaccataggagactacacggacttctactcctctctgcagcatgccactaacgttggcattatgttcaggggcaaggagaatgcgctgttgcccaattggctccacttacctgtgggataccatggccgagcttcctccgttgtggtgtctggtaccccaattcgaagacccatgggacagatgagacctgataactcaaagcctcctgtgtacggtgccagcaaacgcttagacatggagttggaaatggctttctttgtaggccctgggaacagattcggcgagccaatccccatttccaaggcccaggagcacattttcgggatggtcctcatgaacgactggagtgctcgagacatccagcaatgggagtacgtcccccttgggccattcctggggaaaagttttggaaccaccatctccccatgggtggtgcccatggatgctctcatgccctttgtggtgccaaacccaaagcaggaccctaagcccctgccatatctctgccacagccagccctacacatttgatatcaacctgtccgttgctttgaaaggagaaggaatgagccaggcagctaccatctgcaggtccaactttaagcacatgtactggaccattctgcagcaactgacacaccactctgttaatggatgcaatctgagacctggggacctcttggcttctggaaccatcagtggatcagaccctgaaagctttggctccatgctggaactgtcctggaagggaacaaaggctatcgatgtggggcaggggcaaaccaggacctttcttctggacggagatgaagtcatcataacaggtcactgccagggggatggctaccgtgttggttttggccaatgtgctgggaaagtgctgcctgccctctcgccagcctgaagctccagaatccacagaacacagccttgccttgtgaggatcatactgcaactgcatgagtcaggaatgaataaagctattttgattggggaaaaaaaaaaaaa

SEQ ID NO: 3303 - DNA, 1290 bp, Rattus norvegicus
  Genbank Accession No. NM_017189
tcttagcacaaacccaattctagctctaaggaaatctcaattcagtcccagatctgtctccagcctgagggcccatcatggagaaggactttcaagatatccagcagctggactctgaggaaaacgaccatcagctcattggcgatgaggaacaaggctctcatgtgcagaatcttaggacagaaaatccacgttggggaggacagcctccttccaggccctttccacagcgcctctgctccaagttccgcctcagtctgctcgccctggccttcaacattctcctgctggtggtcatctgtgtggtttcatcccaaagcatgcagctgcaaaaggagttctggaccctgaaagaaaccttgagcaacttctccaccaccaccctgatggagttcaaggctctggactcccacggaggtagcaggaatgacaacttgacttcttgggaaaccatactggagaaaaagcagaaggacataaaagcagatcactccacgctgctcttccacctgaagcacttccccctggatctgcgaaccctgacctgtcagctggcgttcttcctgagcaacggcacagaatgctgccccgttaactgggtggagtttggtggaagctgctactggttttctcgggatgggctcacctgggctgaggctgaccagtactgccaaatggagaatgcccatctgctggtcatcaactccagggaggagcaggaattcgttgtaaagcacaggggcgcgtttcacatttggataggtctcaccgacaaggatggctcctggaaatgggtggatgggacggaatatagaagtaacttcaagaattgggctttcactcagccagataactggcagggccatgaagaggggggaagtgaagactgtgctgaaatcctgtcagatggcctctggaatgacaacttctgccagcaggtgaaccgctgggcttgtgaaaggaaacgggacatcacctactaggagtctgctctactatgtctttgtcaaccctccccccaacccccgcatcactcattaggagtctgctctaccatgtctctgccccaccccatcaccgcatcaccccaacattttcactggggatattggagcaagaaagagagacagagtcccaggcatgaggggggttatgggagaatggaaagggggtggctctatggtctcatacgttaggaagactgagattccacccctcttcacaacttattacaattgttataaatttcaacaatggagtaggaaagaaaaaaataaacaataccagaaa

SEQ ID NO: 3304 - DNA, 2475 bp, Rattus norvegicus
  Genbank Accession No. NM_017190
cagaagccagaccatccaaccttctgtatcagtgctcctcgtcgcctcactgtacttcacggaagagacttggttgactggccacttggagcggaatcaggagacattcccaactcagggagactgaggtgagggccctagctcgcccacttgctggacaagatgatattccttaccaccctgcctctgttttggataatgatttcagcttctcgaggggggcactggggtgcctggatgccctcgtccatctcagccttcgagggcacgtgtgtctccatcccctgccgtttcgacttcccggatgagctcagaccggctgtggtacatggcgtctggtatttcaacagtccctaccccaagaactacccgccagtggtcttcaagtcccgcacacaagtggtccacgagagcttccagggccgtagccgcctgttgggagacctgggcctacgaaactgcaccctgcttctcagcacgctgagccctgagctgggagggaaatactatttccgaggtgacctgggcggctacaaccagtacaccttctcggagcacagcgtcctggacatcatcaacacccccaacatcgtggtgcccccagaagtggtggcaggaacggaagtagaggtcagctgcatggtgccggacaactgcccagagctgcgccctgagctgagctggctgggccacgaggggctaggggagcccactgttctgggtcggctgcgggaggatgaaggcacctgggtgcaggtgtcactgctacacttcgtgcctactagagaggccaacggccaccgtctgggctgtcaggctgccttccccaacaccaccttgcagttcgagggttacgccagtctggacgtcaagtaccccccggtgattgtggagatgaattcctctgtggaggccattgagggctcccatgtcagcctgctctgtggggctgacagcaacccgccaccgctgctgacttggatgcgggatgggatggtgttgagggaggcagttgctgagagcctgtacctggatctggaggaggtgaccccagcagaggacggcatctatgcttgcctggcagagaatgcctatggccaggacaaccgcacggtggagctgagcgtcatgtatgcaccttggaagcccacagtgaatgggacggtggtggcggtagagggggagacagtctccatcctgtgttccacacagagcaacccggaccctattctcaccatcttcaaggagaagcagatcctggccacggtcatctatgagagtcagctgcagctggaactccctgcagtgacgcccgaggacgatggggagtactggtgtgtagctgagaaccagtatggccagagagccaccgccttcaacctgtctgtggagtttgctcccataatccttctggaatcgcactgtgcagcggccagagacaccgtgcagtgcctgtgtgtggtaaaatccaacccggaaccctccgtggcctttgagctgccttcccgcaacgtgactgtgaacgagacagagagggagtttgtgtactcagagcgcagcggcctcctgctcaccagcatcctcacgctccggggtcaggcccaagccccaccccgcgtcatttgtacctccaggaacctctacggcacccagagcctcgagctgcctttccagggagcacaccgactgatgtgggccaaaatcggccctgtgggtgctgtggtcgcctttgccatcctgattgccattgtctgctacatcacccagacaagaagaaaaaagaacgtcacagagagccccagcttctcagcgggagacaaccctcatgtcctgtacagccccgaattccgaatctctggagcacctgataagtatgagagtgagaagcgcctggggtccgagaggaggctgctgggccttaggggggaacccccagaactggacctcagttattcccactcagacctggggaaacgacccaccaaggacagctacaccctgacagaggagctggctgagtacgcagaaatccgagtcaagtgaggaagctgggggctggccctgtggctcaccccccatcaggaccctcgcttggcccccactggccgtgggctccctttctcttgagagtggtaggggtgggggcgggaaggggcggggcaggaaacagtgaggtcttaggggcccggcctcccctccttcccggctgctcctctctgccaacatcctgcacctatgttacagctccctctcccctccttttaacctcagctgttgagaggggtgctctgtctgtccatgttatttattgttatcctggtctcctgtccccttacccggccccaggacctgtacaaaagggacatgaaataaatgtcctaatgacaagtgccagtctagacccatcctttggaggaaaggggcatattagtaatacttttctcgttgctgtaacaaaatactggacaaaaacac

SEQ ID NO: 3305 - DNA, 653 bp, Rattus norvegicus
  Genbank Accession No. NM_017196
ccagaaggactgggagctggtggagagaggagccagccaacacactgcagcctcatcgtcatctccccacctaaggccaccagcgtctgaggagctatgagccagagcaaggatttgcagggaggaaaagcttttggactgctgaaagcccagcaggaagagaggttggatgggatcaacaagcacttcctcgatgatcccaagtacagcagtgatgaggatctgcagtccaaactggaggccttcaagacgaagtacatggagtttgatctgaatggcaatggagatatcgatattatgtccttgaagcgaatgctggagaaacttggggttcccaagacccatctagagctgaagaaattaattagagaggtgtccagtggctccgaggagacgttcagttactctgactttctcagaatgatgctgggcaagagatctgccatcttgagaatgattctgatgtatgaggagaaaaacaaagaacaccagaagccaactggtcccccagccaagaaagctatttctgagttgccctaattggaggtggatataacacggtgggaccgaggaccttctaatgacagcagcatgggaaaagaagaagcagttgtgagccagagtcaaactaaataaataatgctccctagtgc

SEQ ID NO: 3306 - DNA, 757 bp, Rattus norvegicus
  Genbank Accession No. NM_017199
ggaaacggacacgtcagtgccgccagcgacgtcaccatgcccgacccagcccgccgacgcacgattgggtgctgaggccgcttacgcgtcgcgcttcctcgtctgctccgcatgttcagggcggcttgctctcttttcccctcggcagagaagaggcgatggcggcgatggcatctttcggcgccctggcgctactcctgctgtccggcctatcttgctgctcagcagaggcctgcctggaaccccagatcaccccttcttactatacaacttcagatgccgtcatttctacagagactgtattcatcgtggagatctcactgacctgcaaaaacagggtccagaatatggctctttatgccgacgttagtggaaaacaatttcctgtaacccgcggccaggatgtgggtcgatatcaggtgtcctggagcctggagcacaagagcgcccatgcaggcacctatgaggtcagattcttcgatgaagagtcctacagcctcctaaggaaggctcaaagaaataatgaagacgtttccatcatcccaccactgttcacagtcagtgtggaccatcggggtacctggaatgggccttgggtctccacggaggtgctggctgcagcaattggcatagtgatctactacctagctttcagtgcaaagagccacatccaggcctgagggcagcaacctcagccctccattgcttctttcaataaacagtcactatttgaaaaaaaaaaaaaaaaaaaaaaaaa

SEQ ID NO: 3307 - DNA, 2029 bp, Rattus norvegicus
  Genbank Accession No. NM_017201
ctcactctagcggacttcgccagcatggctgataaactgccctacaaagtcgcggacattggactggctgcctggggacggaaggccctggacatagctgagaacgagatgccaggtttgatgcgcatgcgggagatgtactcagcctccaagccactgaagggcgctcgcattgctggctgcctgcacatgactgtggagactgctgtcctcattgagactctcgtggccctgggtgctgaggtgcggtggtccagctgcaacatcttctccactcaggaccatgcagcggctgccattgccaaggctggcattccagtgtttgcctggaagggagagacggatgaagagtacctgtggtgcattgagcagacgttgcacttcaaggacggacccctcaacatgattctggatgatggcggtgaccttactaacctcatccacaccaaacacccacagcttctgtcaggcatccgaggtatctctgaggagaccacgactggcgtccacaacctctacaagatgatggccaatgggatactgaaggtgcctgccatcaacgtcaacgattctgtcaccaagagcaagtttgacaacctctatggctgccgggagtccctcatagatggcatcaaacgggcaacagatgtgatgattgcgggcaaggtggcagtggtagcaggctatggtgatgtgggcaagggttgtgcccaggccctgcggggtttcggggcccgagtcatcatcaccgagattgaccccatcaatgcactgcaagctgccatggagggctacgaggtaaccaccatggacgaggcctgtaaggagggcaacatctttgtgaccaccacgggctgtgttgatatcatccttggtcggcactttgaacagatgaaggatgatgccattgtctgtaacattggacacttcgacgtggagattgatgtgaagtggctcaatgagaacgctgtggagaaggtgaacatcaagccccaggtggaccgctacttgctaaagaatgggcaccgcatcatcttgctggctgagggccgtctggtcaacctgggttgtgccatgggccaccccagcttcgtgatgagcaactccttcacaaaccaggtgatggcacagattgagctgtggacccacccagacaaataccccgtgggggttcacttcctgcctaagaagctggatgaggcagtggctgaagcccacctgggcaagctgaacgtcaagctgaccaagctgactgagaagcaggctcagtacctgggcatgcccattaacggccccttcaagcctgatcactaccgctactgagagctgggactgcccttcaccttccagctgccatccttgttccaggccctacctctcgttcccaagagcaaatgtcaccaactttgcagttacttctccggtgttctgctccctcccccggccctcatccacactgtgactggtctttctgtctttggcttctgctgtacccctcatactgttccctatgtggcatagagaacagagaggtacctgggaggcatccacaggggatctgagctcttggaaggtctgaggctggatgttgctggtggtcacaagcccatgcaccttactatccaaactctcgcttggtctttagatccgtgtgcttggtttacagaccaatggtttctcggcccaggacccaagaaggagctctaccatgggggaaggaaccactggagtttgaaggctcctgagagcttggcctttttactgttgggctgtctcttaaacctcctaatactgagttggctacttttggtccctatttcacaagggttaggacagattaaccaagaaaggacaagtgacagagactgaaaggggctggaaaaacaaatagggaaaggcctgtcacctacggtataattgatggttcctatcacaagcctggatcacaaacagattaatttgttctatgtttatatactgtttagaatgttaacacaggaaggtggataaaatacagtttctagtgcct

SEQ ID NO: 3308 - DNA, 696 bp, Rattus norvegicus
  Genbank Accession No. NM_017202
gctcttccggtgcgggacccgctcttccggtcgcgagcacccggggtgtagagggcggtcgcggcggtcgcctgggcagcagtggcagaatgttggctaccagggcacttagcctaattggcaagagagccatttctacttcggtgtgccttcgggcacatgggagtgttgtgaagagtgaagactatgctctcccatcttatgttgatcggcgtgactaccccttgcctgatgtggcccacgtcaagctgctgtctgccagccagaaggccctgaaggagaaggagaaggccgactggagcagcctttccagggatgagaaagtccaattgtaccgcatccagtttaacgagagcttcgctgagatgaacaagggcaccaatgagtggaagacagtggtgggcctggccatgttcttcatcggcttcactgcgcttgtgctgatctgggagaagagctacgtgtatggccccatccctcatacctttgatcgtgactgggtggccatgcagaccaagcggatgctggacatgaaggtcaaccccattcagggcttctccgccaagtgggactacaacaagaatgaatggaagaagtgagagcctgctgctgtgggctcctccctccctccctccctcagcatgctggaagctgctgtgtccaatggtccatgttaataaatgaccagtttacgtg

SEQ ID NO: 3309 - DNA, 2622 bp, Rattus norvegicus
  Genbank Accession No. NM_017208
cacctctgcgtattcacggaatggggaaatgccaagagccttccagtacgatttggtgtccagttctaccctgtacaccccttccgtgaacttctcatctgtggtgagcccgtgcagctctccagactcggcggtcttcccagaggcaaacggctcccagcttccgtctgcagtctttttgaacactttcacggtcacagtcctcactcacccacggagcatccaggatgaagtctgcgactgggcctctgcttcctacattgctggggctactgctcctgtctataccaaggactcagggtgtcaaccccgccatggtggtcaggatcaccgacaagggcctggagtacgcggccaaggaggggctgttgagtctgcagagagagctgtacaagatcacactgcctgacttcagcggggacttcaagatcaaggctgtgggccgtggacagtacgagtttcatagcctggagatccagagctgtcagctgcgtggctcgtccctgaagccgctcccaggccgaggcctgagtctctccatctctgactcttcgatcagcgtccggggcaaatggaaagtgcgcagatccttcgtgaaacttcacggctcctttgacctggatgtcaaaagtgtcactatttcagtggacctcctcctgggcgtggatccctcagaacggcccacagtcaccgcctctggatgcagcaaccgcattcgtgatttggaattgcacgtatcaggaaatgtggggtggctgctgaatcttttccacaaccagatcgagtccaagctccagaaagtattggaaagtaagatttgtgagatgatccagaagtctgtgacctctgatctgcagccttatctccaaactctgccagtcacagcggatatcgacactatcctgggcattgactacagtttggtggcggctccccaagcaaaggcccagacgctggatgtgatgtttaagggtgaaatttttaatcggaatcaccgctccccagtcactacccccaccccgaccatgagcctacctgaggacagtaaacaaatggtctactttgccatctcagatcaggccttcaacatagccacccgggtttaccaccaggccgggtacctgaactttaccatcacagatgacatgttaccgcctgactccaacatccggctgaacaccaaggccttccgccccttcactcctctgataaccagaaagtaccccgacatgaacttggagcttcttggaacagtggtctctgccccacttctgaatgtcagtcctgggaatctgtccttggccccacagatggagattgaaggctttgtgatcctgcccagctccgcccgcgaatctgtcttccggcttggcgtggtcacgaatgtattcgtctcattaacttttgacaacagcaaggtcaccgggatgctgcatccagagaaggcgcaagtgagactgatcgaatccaaagtcggcatgttcaatgtgaacctgttccaggcattcctcaactactaccttctcaacagcctctaccctgatgtcaacgatgagctggccaagggcttccccctccctctaccaaggcgtattaagctccacgacctcgacttccagatccacaagaacttcctatacttgggtgccaatgtccagtacatgagagtctgaggacaagaagaaagatgggcctcagaggccacagcgggacctgccatttgtaattccagatgcgtagcacatctccagagagtctcaaaatacaaagaagtttctgttcctggctctggtggatcctgtccccacagtcctcttcgccaggtgcaccctcagcctggacttgactctgacctctccagggagaagccctcccctcaccaacctctccagggagagcccctccccccaccaacctctccagggagacccctctcccaccactgacctggaatcacttaaagagcaggcactgtggttttgagtgcaccttctcaccttcatgtctgacggagtgctggcacttagtaggtcctcaataaatatttatagaatgacatgacagcccagctgaacctctttattgctagaccatctggtctgagccagccttagatgctctgtcagagctgttatctccaaggctagaccaccttttcactcttgttggcctctgctatgagggcctcaacaagggagtgaatgactacacacacacacacacacacacgcgcacacacacacacacgcacgcacgcacgcacgcacacgcatgcacatgcatacactcacgcacgtgcacgcacacaccactcccttcaccagcacgtgtctaggcttctagccttattcccacagatacctcctccttgcctcctgcttgctgcagacaacagacccagaaggaaagcaaaattgtagccccccgaggctgtccccatggaggtctgtgcaagtgagaaagagatggagccaaggaaggttttggttggacccaaatcaaacgctcatcggactgttgttcacgagccacatgcctgcgaggagagaccatgatttctaactaccgaacaataagcctttgatcagacttaataaagagtcatttccgtgttatgtaaaa

SEQ ID NO: 3310 - DNA, 1176 bp, Rattus norvegicus
  Genbank Accession No. NM_017220
cggtcccggaagccggaacccgtagcttgtgggtctttggtctgaagaccatgaacgcggcggttggccttcggcgccgcgcgcgattgtcgcgcctcgtgtccttcagcgcgagccaccggctgcacagcccatctctgagtgctgaggagaacttgaaagtgtttgggaaatgcaacaatccgaatggccatgggcacaactataaagttgtggtgacaattcatggagagatcgatccggttacaggaatggttatgaatttgactgacctcaaagaatacatggaggaggccattatgaagccccttgatcacaagaacctggatctggatgtgccatactttgcagatgttgtaagcacgacagaaaatgtagctgtctatatctgggagaacctgcagagacttcttccagtgggagctctctataaagtaaaagtgtatgaaactgacaacaacattgtggtctacaaaggagaatagatcttaggtttaatattgtagaaaagctaatttcttttcttactagaaaaagctctttgtccttttaaagtacacagcagtcatcacctacccgtgtctccatgttgtgttctggtgtgcctgagcgttaaagggattgtgaggtctgtatgtaaatgcattaagaagcaaattcgaagtgcatcctgagtgtattcttggtgagaaagcaggggagaactgaggattgaagcccgggcctcacacatgtgaaacatatactctgctccgacatgcatcccagtccgccaaggccgtttagaggatctttacctagagatagagattgttttatcttcagctggagagacagctcagtggttaggagcactgactgcttctccagaggtcctgagttcaaatccaccagacggtggtggctcacaaccatctgtaatgggatccgatgctctcttctggtgtgtaggtgtacatacagacaaagcattcctacatttaagaaaatacataaataagtttcaaaaattatttcatctggggctggggatttagctcagtggtagagcgcttacctaggaagcgcaaggccctgggttcggtccccagctccgaaaaaaagaaccaaaaaaaaaaaaattatttcatctgagcaaaatgttttgatgtggaattatgtaaaggtaaaataaac

SEQ ID NO: 3311 - DNA, 4269 bp, Rattus norvegicus
  Genbank Accession No. NM_017222
ttaaaagtttggcgtgttgaaagtaagcattactcagctggcaatagagacagaaccaggggactggtgcttctgtggacttggccatttgcacagcacaagcagtgatggataactcctccgtctgttccccaaatgcaactttctgcgaaggtgattcctgcctagtaactgaaagcaacttcaatgccattctcagcacagtgatgagcaccgtgctcaccattcttctagccatggtgatgttttctatggggtgcaatgtggaaatcaacaagttcctaggacacataaagcggccatggggcatcttcgtgggcttcctctgtcagtttggaatcatgcctctcacaggatttatcctgtctgtggcctctggcatccttcctgtgcaggctgtggtggtgctaattatgggttgctgccctggaggaactggctccaatatcctggcctattggatagatggtgacatggacctcagtgttagcatgaccacttgctccacactgcttgctcttggaatgatgcccctttgcctcttcatctataccaagatgtgggttgactcaggaacgattgtgatcccctacgatagcattggcatttctctggttgcgcttgttattcctgtttccattggaatgtttgtaaatcacaaatggccccaaaaagcgaagattatacttaaaattggatccatcgcaggtgcaattctcattgtgctcatagctgtggttggaggaatactgtaccaaagtgcctggatcattgaacccaaactatggattataggaacaatatttcctatagctggctacagccttggtttcttcctggctagactagctggtcaaccctggtacaggtgccgaacagttgccttggaaactggaatgcagaacactcaactgtgttccaccattgtacaactctcctttagccctgaggatctcaaccttgtgttcaccttcccactcatctatactgttttccagctcgtctttgcagcaataatattaggaatgtatgtcacatacaagaaatgtcatggaaaaaatgatgctgagtttctagagaaaacagacaatgatatggaccccatgccatcattccaggagacaaacaagggatttcaaccagatgagaaatagacactaaggaggcaaaagaagaaagcttctggaacaacattcattaaacgaaaactaaaattatttcttttggtggaataatcagcagaaaaacaaatttaaaagttaaattcaaatttaaattattgggtttttttgtataaagggactagtgatccattcttttgtgtgacaaaggggtgtgtgtgtgtgtgtgtgtgtgtgtgtgtgtgtgtgcgcgcgcgcgcacgtgcgcgcgcacgtgcatgtgtgtttacaggagtcatttttctgtatccatggtcagattggtcacaagatattccttgattccaaattcacagaagcttaagcctcttttataaaaaggcaaagtgtttgtattaatctcctatatacttcaaatcaatattatcttactaaaatatttaacatgatgtaaatgttgtgtaaatagttgtccactgtattgtttagaaaatgattgttttatgtttagtacagatatcatttttcaatattttggccatagttaaaatcatagatgtcaaacatctttgggaggccaaagacatgtacatagaatgtatagatagatagatagatagatagatagatagatagatagatagatagatagatagatgatagacagacagaagataggcagacagagagatagctgattatcattaatatattatcagaaaacatctatagacctaacttgatataggtcaaacttgaaactttgtcatatgtaagctgaattcagagttaaatactttggtatgtaaaaatatagcatattactactgtaaaatgattttttcttgagtgcttatgattgtaagaagattgatgtgaatgaattttaattatgaattttaaatttttgcaacatatttacttgtgattttggactatactctggcaaatgtctatatttatattttagaaaagtagcttcaaatgacattctagaagtagaaatgagagaaagcattactaattaattcaataacaaattagaattggattaacttatctttttttttatccattcgcatacctctaggatccattgatactcattttatctttccagaaatagggctaattcaatacagtttaaatttgacaataatttttggaactctggagaggtttattcaaatatgacctgtatgaagcaggtccaaatgggccaatatgatagctattcagctcataggaggtgccataccagccaccacgagcaggaagatgtcagaagttacaaaggaaaaaaggtatcagtctagaaaatgacaatggagagacaaataatacaatgacaaataatacaatggagagacaaagaagcataaagaaaaagaaaaagataaaagaaatattgccaaaacttaatatggcaaaactgatgtgtgacaggaagtagatacaggaagattcatatctgaaagtgagatttgaagaagatgagaagtctccaggcagcaaagcaggaaagtcacccctcagatgtcacagatatacctataaatatgcctgtatatatccataatgatagaaaacaaataagatttggtaaaaatcagcaagattttatgactgccatagggaaggaatttgtcaagtgctgggtcttgagacccaacttggtttacttttcttcattttggagcagatacatgtttttaactagcctttagtggttggtcttatggaaacttttgatacccccatattcttgtggattcctttaacttataatgttctgccttcaaagagtatattacatttgattgatcttactttagatcacgaagaaggcttctggttgtagacttaaaatgttgcaatatatttaattggagatattgtcactgtctgtacagcatgtttgttccgacagcatgagggtctgagcttgactatcaacactcatataaaaatgctaagtatgataatgtgcagccgtaatcccagtgctagaaaggagaagccaggaggattagatccagtctagccaatcagtgggctctatgttcagtgagagaccatgttggaaatactaaaatgaacagctataaagggagttgcttacaattgaccacatacacatcacacacacacacacacacacacacacacacacacacacacggagcatcttctatcactagacaaaagaagtaagttgaactcagaatgtttgctttttgtgtgtgtaagtctaatttatttttttcttaaattgaactgattatggaatgtgaaggttaatttcttttttttttacttttttttattaacttgagtgtttcttatttacatttcgagtgttattccctttcctggtttcggggccaacatccccctaatccctccacctccccttctttatgggtgttcccctccccatcctccccccattgccgccctccccacaacaatcacgttcactgggggttcagtcttagcaggaccaagggcttccccttccactggtgatcttactagaatattcattgctacctatgaggtcagagtccacggtcagtccatgtatagtccttaggtagtggcttagtccctggaagctctggttgcttggcattgttgttcataaggggtctcgagctctatcaagctcttcagaactcagaatgttttaaagcactgggcattgactgggatacaagagactggattttcttctcagtaatgtcaagaaagtacctccaaggatacgaaaggaaatctagctgttaaaataccttgtgcactttcctcatcaagaagaaaacagacagatacactaaagacaccctgtgaatttctatcaagttttcaacatacccaatgtgcctggatgccagcagctgattcagctgggttttcttccctaatgattaaagaatgtgagtgacatagatctttgttttcttaccaggtagggtggcttgtgtttatttttcccctaatactctagaaggaagaaaaatagttaagctttctaaaatgacaaatctctatttttaaatgatttgggaaaagctgattaactcatgtatattattgcctctgtttcatattaaatgaatatttatattttaaaggaaagaataaa

SEQ ID NO: 3312 - DNA, 2287 bp, Rattus norvegicus
  Genbank Accession No. NM_017223
tctaaaggaaagatcacagctttcccagactgggagaaaaaatatggaatgtggtgtaccactgactgaccataaccaaatgaactgtagtgacagtagtctaaaagccagcggttaacaatttcttcagacttcaacactatccatcgctttccagagcagactcgctgtttacaagaactcttggcctcccgaagatagcaacctcaaattttgtttatttaaaatatttctgcaaaaggaaaagtaccccagagcccattttccaaaatggccatggatgggtatctgtggatggtcattttgggtttcattattgctttcatcctggcattttcagttggtgccaatgatgttgccaactcctttggaaccgcggtgggctctggcgtggtgaccctgagacaggcatgcattctggcttcgatatttgaaaccaccggctctgtgcttttgggagcgaaagtgggagagactatccggaagggcatcattgacgtgaacctctacaatgagactgtggaaacgctcatggctggggaagtgagtgcaatggtcggctcagcggtctggcagttgatcgcgtccttcctgagactcccaatctcagggacacactgcatcgtgggctctaccattggcttctcgctcgtggccatcggcccaaagggagtgcagtggatggaactcgtcaagatcgttgcctcctggttcatatccccacttctgtctggcttcatgtctggtgtgctgttcatcctgatcagaatgttcatcctaaccaaggaggaccctgttccaaacggtctccaggcacttcctctgttttatgctgccactatagcaataaacgtcttctccatcatgtacacaggagcaccagtgctgggcctgtcgctccccatctgggcaatagcgctcatctccttcggcgttgccctgctgttcgccttcttcgtgtggctgttcgtgtgtccgtggatgaagaggaaaatagcgggcaggttagagaaggagagtgctctgtcccgcgcgtctgacgaaagcctcaggaaggtacaggaagctgagtcccctgtctttaaggagcttcctggtgccaaagccagtgatgacagcgctgtccccctcaccagtctggctggggaggctgcgggggcctcagaaggcacgtcagcagggaaccacccccgggcttcctacggccgagcactttccatgactcacggctctgcaaagtcacccatctccaatggaacctttggcttcgaaggccacatgaggaatgacggtcacgtttatcatactgtacacaaagactcgggactctacaaagacttgctgcacaaaatccatgtagacaagggccccgaggagaaaccagctcaggaaaacaactacaggctgctccggaggaacaacagctacacgtgctacacggcagccatctgcggcatgccggtgcacgccaccttcagggcctcggacacctcctccgcccccgaggatagcgagaagctggtgggtgacaccgtgtcctattccaagaagaggctccgctacgacagctactccagctactgcaacgcggtggccgaggcggagatcgaggccgaagagggcggcgtggaaatgaggctggcctctgagctgaccgatcctgaccagcctcacgaggatcctgcggaagacgagaaggaggagaaggactccgcagaggtccacctgctcttccacttcctgcaagtcctcactgcctgctttgggtcctttgctcacggtggcaacgatgtgagcaatgctatcggtccccttgtggccctgtggctgatatataaacaaggcggagttacacaagaagctgctactccagtctggctgctgttttatgggggcgttggcatctgcacaggtctctgggtttggggcagaagagtgatccagaccatggggaaggatctcacacccatcacaccgtccagtggcttcactattgagctggcctctgccttcaccgtggtgatcgcctccaacattgggcttcccgtcagcaccacacactgcaaggtgggctcagtggtagccgtgggctggatccgctcccggaaggctgtggactggcgcctcttccggaacatatttattgcctggttcgtgaccgtgccggtggccggacttttcagtgctgctatcatggctctcctcatgtatatatgtggttttgtttcttccagtcggtaaatggccacagggatgctctgacacggatatggtcctcacctttaga

SEQ ID NO: 3313 - DNA, 1638 bp, Rattus norvegicus
  Genbank Accession No. NM_017231
gcgggaggtggcgaggccagggcagggtggcagaagcccgcgcggcgaccgcagcgagagcagcggggacagagcagaccacaacgaaggcgcacaggcagcggggccgggccgggccaccgggagagcggccaccgggaagcgggcgggaggccgggctggcagctggcagccgccgagccgcgaagcgacatggtgctgctcaaggaatatcgggtcatcctgcctgtgtctgtagatgagtatcaagtggggcagctgtactctgtggctgaagccagtaaaaatgaaactggtggtggggaaggtgtggaggtcctggtgaacgagccctacgagaaggatgatggcgagaaaggccagtacacacacaagatctaccacttacagagcaaagttcccacgtttgttcgaatgctggccccagaaggcgccctgaatatacatgagaaagcctggaatgcctacccttactgcagaaccgttattacaaatgagtacatgaaggaagactttctcattaaaattgaaacctggcacaagccagaccttggcacccaggagaatgtgcataaactggagcctgaggcatggaaacatgtggaagctatatatatagacatcgctgatcgaagccaagtacttagcaaggattacaaggcagaggaagacccagcaaaatttaaatctatcaaaacaggacgaggaccattgggcccgaattggaagcaagaacttgtcaatcagaaggactgcccatatatgtgtgcatacaaactggttactgtcaagttcaagtggtggggcttgcagaacaaagtggaaaactttatacataagcaagagaagcgtctgtttacaaactttcacaggcagctgttctgttggcttgataaatgggttgatctgactatggatgacattcggaggatggaagaagagacgaagagacagctggatgagatgagacaaaaggaccccgtgaaaggaatgacagcagatgactagcgctaccgccctttctgcactttttgcaagacagtggtccacaggaaggcccagcagctccaccctcctgagtggcaggccatctttggacgcagcctttctgtgctcattcttcaggcaactttcagtcccttactatagctatttctagatgccctttaacattgtgaacaaatagaccgtctggtattataaagcctgtgtgtgcgggagcctgatcctctaagatatatggtgtatgctgctgtatttacagctcatcctctctccattgtgccctgacccatttctgtatgccctccccctttatttccaagtgacgttctcattctttcaaatgtgctgcctttgtgatgtgattatttaagctcacttatttcagccttgggataagctgagctattttgcttcctgggcagatctttggcaatgttgaatattcacttggggagagaggaggagttaaaaatacagagacacctaccctagctcctcacaataggaatgtggcttcagaaccctgacctctgctcctagtaacctcttgttcgcgtgctctaagcaccaagaaggcacccaaggcccagccagtctaagaaaatttagcaaataataaataacccctactcg

SEQ ID NO: 3314 - DNA, 1361 bp, Rattus norvegicus
  Genbank Accession No. NM_017233
tccagtactctggtagaggtctgaccaccatcaaccatgacaacctacagcaacaaaggaccaaagcctgagagaggccggttcctccatttccactctgtgaccttctgggttggcaacgccaagcaggctgcctccttctattgcaacaagatgggcttcgaaccgctggcctacaagggcctggagacgggctcccgggaggtggtcagtcatgtcatcaagcaagggaaaattgtgtttgttctctgctctgctctcaatccctggaacaaagagatgggtgaccacctggtgaagcatggtgatggcgtaaaggacatcgcattcgaggtggaagactgtgaacacattgtgcagaaagcccgagaacggggcgctaaaattgtacgggagccatgggtggaggaagacaaattcgggaaggtgaagttcgctgtgctgcagacgtatggagataccacgcacaccctggtggagaagatcaactacaccggtcgtttcttacctggattcgaggccccaacatacaaggacaccctacttccaaaactacccagctgtaacctggagatcatcgaccatattgtaggcaaccagcccgaccaggaaatggagtctgcctcagaatggtacctgaaaaacctgcagttccaccggttctggtctgtagacgacacacaggtgcacacggagtatagctctctgcgctccatcgtggtggccaactatgaggagtccatcaaaatgcccattaatgaaccggccccgggcaggaagaagtctcagatccaggaatatgtggactataatgggggtgctggggtccagcacatcgctctcaggaccgaagacatcatcacaacgatccgccacttgagggaacgaggcatggagttcttggctgtcccgtcttcttactacagactgcttcgggagaatctcaagacctccaagatccaagtgaaggagaacatggatgtcttggaggagctaaaaatcctggtagactacgatgagaaaggctacctcctacagatcttcaccaagcccatgcaggaccggcccacgctcttcttggaagtcatccaacgccacaaccaccagggctttggagcaggtaacttcaactctctgttcaaagctttcgaagaggagcaagccctacggggtaacctcactgacctggagaccaacggtgtgaggtctggaatgtaagctccacccacacccagaccgcgcaaggcgctggacaagtcaatcagctccaactggctgaaaggctggacctcagggctccacccacaccatggccacgccccctctacggcaaggcttctcctgatccgtttcgagtaaac

SEQ ID NO: 3315 - DNA, 1075 bp, Rattus norvegicus
  Genbank Accession No. NM_017236
gtttaactgcactcgggactcggcgcgcgcgtgtgtctgttctctccatcgtcatggccgccgacatcagccagtgggccgggccgctgtcattacaggaggtggatgagccgccccagcacgccctgagggtcgactacggcggagtaacggtggacgagctgggcaaagtgctgacgcccacccaggtcatgaatagaccaagcagcatttcatgggatggccttgatcctgggaagctctacaccctggtcctcacagaccccgatgctcccagcaggaaggaccccaaattcagggagtggcaccacttcctggtggtcaacatgaagggcaacgacattagcagtggcactgtcctctccgaatacgtgggctccggacctcccaaagacacaggtctgcaccgctacgtctggctggtgtatgagcaggagcagcctctgaactgtgacgagcccatcctcagcaacaagtctggagacaaccgcggcaagttcaaggtggagtccttccgcaagaagtaccacctgggagccccggtggccggcacgtgcttccaggcagagtgggatgactctgtgcccaagctgcatgatcagctggctgggaagtaggggcgctgcagagcccgcagccccggggaccccacagtacagtcaagtcgtataaagcatgtctgtggggtgtccccccacgcccatccttccttcccaccctctcatagggagttctcagttgtgctaggttacagctctaggatgtcttccactttgtccaggaccaggcccagtaacatcttttggggtgggcttatcaatcctcccatctcggctgagccctgaccgcccaggtcagatggctgcatagttatcaatattcctgggctgctgctacgcagtgctgctgtgtggaggccaggctgtggagagagaccctgttagccccttacatcccagtgggataagcaaaagtcaccggagttgctgggcgtgttaaacctcatcaaatacaaataaagggcattgcattcagaaaaaaaaaaaaaaaaaaaaaaaaaaaaaaaaaaaaaaaa

SEQ ID NO: 3316 - DNA, 2626 bp, Rattus norvegicus
  Genbank Accession No. NM_017245
cgcttccctgttcacctctgtatttgagaatccgacgccatctgccaccatggtgaacttcacagtagatcagatccgtgccatcatggacaagaaagccaacatccggaacatgtcagtcatcgctcacgtggaccacggcaagtccacgttgaccgactcccttgtgtgcaaggctggcatcatcgcctctgcccgagccggtgagacacgcttcactgacactcgaaaggatgagcaggagcgctgcatcaccatcaagtccactgccatctccctcttctatgagctctccgagaacgacctgaacttcatcaagcagagcaaggatggctctggcttcctcatcaacctcattgactctccaggtcatgtggacttctcctcagaggtgaccgctgctctgcgtgtcactgatggagcactggtggtggtggactgtgtgtctggtgtctgtgtgcagacagagacagtgctgcggcaggccatcgctgagcgcatcaagcccgtgctgatgatgaacaagatggaccgggccctgctggaactgcaactggagcctgaggagctctaccagaccttccagcgcatcgtggagaacgtcaatgtcatcatctccacctatggcgagggcgagagtggacccatgggcaatatcatgatcgatcctgtcctgggcactgtaggctttggctctggcctgcatgggtgggccttcacactgaagcagtttgcagagatgtatgtggccaagtttgcagccaagggtgagggccagctgggtgcagctgagcgggccaagaaggtagaagacatgatgaagaagctgtggggagaccggtattttgacccggccaacggcaagttcagcaagtcagccaatagcccagacgggaagaaacttccccgcaccttctgccagctcatcttggaccccatcttcaaggtgtttgatgccatcatgaacttcagaaaggaggagacagccaagctgatcgagaagctggacatcaagctggacagtgaggacaaggacaaggagggcaaaccactgctgaaggctgtgatgcgtcgctggctccctgctggtgacgccctgctacagatgatcaccatccacttgccgtccccggtcactgcacagaagtaccgttgtgagctgctgtacgagggcccacctgatgacgaggccgccatgggtattaagagctgcgaccccaaaggccccctaatgatgtacatctccaagatggtgccaacatctgacaaaggccgcttctatgccttcggtagagtgttctctggggtggtgtccacaggtctgaaggtccggatcatgggccccaactatacacctgggaagaaggaggacctgtacctgaagcctatccagaggaccattctgatgatgggccgctatgtggaacccattgaggatgtgccctgtggcaacattgtggggttggtcggggtggaccagttccttgtgaagaccggcaccatcactacctttgagcacgctcacaacatgcgggtgatgaagttcagcgtcagccctgtagtcagggtggcagtggaggccaagaacccagctgacctgcccaagctggtggaggggctgaagcggctggctaagtctgaccctatggtgcagtgcatcatcgaggagtctggggagcacatcattgctggtgctggagagctgcacctggagatctgccttaaggacctggaggaggaccatgcctgcatccccatcaagaaatctgaccctgtcgtgtcctaccgggagacagtcagtgaggagtccaacgtgctctgtctttccaagtccccaaacaagcacaacaggctgtacatgaaggccaggcccttccctgatggcctagcagaggacatcgataagggtgaggtatctgcccgccaggagctcaaggcgcgtgcccgttacctggccgaaaagtatgagtgggatgttgctgaagcccgcaagatctggtgctttggacctgatggcactggtcccaacattctcaccgacatcaccaagggtgtgcagtacctgaatgagatcaaggacagtgtggtggctggattccagtgggccactaaggagggtgctctttgtgaggagaacatgcgtggtgtgcgatttgatgtccatgatgtgaccctgcatgctgatgccatccaccgaggaggtggtcagatcatccccacagcgcgccgctgcctctatgccagtgtgctgactgcacagccccgcctcatggagcctatctacctggtggagattcagtgtcctgagcaagtggtgggcggaatctatggtgtcctcaacaggaagcgtggccatgtctttgaggagtcccaggtagctgggacccccatgttcgtggtcaaggcctacctgcctgtcaatgaatcctttggcttcactgccgaccttcgatccaacactggtggccaggccttcccccagtgtgtgtttgaccactggcagatcctgcctggggacccctttgacaacagcagccgccccagccaagttgtagctgagacccgcaagcgcaaaggcctgaaggagggcatcccagcgctggacaacttcctggacaaactgtag

SEQ ID NO: 3317 - DNA, 1696 bp, Rattus norvegicus
  Genbank Accession No. NM_017248
cgctgaacgctctcatcatcctaccgtcatgtctaagtcagagtcccccaaggaaccggaacagctgcggaagctcttcattggagggctgagcttcgaaacaaccgacgagagtctgaggagccattttgagcaatggggaacactcaccgactgtgtggtaatgagagatccaaacaccaaaagatccagaggctttgggtttgtcacatatgccactgtggaggaagtggatgctgccatgaatgcaagaccacacaaagtggatggaagagttgtggaacctaagagagctgtgtcaagagaagattctcagagaccaggtgcccacttaactgtgaagaagatctttgttggcggtattaaagaagacactgaagaacatcacctacgagattattttgagcagtatgggaaaattgaagtgattgaaattatgactgacagaggcagtggaaaaaagaggggatttgcgtttgtcacctttgatgaccatgactctgtggataagattgttattcagaaataccatactgtgaatggccacaactgtgaagtaagaaaggctctgtgcaaacaagagatggctagtgcttcatccagccagagaggtcgaagtggttccggaaactttggtggtggtcgtggaggtggtttcggtggcaatgacaattttggtcgaggagggaacttcagtggtcgtggtggctttggtggcagccgtggtggtggtggatatggtggcagtggggatggctataatggatttggcaatgatggaagcaattttggaggtggtggaagctacaatgattttggcaattacaacaaccagtcatcaaattttggaccgatgaaaggaggaaactttggaggcaggagctctggcccttatggtggtggaggccagtactttgctaaaccacgaaaccaaggtggctatggaggttccagcagcagcagtagctatggcagtggcaggaggttctaattacagccaggaaacaaagcttagcaggagagccagagaagtgacagggaagctacaggttacaacagatttgtgaactcagccaagcacagtggtggcagggcctagctgctacaaagaagacatgttttagacaatactcatgtgtgtgggcaaaaactccaggactgtatctgtgactaattgtataacaggttattttagtttctgttctgtggaaagtgtaaagcattccaacgaagggttttactgtagacctttttcacccatgctgttgattgctaaatgtaaaagtctgatcatgacgctgaataaatgtgtcttttttttttttttttaatgtgctgtgtaaagttagtctactctgaagccatcttggtaaacttccccaacagtgtgaagttagaattccttcagggtggtgccaaattccatttggaatttatttatggttgcttgggtggagaagccattgtcttcaaaaaccttggtgttgctaaactgccagttactgttgtaacttaatgagtttcaccatttaaagggtcatccaagcaagatcacaatttggttataaaatggttgttggacacctatgaagagaaaattgaataacggtctcagataaaataagagatgggaatgaagcttgtgtatcatccattatcatgtgtactcaataaacgatttaattctcttgaatgg

SEQ ID NO: 3318 - DNA, 806 bp, Rattus norvegicus
  Genbank Accession No. NM_017257
tgcgaaagctggggctgctatcccagattcgagagctggcaagtggggaagcatggccaagccttgtggggttcgcttgagtggagaagcccgtaaacaggtggatgccttcagacaaaatcttttccaggaggctgaggacttcctttgcactttcttgccacggaaaatcatatccctgagtcagctcttgcaagaggattccctcaatgtggctgacctctcctccctccgggctcctctggacatccctatcccagatcccccacccaaggatgatgagatggaaaccgagcaggagaagaaagaagtccctaagtgtggcttcctccctgggaatgagaagcttctggccctgcttgccttggttaagccagaagtctggactctcaaagagaagtgcattctggtaatcacatggatccagcacctgatccccaagattgaggacggaaatgattttggggtggcaattcaggagaaggtgctggagagagtgaatgctgtcaagaccaaagtggaagccttccagacagccatctccaagtatttctcagagcgtggggatgctgtagccaaggcctccaaggacacccatgtaatggattaccgggccttggtgcacgagcgagatgaagcagcctatggggcgcttagggccatggtgctggacctgagagccttctatgctgagcttcatcacatcatcagcagcaacctagagaaaattgtcaacccaaagggtgaagaaaagccatctatgtactgagcaaaggattagaaggaaaataaatgatttatacttt

SEQ ID NO: 3319 - DNA, 2519 bp, Rattus norvegicus
  Genbank Accession No. NM_017259
agagcccgtgaggcggccggaccatcatcgtcctgctaatacagctacttcctcaaccaccggtatgagccacgggaagagaaccgacatgctcccggagatcgccgccgccgtaggtttcctcaccagtctcctgaggactcggggctgcgtgagcgagcagagactcaaggttttcagtagggcgctccaggacgcactgaccgatcattacaaacaccactggtttccagaaaagccatccaagggctccggctatcgctgtatccgcatcaaccacaagatggaccccatcatcagcaaggtggccagccagatcggactcagccagccccagctgcaccagctcctgcccagcgagctgaccctgtgggtcgatccctacgaagtgtcctaccgcatcggggaagatggatccatctgcgtgctgtatgaggaggcgccggtggccacctcctacgggctcctcacctgcaagaaccagatgatgctgggcaggagcagtccatcgaagaactacgtgatgactgtctccagctagagaggagccgccccgccctggcactctactgttctcatgctgccctgacaacaggccaccgtatacctcaacctggggaactgtatttttaaagtgaagagctatttatacatgttatttttttttttaagaaaagaggaggaaaaaaaccaaaagtttttttttaaaaaaacaaaaaagaaaaaacaattcgttaacgggagctgcttggaagtggtctccccaggtgcctttggagagaactgttcttgattgagtctatgagccagtgtttgcctaggggagtgggttggggattggcctagccaaggtaaaaggggattcttggctgatcccccaggaggtggtggaagggagcaaggttagcaactgtgaacgagaggggtcagggtctgctctgggttaccgttcccgctgggatgcctgtattcctggtccctctcttactcaggggcattcaagcctggtctcaaataatactacattgcctaatcttctcttttgtttttctgctgagatcctgggcacacggaaaggcctctcctgtcccttccgtctgagcagagtttcttgaaactgtgtctcgtttctgatcctaccctcggggtcctgaagaggtggtttcccggcctagaatctatctaaacgtttttggagggtgggctataaggcagatataatggaggggaaccgcacaaaccctttgctttgctctgtgctgctttgtatggatggatggttaataacttagggatgatttgcaatggaattttgggacccaaagagtatccaatgggggtgggtgttttggacctaagccctccttttgggaaccacgtgacagtctgaatgctgctaccattattcctttgagaggtggctcaaagctccagggaactccaggtcctttcttactgccttctcttcaagagcaacctcccccatttcttttccctctttcctgcggttgggtcctggagggccccatttcctaggacaagagttctcaatcactgtgcaatagtcccaggaagctctggaactgggcctcccagcccctcctgattcctggtgggttttaggaccccgccttccccgttcttctgactggctggtgggccttgaggagatctccctcggccgcagggagggcacctgtgcactgcaggactacctggtactcctgtggggctgccacggagagccaaaccttaggcatagctttgtctcctcggtgctcagagcacctgcagggggaggttgcccccctcagtaaaaatccaaatttatttgtagatgtgtgcaatatttactgttctgggttggagaaaatcgggaaacactgggaagaagtggccttccttcaggttcagtgacactgatgagggcttctcagaaggcctcgagtctctcaaaccaaaggacagagctagagccagccagtcacccttagtgaggatccccttccccatgtctctccactgccgtggcatcccatgtcctggatttctcaattcctcagtttctactcaaaggtgctacttaccaaacactctgcccgtcccgctctccccagcttcgcacagccgtcccaggtggcttcgtctctcctgctttaaagttaactttgggcccacagacccgagagctgtgggttgaagcaaagctgtgaatcgctccagatggtccctgtgttctgtccacacacaggtccccgcctttttagaagcagcctcctggtctcatgcttaaatctgttcctcactgcccgtgttcactttagaaatggcagaaccacagagctggactgttgagcaggcctgtctctctcattaaatagaaataagtaagtttgtaagctattccgacagaagagacaaaggttactgattgtacaatagcgcttttatatggaagactgtacagctttatggacaaatgtaaaacttttttgtttttaataaaaatgtagcagacc

SEQ ID NO: 3320 - DNA, 921 bp, Rattus norvegicus
  Genbank Accession No. NM_017264
ctcgcgtgcggcgttcagccccggctctggccatggctacactgagggtccatcctgaagcccaagccaaggtcgatgtgtttcgtgaggacctgtgtagtaagacagagaacctgcttgggagctattttcccaagaagatctcagagttggatgccttcttaaaggagccagctctcaacgaagccaacctgagcaatctgaaggctccattggacatcccagtccctgatcccgtcaaggagaaagagaaggaggagcggaagaagcaacaggagaaggaagagaaggacgaaaagaagaaaggggacgaagacgacaaaggtcctccctgtggtccagtgaactgcaatgagaagattgtggtcctcctgcaacgcctaaagcccgagatcaaggatgtcattgagcaactcaacctggttactacctggttgcagctacagatacctcggatagaggatgggaataattttggcgtggctgtccaggcaaaggtgtttgagctgatgaccagccttcataccaagctggaaggcttccaaacgcagatctctaagtacttctccgagaggggtgatgccgtggccaaagcagccaagcagcctcatgtgggtgattatcggcagctggtgcatgagctggacgaggcggaataccaggagatccggctgatggtcatggagatccgtaacgcttatgctgtgttatatgacatcatcctgaagaactttgagaagctcaagaagccccgtggagagacaaaggggatgatctattgagccccctctctcgttctatgatgggtataacagaaaccttcctactcttgactaggaactctagactgcacccagtcttcttcctgctggggtctcctccctcactctgccttccaaacacaataaatacatagttgcc

SEQ ID NO: 3321 - DNA, 3275 bp, Rattus norvegicus
  Genbank Accession No. NM_017268
cccagggtccgatcgcgtttggtgcctgaaggaggaaccggtgacagacctggagactacagttctctgtccttcacacagctctttcaccatgcctgggtcacttcctttgaatgcagaggcttgctggccaaaagatgtgggaatcgttgcccttgaaatctactttccttctcagtatgttgatcaagctgagttggaaaaatacgatggtgtagatgctggaaagtataccattggcctgggccaggccaggatgggcttctgcacggatcgcgaagacatcaactctctctgcctgactgtggttcagaaactgatggagagaaatagcctttcctatgactgcattgggcggctggaagtcgggacagagacaatcatcgacaaatcaaaatccgtgaagtctaatttgatgcagctgtttgaggagtctgggaatacagatatagaaggaatagatacaactaatgcatgctatgggggcacagccgcagtcttcaatgctgtgaactggatcgaatccagctcttgggatggacgatacgctttggtagttgcaggagacatcgctatatatgcctcaggaaacgccaggcctacaggtggagttggagctgtggctctgctaattgggccaaatgctcctgtaatttttgaccgagggcttcgtgggacacacatgcagcatgcctacgacttttacaagcctgacatgctctctgaataccctgtggtagatggaaaactctccatacagtgctacctcagcgcattggaccgctgctattctgtctaccgcaaaaagatccgggcccagtggcagaaagagggaaaggataaagattttaccctgaatgattttggcttcatgatctttcactcgccatactgtaaactggtgcagaaatctctagctaggatgttcctgaatgactttcttaacgatcaaaacagagacaaaaacagtatttacagtgggctggaagcctttggggatgtgaaattagaagatacttacttcgacagagatgtggaaaaggcatttatgaaggctagtgctgagctattcaaccagaaaacaaaggcatctttgcttgtatcgaatcaaaatggaaacatgtacacatcctctgtatacggttcccttgcttctgttctggcacagtactcacctcaacagttggccgggaagaggattggagtgttctcttacggttctggcttggctgccacactctactcccttaaagtcacacaagatgccacaccaggatctgctcttgacaaaataacagcaagtttatgtgaccttaagtcaaggcttgactcaagaacgtgtgtggcaccagacgtctttgctgaaaacatgaagctcagagaggacacacatcacttagccaactatattccccagtgttcaatagattcactcttcgaaggaacatggtatctagtcagagtggatgaaaagcacagaagaacttacgcccggcgtccctccacaaatgaccacagtttggatgaaggagtgggacttgtgcattcaaacacagctacagagcatattccaagcccggctaagaaagtgccaagacttcctgcgacctcgggcgaacctgagtcggctgtcatcagtaacggggagcactgagagccgtggccttcacagaggctcggggctggatggggtatgggaaacgttagaggaatggatgtcttgggacaattttacagattacgtgttgcttaaaaatgtaatgtaactgacacagagcccagaaaactgttgtgtttttggagaagtctcgctgagctcctaacacacttcctgctgtgggctggccaatggtgaatgtactgcgatggtgttaagggctctgcagaacgtcatacctcgctgcatgtttacacgcatgcgggttaggcttcaaactcggtctgaactgagtgcttctgactgcaaaggcagaggtactgctgtccagtttaaaaaattgttttttttttttttaatgtgtaagaatttttatacttaaataaaaaaaagtacctgtagcttttgggggaaaaaaaaaaacctttttctaggttggggattgtggaatttaaatgttacacataaactctgcttaatggcaaggcaaacatttatctttttcgaagatttataaatcctgaagagaaaaaaagagggtatggttctaggatctggatgaaccatcagtgagaaaggttagtcataatcaagtgagcagaaggatgctggcgttgagcaggcctctgtcacagcaaccagggctctgtgggcacagctgagggaactttctggccaggtgcccgtgactgctgctcagctgcactgagatgcagtggagctgctgcacggaagcttgctgtggtgctgaacgccttacctgcggataaagtgtaaagtaggagggatgggcagggcactattaggttacagtgttacagacccaggttatagacttgacagctcaaactcaccagacacctttttccctttgtggtttgtgtattttttgtgttttgtttgtttttttttatattgttcaatttaaaaaatttagaaaattttaaccttacgttttcacatagtgtgattagccaaaaggaatttcacttcaagatctagaaatagaattcataacattttttcctaaactttgacttttaaaacaacgaaaattaccacatgagatgaacaagaaaattcattagaaagttctctgggtgatttttggtgctgaactgacatgagcctcatagactgtaaaacagaggtagttgaaactaatgtacagaactacattttttaattttatttgcatttaattctgtgaagtttcagttatctaaaataaacacataaacgtgtaatgtttcagattgcaaggtgagatgtaatgtagcatttgtaagatattcttgtcaatattaactggtaggattttgatttgtacagttttaattggttaaaatgatctcattttaacatccactgctatagatgaatgatgtaagctcagatttaatgaatggtggggaaatggtgcatgtaattttttcgcaagtatcgagagttctgtatgttttgaaaagaataatttaacgtttgggttgccaggaagggggctttcccagagtccattgccaggcgttgggcaagcctcgcaatgttggcacggagcgttaaccacaccttactaatagcaaggggaataactttgaaataaagttttagacaaata

SEQ ID NO: 3322 - DNA, 2024 bp, Rattus norvegicus
  Genbank Accession No. NM_017272
caatttgctgagcctgtcacctttgttccaggagccaaaccagcaatgtcttcccctgcacagcctgcagttcctgccccactggccaacttgaagattcaacacaccaagatctttataaacaatgaatggcacaactcattgaatggcaagaaatttcctgtcattaaccctgcaactgaagaggtcatctgccatgtggaagaaggggacaaggcagatgttgacaaagctgtgaaggctgcaagacaggctttccagattggctccccctggcgcaccatggatgcttcagagagaggatgcctgctgaacaagctggctgacttaatggagagagatcgcgtgctgctggctacaatggaatcaatgaatgctggaaaaatctttactcatgcataccttttggatacagaggtcagcataaaagccttaaagtactttgcaggctgggcagacaagattcatggccaaacaattccaagtgatggagatgttttcacttatacaagacgtgaacctattggggtgtgtggccaaatcattccttggaatggtccgttgattttattcatttggaagataggcgctgcccttagctgtgggaacactgtgattgtgaagccagcagagcaaactcctctcacagctctttacatggcatctttaataaaagaggcagggtttcctcctggtgtggtgaacgttgtccctggttatggatcaactgcaggggcagccatctcttctcacatggacatagacaaggtgtctttcacaggatcaacagaggttggcaaattaatcaaagaagctgcagggaaaagcaatctgaagagggtcaccctggagcttgggggaaagagcccttgcattgtgtttgcagatgctgacttggatagtgctgttgagtttgcacaccaaggagtattcttccaccagggtcagatttgtgtcgcagcatccagactttttgttgaggagtccatttacgatgaatttgttaggaggagtgtggagcgggctaagaaatacgttctaggaaatcctctggactcaggaataagtcaaggtcctcagattgacaaggagcaacatgctaaaatccttgatctcattgagagtgggaagaaagaaggcgccaaactggagtgtggtggaggacgctgggggaacaaaggcttctttgtccagcctacagtcttctccaatgtgaccgatgagatgcgcattgccaaagaggagatatttggaccagtgcaacaaatcatgaagtttaagtccatagatgaggtgatcaagagagccaacaatactccctatggtctagcagcaggagtcttcacaaaagacctggacagggccatcactgtgtcttctgctctgcaggccgggacagtgtgggtgaattgttatttgactctctctgtccagtgcccatttggtgggttcaagatgtctggaaatgggcgagaaatgggtgaacagggtgtttatgaatacactgagctcaagacagtcgcaatgaaaatatctcagaagaactcctaaagaagccagcagagtgacgagaaactctcagcagtagctacatgtctcctacaatcaccagcagagggttgttttattacagggtcttctgttgatttcttaaacataaggaatccatcagcattactgtaactcatagaaaatgtatagtttaattcttctaatacatgaccctaatacatacccaagaagaaagggatacatttaggtacatgctctttgtaacccagtcatgaaaaagtgcttttcattgtagctacttgtctacagccctcatttgatgtgatttaaactctgtttctcggtgacttcttgccactactcaccatgcacaactgaaaagtcagccactgttcttggagttattgttctgagtattgtgaaatatttttagaatgacatacctgcttgtcaaatgaaatgcttagctgtaattagagtgcaaagtttaataaaggcaaaatctcacatga

SEQ ID NO: 3323 - DNA, 1174 bp, Rattus norvegicus
  Genbank Accession No. NM_017278
ccgcagccttctttgacgatcaccgaaccgtagttgaggccgtgttcctgtgtccgctgctgtgtctggttgtaacctcgccggagctatgtttcgcaaccagtatgacaacgatgtcactgtttggagccctcagggcaggattcatcaaatcgaatatgcaatggaagctgtaaagcaaggctcagcgacagtcggcctgaagtcgaagacacatgcagtgctggtcgcgctgaagagagcacagtcagagcttgccgctcaccagaagaaaattctccacgttgacaaccatattggtatctcaattgcgggtctaactgctgatgccagactgttatgtaactttatgcgccaggagtgtttggattccagatttgtatttgacagaccacttcccgtatctcgccttgtgtctctaattggaagcaagacccagataccaacacagcgatatggccggagaccgtatggtgttgggctgctcattgctggttatgatgacatgggccctcacgttttccaaacctgcccatctgctaactattttgactgcagagctatgtccatcggagcccgttcccagtcagctcgcacttacctggagagacacatgtctgaatttatgcagtgcaatttggatgaactggttaagcatggtcttcgcgccttaagagaaacactccctgcagaacaggacctgaccacaaagaatgtttccattgggattgttggtaaagacttggaatttactatctatgatgatgatgatgtgtctccattcctggatggtcttgaagaaagaccacagagaaaagcacagccttcacaggctgctgatgaacctgcagaaaaagctgatgaaccaatggaacattaagtgataaaggttatgaggacatgaggatgcaggggcatacactggtgacaataatctgtattttaaaccaacagctgtaatgtattgggtggtatgttttagaaatcagtccaactgtgagttttctctaagcagcttcacagaaaccatataatggggtgcattttctttgaaagggtctacataatcattttctaggacgtataggtatctatatcaatgtttttatatgaagaaaataagtgtctttgcagttttaaagacaactgtgaaataaaattgtttcaccacctg

SEQ ID NO: 3324 - DNA, 852 bp, Rattus norvegicus
  Genbank Accession No. NM_017279
gtaaagatggcagaacgcggttacagcttctcgctgactacattcagcccatctggtaaacttgtgcagattgaatatgctttggccgctgtagctggaggggccccttcagtgggaattaaagctgcaaatggcgtggtattagccactgagaaaaagcagaaatccatcctgtatgatgagaggagtgtacacaaagtggagcccataaccaagcacatcggtttggtgtacagcggcatgggtccagattacagagtccttgtacacagagctcggaaacttgctcagcagtactaccttgtttaccaagaacccattcccacagcccaactggtacagcgagtagcgtctgtgatgcaagagtatacccagtcaggtggtgttcgtccatttggtgtttctttacttatttgtgggtggaatgagggacgaccatatttatttcagtcagatccatctggagcttactttgcctggaaggccacagcaatgggaaagaactacgtgaacgggaaaactttccttgagaaaagatataatgaagacttagaactggaagatgcgattcacacagccatcttaacccttaaggaaagctttgaagggcagatgacagaagataacatagaagttgggatctgcaatgaagctggctttaggaggctcaccccaactgaagtgagggattacttggctgctatagcgtaatgaagatgtgccggaacaacaaggaacactcattctacttattcatttttaaagtatgttttgtttgtgcagacttatttctacatgctttaatggatttcacatttttaaataataatcataataaactgttaaaaccag

SEQ ID NO: 3325 - DNA, 897 bp, Rattus norvegicus
  Genbank Accession No. NM_017280
cgttctgtggcctgccgggtcagcaccatgagctccattggcactgggtatgacctgtcagcctctacattctctcctgatggaagagttttccaagttgaatatgctatgaaggctgtggaaaacagtagtacagctattgggatcagatgtaaagatggtgttgtgtttggggtagaaaaattagtcctttctaaactttatgaagaaggctccaataaacgtcttttcaatgttgatcgacatgttggaatggcagtggcaggtttgttggcagatgctcgttccttggcagacatagcaagagaagaagcgtccaactttaggtctaactttggctataacattcctctaaaacatcttgcagacagagtggccatgtatgtacacgcgtatacactctacagtgctgttagaccttttggctgcagtttcatgttggggtcttacagtgtgaatgatggtgcacagctctatatgatcgatccatcaggtgtttcatatggttactggggctgtgccattggcaaagccaggcaagctgcaaagacagaaatagaaaagcttcagatgaaggaaatgacctgccgtgatgtagttaaagaagttgcaaaaataatttacatagtacatgatgaagttaaggataaagcttttgaactagagctcagctgggttggtgaattaactaaaggaagacatgaaattgttcccaaagacgtaagagaggaagcagagaaatatgccaaggaatctttgaaggaagaagatgaatcagatgacgacaatatgtaacatttcaccatcctctggtgtccatttctgtgacagttgcatatggctagcaccatggattatatatacccactgaccaattttcattaaattttgtcttat

SEQ ID NO: 3326 - DNA, 1121 bp, Rattus norvegicus
  Genbank Accession No. NM_017281
cttggccatccgggttggttcttctccagctgagtaaagcggcgctgatctgcaccctcactgtcttcctccggatccacataaaattcagaagccatgtctcgaagatatgactccaggaccacaatattttctccagaaggtcgcttataccaagtggaatatgccatggaagccattggacacgcaggcacttgtttgggaattttagccaatgatggcgttctgcttgcagcagagaggcgcaacatccacaagcttcttgatgaagtctttttttctgagaaaatttataaacttaacgaggacatggcttgcagtgtggcaggcataacatctgatgccaacgttctgactaatgaactcaggctcattgctcaaaggtacttattacagtatcaggagccaattccctgtgagcagttggttacagcactgtgtgatatcaaacaggcgtacacacagtttggaggcaaacgtccctttggtgtttctttgctgtatattggctgggataagcactatggctttcagctctatcagagtgacccaagtggaaactacgggggatggaaagccacatgcattggaaacaacagtgctgcagcggtatcaatgctgaaacaagactacaaagaaggagaaatgactctgaagtcagcgctggctctggctgtcaaggtgctaaacaagacaatggatgttagtaaactgtcagctgaaaaagtggaaatcgccacactaacaagagagaatggaaagaccgtgatcagagtcctcaagcaaaaggaagtggaacagttgatcaaaaaacatgaagaggaagaagcgaaagctgaacgggagaagaaagaaaaagaacagagagaaaaggataaatagacagaatcatggattttataactccttagaggcgccagttcacttaggagctgtcctggccttcccctggaagtgttttcttgtattttcttccttaccttggccatcggggaaatgggacattgcatactgaattgggtccatgtctgtccagctggatgctttattgtaatgatggacatctttataaacatcttaatctcgacacataatttttggaataaaacctggaaagattg

SEQ ID NO: 3327 - DNA, 970 bp, Rattus norvegicus
  Genbank Accession No. NM_017282
gcggtgtggttgagtagggtgctgctttcagtcgtgtggcctttggaactccgcgtagcactgccgcctcctcctgtcctcgccatgttcctcactcggtccgagtacgacaggggtgtgaacactttttctcctgaaggaagattatttcaagtggaatatgccattgagggccataagcttggttctacggccattggcatccagacatcagagggtgtatgtctagctgtggagaagagaattacctcgccactaatggagcctagcagcattgagaaaatcgtagagattgatgctcatataggttgtgccatgagtgggctaattgctgatgctaaaactttaattgataaagccagagtggagacacagaaccactggttcacctataatgagacaatgacagttgagagtgttacccaggctgtgtccaatctggctttgcagttcggagaagaagatgcagatccaggtgctatgtctcgtccctttggagtagcattgttgtttggaggagttgatgagaaagggccccaactgtttcacatggacccatctgggaccttcgtacagtgtgatgctcgagcaattggttctgcgtcagagggtgcccagagctccttgcaggaagtttaccacaagtctacgactctgaaggaggccatcaagtcttcactcatcatcctcaagcaagtcatggaggagaagctgaacgcaactaacatcgagctggccacagtgcagcctggtcagaatttccacatgttcacaaaggaagaactggaggaggtgatcaaggacatttaaggaggggccatcctcgaacttctgtgggacagtttcagttctaatggctcttagactttatttccaactccacgtcgtgaaaatatccagtatatgtatgtgtgtttttttatgatgtctgtacataacagcaattctgaaataaaaaaaatttacaaat

SEQ ID NO: 3328 - DNA, 932 bp, Rattus norvegicus
  Genbank Accession No. NM_017283
gtgtgtgtgcgctacggggtgwagactgtgtctgaaatagcgggaacgccatgtcccgtggttccagcgccggttttgaccggcacattactattttctctcccgagggccgactctaccaagtagaatatgcttttaaggctattaaccagggtggacttacatctgtagctgtcagaggaaaggactgcgcagttattgtcacacagaagaaagtacctgacaaactactggattccagcaccgtgactcacttattcaagataacggaaaacattggctgtgtgatgacaggaatgacagctgacagcagatcccaggtacagagggcacgctatgaagcagctaactggaaatacaaatatggctatgagattcctgtggacatgctgtgtaaaagaattgctgatatttctcaagtctacacacagaatgctgaaatgaggccacttggttgttgtatgattttaattggtatagatgaagagcaaggccctcaagtgtacaagtgtgatcctgcaggctactactgtggctttaaagccaccgcagcaggagtgaagcagacagagtcaaccagcttcctcgaaaaaaaagtgaagaagaaatttgattggacatttgaacagacagtggaaactgcaatcacatgcctgtctactgttctgtcgattgatttcaaaccttcagaaatcgaagttggagtagttacagttgaaaatcctaaattcaggattcttacagaagcagagattgacgctcaccttgtggctctagcagagagagactgaacactcttatcagcttaccagatccatgatgccatgtgcctatgtgtttagtaacaacaaaccgacatcttagaggccctggattgaagatggaaactctcccactcctcctgccactgactggttaggactctgtataaa

SEQ ID NO: 3329 - DNA, 792 bp, Rattus norvegicus
  Genbank Accession No. NM_017284
cgcgtacccgggaagtccccgtgtgtgtgtaccttgcagcctcccgcttcccggaaccatggagtacctcattggcatccagggtcctgactatgtcctggtcgcttctgatcgggtggccgccagcaatattgtccagatgaaggacgatcatgacaagatgtttaagatgagtgaaaaaatcttactcctatgtgttggagaggctggagacactgtacagtttgcagaatatatccagaaaaacgtgcagctttataaaatgcggaatggatatgaattgtcccccacagcagcagctaatttcacacgccgaaacctggccgactgtcttcggagtcggaccccttatcatgtgaacctcctcctggctggctatgacgagcatgaggggccagcactttactacatggactacctagcagccttggccaaggctccttttgcagctcatggctatggtgccttcctgaccctcagcatccttgaccgatactacacaccaactatctcacgtgagagggcagtggagcttcttaggaagtgtctggaggagctccagaagcgcttcatcttgaatctgcccaccttcagcgttcgggtcattgacaaagatggcatccacaatctggagaacattaccttcactaagcggagttcctaacatcatgttcttccctcccacttaccagggacctttttttgatgggttccttttatttttttctactcttttgacgttcactctcaatagatggttaattcaaaataaagctgaacacagctaaattg

SEQ ID NO: 3330 - DNA, 828 bp, Rattus norvegicus
  Genbank Accession No. NM_017285
aattccgttgctgtcggaaagccagaaccggtttgtaggcagctcagtggagatcgggttcctattacagtgcaatcatgtctgttatgtcctataatggaggggccgtcatggccatgaagggaaagaactgtgtggccatcgctgcagacaggcgtttcggaatccaggcccaaatggtgaccacggacttccagaagatctttcccatgggtgacaggctctacataggcctggccggcctggccactgacgtccagacagttgcccagcgtctcaagttccgactgaacctgtacgagctgaaggaaggacggcagatcaagccttacaccctgatgagcatggtggccaacctcttgtatgagaaacggtttggtccctactacacagaacctgtcattgctggcttggacccgaagacctttaagcccttcatttgctctctggacctcattggctgtcccatggtgacagatgacttcgtagtcagtggcacctgctctgaacaaatgtatgggatgtgtgagtctctctgggagcccaacatggatccagagcacctgtttgagaccatttctcaggccatgctgaatgctgtggacagggatgccgtgtcgggcatgggcgtcattgtccacatcattgaaaaagacaagatcaccaccaggacactgaaggcgcggatggactaacctgtgctctggccccgtctcccttttgttgtttttctttttaataaaatctcctttctttcatgcctgcccgcccttgtttctgcgactttgtccccatcagggagagcccaatacagagcgactttatctc

SEQ ID NO: 3331 - DNA, 5648 bp, Rattus norvegicus
  Genbank Accession No. NM_017290
cggagccgtccccgacgccacctcccgtctcctccgccgcagtttcctccgccgctgtcgggggtgcagagctgaggggctcgggcagcgcgccgcgcagctcctctccagtcgcccgcctcgccgtcctccccaccgagggctcgcccgggcgcccctcctcagccgcgccgggtctcctcgcgcagcgccgcggcctgcgctacctgcggccggctggcaacagaggcaacgcacactcgcggcggggcgggaggctcgcagcccctcgggcgggctcggcgaggcccggccgcgtgcggcggtttctgggggagggggctcgggtgattcagcgcccggtcaggcggaagcggccgccgccgcggaggaggaggagaaagaggaggggacagctgtccgcgcccgggcgcccgcggtggcacgagcccgcggcccgagtgcgaggcggaggcgaggaggccgcggggacgcgaggcgaggccggccggggcccccgcagccatggagaacgctcacacaaagaccgtggaggaggtgctgggccacttcggcgtcaacgagagcacggggctgagcctggagcaggtcaagaagctcaaggagagatggggctccaacgaattgccggctgaagaaggaaagaccttgctggaacttgtgatcgagcagtttgaagacttactagttagaattttattgctggcagcatgtatatctttcgttttggcttggttcgaagaaggtgaagaaacgattacagcctttgtagaaccttttgtaattctgcttatattggtagccaatgcaattgtgggtgtatggcaggagagaaacgctgaaaatgcaatagaagctcttaaggagtatgaacctgaaatgggcaaggtgtatcgacaggacagaaagagtgtgcagcggattaaagcgaaagatatagttcctggggatatagtggaaattgctgttggtgacaaagttccggctgacattagattgacatccatcaagtctacaactctgagagttgaccagtcgattcttacaggtgaatctgtctcggtcatcaagcatactgaccccgtccctgacccacgagctgttaatcaagacaaaaagaacatgctcttttctggcacaaacatcgctgctggcaaagctatgggagtggtggtggcgactggagtcaatactgagatcggcaagatccgggatgaaatggttgcaacagaacaggagagaacacccctacagcagaagctggacgagtttggggaacagctttccaaagttatctccctcatttgcattgcagtctggatcatcaacatcgggcatttcaatgacccagttcatggtggctcttggatcagaggtgccatctactactttaagattgcagtggccctggctgttgctgccatccctgagggtctgcctgctgtcatcaccacctgcttggctcttggaactcgaaggatggcaaagaaaaatgctattgttcgaagtctgccttctgtggaaacccttggttgtacttctgttatctgctcagacaagaccggcacacttaccacaaaccagatgtccgtctgcaggatgttcattctggacaaagtagaaggtgatacttgttcccttaatgagtttaccataactggatcaacctatgcacccattggagaagtgcaaaaagatgacaagccagtgaaatgccatcagtatgacgggcttgtagagttagcaacgatctgtgctctgtgtaatgactctgctttggattacaatgaggcgaagggtgtgtatgaaaaagttggagaagccacagagactgctctcacgtgcctggtagagaagatgaatgtattcgacacggagctgaagggactttctaaaatagaacgcgccaacgcctgcaactcggtcataaaacagcttatgaagaaggaattcacgctagagttttcacgtgatagaaaatcaatgtccgtctactgtacaccaaacaaaccgagccggacgtccatgagcaagatgtttgtgaagggtgctccagaaggtgtcatcgacaggtgcacccacatccgagttggaagtaccaaggtccccatgacgcctggtgttaaacagaagattatgtctgtcattcgggagtggggcagtggcagcgacacactgcggtgcctggctctggccactcatgacaacccgctgaggagagaggagatgcacctggaagattctgcgaacttcatcaaatatgagaccaatctgactttcgttggctgtgtgggcatgctggaccctcccaggattgaagtggcctcttctgtgaagctgtgccggcaagcgggcatccgagtcatcatgatcactggggataacaaaggcactgctgtggccatctgtcgccgcattggcatctttgggcaggatgaggatgtgacatcaaaggcttttacagggcgagaatttgatgaattaagcccctcagcccagagagacgcctgcttaaatgcccgttgttttgctcgagttgaaccttcccacaagtctaagatcgttgagttcctgcagtcctttgatgagatcacagctatgactggtgatggtgtgaacgacgcgcccgctctgaagaagtcggaaatcgggattgccatgggctcagggactgcagtggctaagacggcctctgagatggtgctggccgacgacaacttctccaccatcgtggccgctgttgaggaggggcgcgccatctacaacaacatgaagcagttcatccgctacctcatctcctccaacgtgggggaggtggtctgtatcttcctgacggcagcccttgggtttcctgaggctttgattcctgtccagttactctgggtcaatctggtgacggatggtctgcctgccactgcgctggggttcaatcctccagatctggacatcatgaacaaacccccacggaacccaaaagaaccgctgatcagcgggtggctctttttccgttacctggctattggctgttatgttggcgctgccaccgtgggtgctgctgcgtggtggttcatcgctgctgacggtggtccgagagtctccttctaccagctgagtcatttcctgcagtgtaaggaggacaacccagacttcgaaggagtggattgtgcaatctttgagtccccgtatccgatgacaatggcactttctgttctagtcaccatagagatgtgcaatgccctcaacagcttgtctgaaaaccagtccctgctgaggatgcccccctgggagaacatctggctcgtgggctccatctgcttgtccatgtcccttcacttcttgatcctctacgtggaacctttgccactcattttccagatcacaccgctgaatctgacccagtggctgatggtgctgaaaatctccctgcctgtgatcctcatggacgagacgctcaagtttgtggcccgaaactacctggagcctggtaaagagtgtgcgcagcctgccaccaaaccctcctgctccctgtcggcatgcaccgacggcatttcctggccctttgtgctgctcattatgcccctggtggtctgggtctacagcacagacactaactttagtgatatgttctggtcttgactgacagcgctacatgcagaagatgtttaacttaatcaattaattttttattgtttaaagcaactgtctatttctgctgaattttcacatgaacatattggctggtgaaggaggtttcatatctagattttgttttgctttttctgactccagtgggacaagattttccttttttttatacacataattaaagtgtccattgacatgtacagagaactaacactattttatgcagatatttttttgtagatgaaaaaagcatgtacagtgttctgtttcatactcatacttgtacaaagatcgttgagccagcagacattgtcagcaagttaattggcagcagacttaggaaatgaatgtgtgtggtttttaaaagaaaaaaaactaaatagcatgtattgtgtcttttgcatgattctctggatttaatttggtatcacagtctaatttttattcataagccaatttttctgcactgagcagagtcctgctacctcagtcagtatttttggtttgccactccctgcaccctcagcctctgtcacccccagcccaccctggcccgctcggctgcttctgtaggtctgatggttctgtttacatctgtcttcacgaggtttgcctgtctcgcttgtgcagaaaacattgctccagatccaatcgactgggtttctgtcccttcgcctagtttttaaggttatttatttaaatgtctaatgtattttattgtaacagacattgttttgccaacattgcctattcagtggcacttcacaatctagtttaaaagaaaaataaaacattttaaatggacagaggaaaataactgtcttgttcttaatggccttgaactacccatgatcagttcaaattcctgagcttctcagctcggagccttagtttcctgttcctgagaagaacgtgtactgctgcacagtagggattatctataatgtacaggcacgatcgtcatgtgacaaacatttactcaagtttctgctggcctggtgtatgtaggctggtgtaagggcaagtgtgtgtgtgtatgtgtgtgtgtgttctgtaaaatctgtaaatagcacatgaccaaatgaactgtatagaaatatttttatttgaatatggcactaaccaccaccaccatgactgaccggacgtttgcgcatgttcaaggtcagtcttaacggcagtgtgagtcattaacagtcctaactgtggtgttttcctccaatgccttccaacatccatcaactaaccaatactggagtaaccgcttcctaaacattgcagaaatgtaagggtgttcgggtgcgtgcatgtgcgttgttagcaacacatcttccagccctctgcatgactgagcttggggaaagagaaatagaacagcccccagctcactgtgtgatgtggaggaaatgtgtattacaagtggggttttagctgttgagtcaaaataataacaagtgtacaatttagcataaggaatcggagagcctctccagagaagtcggtttctttgctgcaagaagaatgaggttctgaacccttatccaagaacagaagccatcagccaagtctccacatttctctgcaaaatgttgtagcctctataactgtatgatagtgtaatgcatgccttcagttgtaagtggccagatcgcgctacagtgacattgaaacctgctctctaattggccctgtacagtttgcttatttataaattcatttaaaacactacagctgttgaatggttacaacctaggcctccggtcctaacttcagttgttctcctcggtgtgcagccagctgttccacactgtattattgtaacttatttagtgaagtcagaagcagtagacagatgttggtgcaatacaagtattgtgtgcatttatcgtaataaagtgctccgcgtcggttcagttcctcacagcttctcacagtgcatgtctgactgtagtctgtaaatagaggtcagtgtccgtgctgctaacaggtatcgatcgcacaga

SEQ ID NO: 3332 - DNA, 4183 bp, Rattus norvegicus
  Genbank Accession No. NM_017291
ccttctaataacaaacacagcaatggtgccttaagagaggacggtcggacggcagctcctcaccggctccttctcacggcttctcgggagaactgtttgatttggaaatctatgttggctgtccggaatatgaaatttggcatattccttttgtggtggggatgggttctggctgctgagagcacagtgcactggccaggaagagaagttcatgagccctctaagaaaggcagcagacctcagagacagagacgaggtgcacatgacgatgcccacaagcaaggcagccccattctgaaacgaagctctgacataaccaagtcgcctctcaccaagtcagagcagctgctcaggatagatgaccacgacttcagcatgaggcctggctttggaggtcccgccatccctgtgggtgtggatgtgcaggtggagagtctggacagcatctccgaggtggacatggacttcaccatgaccctctatctgaggcactactggaaggacgagaggctgtcttttcccagtaccaacaacctcagcatgacgtttgacggccgacttgtaaagaagatatgggttcccgacatgttctttgtgcactccaaacgctccttcatccatgacaccaccacagacaacgtcatgttgcgggtacagccagatgggaaagtgctgtacagcctcagagttacagtgacagcgatgtgcaacatggacttcagccggtttcccctggacacacagacctgctccctcgaaatcgaaagctatgcctacacagaagacgacctcatgctgtactggaaaaaaggcaatgactccttaaagacagatgagaggatctccctctctcagttcctcattcaagaattccacaccaccacaaaactagccttctacagcagtacaggctggtacaaccgtctgtacatcaacttcactctacgtcgtcacatcttcttcttcttgctccaaacctactttcctgccaccctcatggtcatgctgtcctgggtgtccttctggatcgaccgcagagctgtgcctgccagagtccccttaggcatcaccacggtgctgaccatgtccaccatcatcacgggcgtgaacgcctccatgcctcgagtgtcctacatcaaagccgtggacatctacctctgggtcagctttgtgttcgtgtttctctcggtgttggagtacgcagctgtcaactacctgaccacagtgcaggagcggaaggaacggaagcttcgggagaagatctcctgcacctgtgggctgccccagcctcgaggggtgatgctggacagcagctacagtgacggggaggtgaacgacctgggtggctacatgcctgagaacggagagaaacccgaccggatgatggtgcagctgaccctggcctccgagaggggctccccacagaggaaaagccagagaggcagctatgtgagcatgaggatcaacacccacgccattgacaaatactcaaggatcattttcccagctgcttacattttattcaatctgatatactggtcaattttctcttagatagatgtgattgtgtaaatcttggcaggcaccacagaagttgctgtaaaaatgagaatgacagtttaaagccattcctacctgggttttctctgtcccctgttcagctctccaaagctgcaccaacaagacaccttgtttttgcacttattaagtatcagttgtctgcacagcagtatactaggcgttgcaggacgttgccatgatagtaactgatgttagcggctcccagatcccaggaagagcacagaggccacatgtggacatgctgcggtccagggccagggctctggatgcttttcacatcgaggggtttctacgtcggtggaccatgttctttagactacgtagatctgggaaggacctaaataaaactcatctgcattgggctcacaggcacataaaccccctcggctgaaagggcaggcttcgtctgtctccgcacctgctccacatccccatacttaatggaaggcagtggcgctcacagggttcttttccacaagctgcatggctctctccttctaagaaatgccctttacatggctgaaatgtccctagtagactttgaagatagagatacatggatcatttcatctgttttgagggggcaacaaagctagaaaaccgtgtccctttccacgccttctagtcaccgtttccctcctctctaccacagagcaggtgctttcttcaaaataaaatcttttctcagtcgcatgacagcatcactgactgaggcgcttgaagaggtattcatttcttctgcatagtcagcatttcaagaaaactcgaggctgtttctaactcatgggaatgagaagcaaactgtttcttaagagaaagataacattgaaaaacaaaagaaacagacagacatcttcatttccgttcagcaagtgctgtctgggaactagaaagcaattatcttctagattgagcatcccatagaccagataagctggcccatagcaactgatgtcagccatgggttgtaatttgatgtattgttttaaaatagaagcctctatagtctttatctagaagatatatagcagccccaaccgaacttgctcaaacagtattgagcagtatgtcatttgctctggcccacgtctttcactcagagagacaactacttagcatctgccacatcccaccggccattgaagcatcttaaccaagtcctggcccatttagttgtggttgtgttcagatttcagtgagagaatcccaggagaaacataaatgataatttaatattgtggaccatatggttaataaatatagagaaggtctaagagacctgtccaggggcaaccatcctctgtgctgcgaaacctatcttcatatatgtcgttatagctcccatcatttcaaggttaacttaagggatcaatactaaatagtatcatacacatggctattctttactctggtcataaaaagagctatttgcaaattcctacttagaagacagtctctcatttcccccaataaaaggtcatcaaaagcttttatcaaactcaagtggtagacttagagggataaattaagtaattatcattgattttcaaaatgaccgttcgttttgccaagcatggtttgcccatgcacttgggaagtggaatcaggagggtctggagttcaaagctagctttgctttacggcatattggaggcaagcatgggctatgtgaggtttaaaatggttggcttttcatttttattttatgaaacatttaccatcaaagccaacaactttgccactgtcttcttcctcaccactaaggccactgagctgtctaggtttccagagcttgtaactaagccctttgtactgtttgggacactccaccatttgagccagtgtgtagaatgctctcctagcctgctaacctgctatattgaagagcacagactggatggcttaatcaacagagatatattttctcacagttctagagactgatgtccaaggtcaaggtgctggccgacgcagtttccccagaggcctgtcttgctgtctttccaatagccactctcttgctgcatccttgccttctttcctctgtagcaacaacctctgtctagatccctttctccctagttacattgtatcagggcccacatccatggcctcatttaaccttagttacttctttaaaagccttgtctcaaaaccatttgctctttagcgatctcctccaatttggaattcttcatcttgggaagctccttaggacttaggaggtacttaaagaaggtgatgctgtccatcccacagggaagaagcctgttcaggttaagctcaggaaacaaataacaaattcaggaagtccctgaaactgataagctatcacccccccccccaagtatatacaaacaataagaactgctgaggtcacttttagataatccaaaaattctggaagagacaaagaccagccaagctgcctagaagggacagttccaacccatctagctgcctgcaagtcatgctgtgagctccagatttccagctatgggagctgtcacccacgatggggcaggcttttgtaatgaaactgtctttgagtcatttctgcacctctaaataacctcaataaagctcattggttcatcccgtt

SEQ ID NO: 3333 - DNA, 2402 bp, Rattus norvegicus
  Genbank Accession No. NM_017299
acgccggctgctggttgaactaggtacgggcctgtgggacgcagagctggggatccattgtgagtgcctagggagccacaaggtgcggtcctgttccttccggcatcctgaagatgaaagcggactgaattctatctgcagtcctggcgcaactgcagagctccggcaggttgagcgtgccaagagcctgcgaagtggagtgtcatctttgcttaccaggtccatgaggacctggccaacatggtgcccactggccaggtcggagaaaagcaagcctgtgaagagcccaggcaggaccgagaacttaagtcctggcgatggctcgtgttctacctctgcttctttggcttcatggcacagttgcgacctggggagagcttcatcacaccctacctcctggaacgtaacttcaccaaggagcaggtgaccaacgagatcattccgatgctgccctactcccacctggccgtgctggtccccatcttcctgctcaccgactacctacgatacaagccagtcctggtcctacagtgcctgagcttcgtgtgcgtgtggctgctgctgctcctggggacctccgtcgtgcacatgcagctcatggaagtcttctacagcatcaccatggcggcgcgcatcgcctactcctcctacatattctccctggtgcagccctcccgctaccagcgcatggccagctactcgcgggccgcagtcctactgggcgtcttcatcagctccgtgctgggccaggtgctggtcaccctaggaggcatctccacctatatgctcaactgtatctccctgggcttcatcctcttcagcctgagcctctccctcttcctaaagcgtcctaagcggagcctctttttcaaccggagcgcacttgtgcaaggagccttgccctgtgagctggatcagatgcacccgggacctggccgtccagagcccaggaaactggagcgcatgctgggcacttgcagggactccttcctggtacgcatgctaagcgaactggtgaagaacgtccggcaaccacagctgcgtctctggtgcctctggtgggtcttcaactcggcaggctactacctgatcacctactatgtccatgtcctgtggaaaatcactgacagcagactcaactacaacggtgccgtagatgccgcctccacacttctgagcgccatcacggccttcaccgcgggcttcgtgaacatccgctgggctctgtggtcaaagctggtcatcgcgagtgtcatagccatccaggctggcctggttttctgtatgttccagatcccggacatctgggtctgctatgtgaccttcgtgcttttccgtggggcctaccagttccttgtgcccattgccacttttcagattgcatcttccctgtctaaagagctctgtgcattggtcttcgggatcaacactttccttgccactgcgcttaagacctcgatcacactcgtggtctctgacaagcggggtctgggcctccaagtccatcaacagttccgcatctacttcatgtacttcctgacgctgtccatcatctgccttgcctgggctgggctggacggcttgaggtactaccggcgtggtcgccaccagccgctggcccaggcccaggctctgagtcccttggaggattctgtgcaggcgataagcctacaggatggagacctaaggagaccgcagccctcggcaccacagctgctcccagaggatggcagcgtagaagacggcagggcagacttgagagtcgaagccaaggcctgacctgtcttcaccttcctggcttcatcccagttcagccgccggattcctgactcagtggcagcccctcctgtgtgcactccagcctgaatcagcccttctggggtcccagtgcctgagacatgtgggggcccccctgttgcctttcaggagccttcaggttaggccacagaactctctccttaggggccaccttttttaacagtggggcgacagacagcttgtccttccggtagcctctgaggaccctaagcccagcctacttcatgctttagcaatggctggagcctgctacagacactcaggaccgctccctggcttttgtgaaccacaatgtcaggccactacgagcctgggttgcctactgcttgccaagaagaacctgtgtaggggtcagctgtgcccaccaggctggtctgccctttgctctgggatgctcaggacaaatcacgtctgcccccagggctagtgaggtagcccagacaccggacaaggtccgctgagcctgcagggtactggttacctgtcctaggctcctggtgaagctgccatacctccactctcggaggtgcttgtttgtatggttgtctgattttttaaaacttgacattaaaatggagaactac

SEQ ID NO: 3334 - DNA, 1382 bp, Rattus norvegicus
  Genbank Accession No. NM_017305
gaattccggccttccctccgtggctccggcgctgcccggtcccctcgggcggcagctgccatgggcaccgacagccgcgcggccggagcacttctggcgcgggccagcaccctgcacctgcagaccgggaacctgctcaactggggccgcctgcggaaaaagtgtccgtccacgcacagcgaggagcttcgagactgtatccaaaagaccttgaatgaatggagctcccaaatcagccctgatttggtcagggagtttccagatgttttggaatgtaccatgtcccatgcagtggaaaagataaaccctgatgaaagagaagaaatgaaagtttctgctaaactgttcattgtaggatcgaattcttcatcatcaactagaaatgcagttgacatggcatgctcagtccttggagttgcacagctggactctgtcatcatggcttcccctccaattgaagatggagttaatctttccttggagcatttgcagccttactgggaggaattagaaaacttagttcagagcaagaagattgttgctataggcacctcggatctagacaaaacacagttggagcagctgtaccagtgggcacaggtaaaacccaatagtaatcaagttaatcttgcctcctgctgtgtgatgccaccagatttgactgcatttgctaaacagtttgacatacagctactgactcacaatgacccaaaagaactgctctctgaggcaagtttccaggaagctcttcaagaaagcatccctgacattgaagcccaggagtgggtgccactgtggctgctgaggtactcggtcatcgtgaaaagcagaggaatcatcaagtcaaaaggatacattttgcaagccaaaagaaagggttcttaactacagctcaagctcacaactcaggggccttgtatttatctggaacataagataaaaattcatgataaaattgagatgtgtaaaaaaaaatctagctctcgcctacaaaaagcgtcactgaggcgtgaatgtggtggtttggcaatgtgttgagtttaagtacctccctggcgtctgcagcagcgcactcacaggaagcattgtattctcttcattaaactcttggtttctaactgaaatcgtctataaagaaaaatacttgcaatatatttcctttatttttatgagtaatagaaatcaagaaaatttgttttaagatatattttggcttaggcatcagggtgatgtatatacatattttttatttctaaaattcagtaactgcttcttactctatacttctataactaagcaattacattacagttgttaagacatactggaagagatttttttcctgtcgtttgacaaaataatctatctcagagtcggaattc

SEQ ID NO: 3335 - DNA, 987 bp, Rattus norvegicus
  Genbank Accession No. NM_017306
cccaccgatatccaaaatggcgctggctgctgcgcgtcgcgttctgctgcaggccggatcccgcctcggccgcaggggggccgtggacggcgcgcgtcgcttctctaacaagcgggtgttggtggagaaggagggcgaggcaggaatcgcagtgatgaagttcaagaaccctccagtgaattccctcagcttggagtttctgacagagttcgtcatcagcctggagaagctggaaaatgacaagagcatccgaggtgtcatcctcacttcggagcgcccgggtatcttctcggctggcctggacttgatggagatgtatggccggaacccagcccactatgctgagtactggaaggctgtgcaggagctgtggctgaggctctacttgtccaacctgaccttgatatctgccatcaatggcgcctctccagctggaggctgcctcatggctctcacctgtgactacaggataatggcggacaactccaagtataccataggattgaatgagagcctgctgggcattgttgcccccttctggttaaaagacaactacgtgaacaccatcgggcaccgagcagccgagcgtgcccttcaactggggacgcttttcccaccagcagaggccctcaaggtgggtttggtggatgaggtggtacctgaggatcaggtacacagcaaggctcgctcagtgatggccaagtggttcaccattccggaccattctcggcagctgacgaagagcatgatgcggaaggccacggcggacaacctgatcaagcagcgagaggctgacatccagaacttcaccagtttcatctccagagactccatccagaagtccctgcacgtgtacttggaaaagctcaagcaaaagaagggctgacctaagggtgccacacgggtgtttagttacacgtgccttctaggacccatggtcccaaggattatcaataaggtatttttcaatttaaaaaaaaaaaaaaa

SEQ ID NO: 3336 - DNA, 1575 bp, Rattus norvegicus
  Genbank Accession No. NM_017307
gggtccgggcgcccctcctcctgcccgccatggctgcgcctcgcgcaccccgcgctctgacggctgccgctcccgggtccgggaaagccaaactgacgcaccccgggaaggcgatcctagcaggcggcctggctggaggcatcgaaatctgcatcaccttcccgaccgaatacgtgaagactcaactacagctagatgaacgcgcgaacccaccgcggtaccggggcattggggactgcgtgcggcaaactgtccgcagccatggcgtcctgggcctgtaccgcggcctcagctccttgctctacggctccatccccaaggcggctgtcaggtttgggatgttcgagttcctcagcaaccacatgcgggatgcccaaggtagactggacagcaggagaggactgctgtgcggtctgggtgccggcgtggcagaggcagtggtagtcgtgtgccccatggagaccgtgaaggtgaaattcatccatgaccagacttcctccaatccaaagtaccgaggatttttccatggggttagagagattgttcgggaacaagggctaaaggggacataccaaggcctcacagctactgtactgaagcagggctcaaaccaagccatccgattcttcgtcatgacctccctacgcaactggtaccaaggagacaaccccaacaagcctatgaacccactgatcaccggggtctttggagctgtcgcaggtgcagccagtgtctttgggaacacacccttggatgtgatcaagaccaggatgcagggcctggaggcacacaaataccggaacaccctggactgtggagtgcagatcctgaagaatgaggggcccaaggcattctacaagggcaccgttccccggctgggccgagtctgcctggacgtggccatcgtattcgtcatctatgatgaagtggtgaagctgctcaataaagtgtggaagacggactaaccctggagggtgcaatggggcgtcccagctcctccaggccacctactcttgacgattccagtgcagtagtgccaaaaggccccttcctttgtccctcaagttctgtggcctggtgtgtcatagtgactgtcatgtgttccttagtactgtactcccatgtggtctatgtgtaacactactattgtatctgtgtccagcctggccgtggctgggtgtctctttggcctgtgaagacgtgctcacttacccatgtgcttgcttgtgagccatgtgcctgtttcatgttctatgtcatgtgaccctgtgccccacttcctggggtgcctatgtgccctggtccatggccttggagccatggtcaggtcacagtccggtgccttccaccccctatggcaagggcgccctgccctggcctaccacagctgcctctgggcttcggcctggcttcaccgcattccaggggctataggcccccctgcttctcccgccattggccttaaatggccctcgggccctccctctgcccggaacagggtggcaccagccactctcaggaccaccttgccaaggagaataaaccggatcctgttgcaaaaaaaaaaaaaaaaaa

SEQ ID NO: 3337 - DNA, 1407 bp, Rattus norvegicus
  Genbank Accession No. NM_017313
agcgctataactactgaatatactatggctaacgaccccttagaaggtttccatgaagtgaacctcgcttcgcctacctctccagaccttcttggtgtgtgtgacccgggaacccaagagcagactacctccccgagcgtcatctaccggccacacccttcgacgttgtgctctgccactatccaggccaatgccttaaatctttctgaccttcccacacagcctgtgtattcatccccgaggcatttaaactgtgcagaaatatctaacatcagcattcatgttccagagccagcatcatcggtagcctctgaggtggcagcagggctcacgaggttcacctcaaggaaggacagctgcaacgcagagagggagtttctgcagggcgccaccgtcacagaggcttctgctggcaacgatgacatctttgggttgagcacggacagcctgtcccgtttacggagcccatctgttctggaagttagagagaagggctacgaaaggttaaaagaagaacttgcaaaagctcagagggaattgaagttaaaagatgaagaatgtgagagactttcgaaagtgcgagatcaacttgggcaggagttggaagaactcacagctagtttatttgaggaagctcacaagatggtgagagaggcgaacgtcaagcaggcaactgcagaaaagcagctgaaggaagctcaagggaaaattgatgtgcttcaagccgaagtggctgcgctgaagacactcgtactgtccagttctccaacatcgcctacgcaggagcctctggcggatggaaagacgccctttaagggggggcacacacggaacaaaagtacaagcagtgctatgagtggcagccaccaggacttcagtgcgatccaggcaatcgtaaaagactgcagagaggccgatctatcgctgtataatgagttcaggtcttggaaggatgagcccacaatggacagaacatgtcccttcctagacaaaatctatcaggaggatatctttccatgcttaacattcgcgaaaagtgagttggcttcagctgttctggaggccgtggagaacaacactctaagcatcgagccggtagggttgcagcccatccgcttcgtgaaggcttccgcggtggagtgcggagggccaaaaaagtgtgctctcactggccagagtaagccctgtaagcacaggattaaactaggggactccagcagctattactacatctctccggtttgcagataccggatcacttctgtatgtaacttttttacatacattcgatatattcagcagggacttgtgaaacagcaggatgttgatcagatgttctgggaagttatgcaactaagaaaggagatgtcgttggcaaagctgggatatttcaaagaagaactctga

SEQ ID NO: 3338 - DNA, 2472 bp, Rattus norvegicus
  Genbank Accession No. NM_017315
cagagatgaaagctcaggaggaccccgggagctcaaagcagcatgaatgcccagattcagcagggacttccaccagggaccagcaggcacctttgcccgcggagcccaagtttgacatgttgtacaagattgaggacgtgccaccatggtacctgtgtatcctgctgggcttccagcattacctgacatgcttcagtggtaccattgctgtgcccttcctcctggctgaggcgctgtgtgtgggccgcgaccagcacatgatcagtcagctcattggtaccatcttcacctgcgtgggtatcaccactctcattcagactacagtgggcatccggctgccgctgttccaggccagtgcctttgcgtttctggttccagccaaggctatcctggccttggagaggtggaagtgtcctccagaagaggagatctacggtaactggagtatgcccctgaacacctctcatatctggcatcctcggattcgggaggtccagggtgcaatcatggtgtccagcgtggtagaggtggtgattgggctgttggggctgcctggggccctgctcagctacattggacctctcacagtcacccccactgtctcccttatcggtctctctgttttccaagctgctggcgaccgagctggctcccattggggcatttcggcttgctccattctactgatcgtcctgttctcccagtatctacgcaacctcaccttcctgttgcctgtttaccgatggggcaagggtcttactctcttccgcatccagatctttaagatgtttccgatcgtgctggccatcatgaccgtgtggctactctgctatgtgctgactctgacagacgtgctgcccgcagatcccacagtctacggtttccaggctcgaactgatgcccgaggggacatcatggctatctctccctggatccggatcccctacccatgtcaatggggcctacccacagtgaccgtggctgcagttctgggaatgttcagcgccacactggcgggcatcatcgagtccatcggtgattactatgcctgcgcccggttggctggagcaccaccccctccagtccatgctatcaacagggggattttcaccgaaggcgtctgctgcatcatcgctgggctactgggcacaggcaacgggtccacctcttccagccccaacatcggggtcctagggattaccaaggtgggcagccgaagagtcgtgcagtatggtgcaggtatcatgctaatcctgggggccattggcaaattcacagctctcttcgcctcactgccggaccccatcctgggagggatgttctgcactcttttcggtatgatcaccgctgtgggactgtccaatctgcagtttgtggacatgaactcctcccgcaacctctttgtattgggattctccatgttcttcggcctcacgctacccaactacctggattccaacccaggtgccatcaacacaggcgttcctgaagtggatcagatcctaactgtgctgctgaccacagagatgtttgttggtggctgtcttgctttcatactggacaacacagtaccagggagcccagaggaaagaggtctgatacagtggaaagccggggcacacgccaacagtgagacgctggccagtctcaagagctacgatttcccgttcgggatgggcatggtaaaaaggaccaccttttttagatacatccccatctgcccagtcttcagaggattctctaagacagaaaatcagcctgcagttctagaagacgctccagacaacacagaaactgggtctgtgtgtaccaaggtctgaaactacctctatgaaaggaggcacggtgtgtatcaggaaaacaaactacccaggagacagaagacctgagttggagatctcagctgtccctattctaaattcccatggaagactggacagatcaccctctctttgactccattttcgtgacagcccaagtctctaagtcctcgggagacctgtatttgcactgctctgattccttacttccactttcctaagcatgcatgtcaaggaggaagagctggagaaaaaaaaggaaacccagagagattctagggcttcatgtagacatgaagatagggttaaaaacaaaccaaacaaaaccccctgaattccaatgctatgtattttaagaccaaaacagtattaaataatatactggaccaataatttagataagtttagataagtattctcccttcacacagggaaaataaatttatactttcagactagctcagtgataaagatgtctatttagaatgttccagaactgggcttgaccttcaacattaaatatacagaaataaaaacccttaagaggaaaaaaaaaggggttggggatttagctcagtggtagagcgcttgcctagcaagcacaaggccctgggttcggtccccagctccgggaaaaaaaaaaaaaaaaaaa

SEQ ID NO: 3339 - DNA, 1874 bp, Rattus norvegicus
  Genbank Accession No. NM_017319
ggcacgaggcgggctctcccatctcggttctctggtcccggccctccgattgcccccgccgcatcccgccgccatgcgcttcagctgccttgcgctgctcccgggcgtggcgttgctgctcgcctcggccctcctcgcctccgcctcagacgtgttggaactgacggacgaaaacttcgagagtcgcgtctccgacacgggctcagctgggctcatgctagtcgagttcttcgccccatggtgtggacattgcaagaggcttgcccctgagtatgaagctgcagcaaccagattaaaaggaatagtcccattagcaaaggtggactgcactgccaacacaaacacctgtaataagtatggcgtcagcggctacccaactcttaaaatatttagagatggtgaagaagcgggtgcttatgatgggcctaggactgccgatggaattgtcagccacttgaagaaacaagcaggaccagcttcagttcctctcaggactgaggacgaatttaagaagttcattagtgataaagatgcctcggtggtgggctttttcagggatttattcagtgatggccactccgagttcctaaaagcagccagcaacttgagagataactaccgatttgcacacaccaacgttgaatctctggtgaaggagtacgatgataatggagaggggattactatatttcgtccattacatctggctaacaaatttgaagacaaaattgtggcatatactgaaaagaaaatgaccagtggcaaaatcaagaagtttattcaggaaagcatttttggtctctgtcctcatatgacagaagataataaagatttgatacaaggcaaggacttactcacggcttactatgatgtggactatgaaaagaatactaaaggttctaactactggagaaacagggtcatgatggtggcaaagacattccttgatgctggacacaaactcaactttgctgtagctagccgtaaaacctttagccatgaattgtctgactttggcttagaaagcactactggagagattcctgttgtggctatcagaactgctaaaggagagaagtttgtcatgcaggaggagttctcgcgggatggcaaggctcttgagcggttcctgcaggaatactttgatggcaacttgaagagatacctgaagtctgaacctatccccgagaccaacgaaggacctgtcaaggtggtggtagcagagagttttgatgacatagtgaatgctgaagacaaggacgtgctgatcgagttttatgctccttggtgtggccactgtaagaacctggaacccaagtacaaagagctgggggagaaactcagcaaagacccaaatattgtcatagccaagatggatgccacagccaatgatgtgccttctccatatgaagtcaagggttttcctaccatctacttctcaccagccaacaagaagctaactccaaagaagtatgaaggtggccgtgaattaaatgatcttatcagctatctacaacgagaagctacaaaccctcctataattcaagaagaaaaacctaagaagaagaagaaggcacaagaggacctctaaagcaacagccaaatgcaccactttataaaaggactcttacaccagagaaagcaaaaccatcagagaggacagaatggatatactctgaatcctgttaaattttctctaaactgtttcttagctgcactgtttgaaaataccaggaccagtttatgtttgtggtttggggagaaaattatttgtgttgggaagaatgtggtaggggtggggggaattgagttggggggttattttctaattttttttgtacatttggaacagtgacaataaatgtgcccccttt

SEQ ID NO: 3340 - DNA, 3564 bp, Rattus norvegicus
  Genbank Accession No. NM_017321
cgctgagtagatcactgttaagtttgagacttgtttcaaactaaaaaatgatgagggatatagcccagtagtaaagttacatgcctagatttctcagtgagtgccttggagcatgactcagtggtggagccctgcctagaatccccagtgagggcctgggttcttgcttgcacccgcctgtgtgctccgtgctccgtgagccccgctgtgagcgagacacgtgaccgtcagtaatcatgaagaatccatttgcgcaccttgccgagcccttggaccctgcacagccaggaaagaaattcttcaacttgaataaattggaggactcaagatatggacgcttaccgttctctatcagagttctcctggaggccgccgttcggaactgtgacgagtttttggtgaagaagaatgacattgagaatatcctgaactggagtatcatgcagcataagagcatagaagtgccgtttaagccagcccgagtcatactgcaggactttacgggcgtgcctgctgtggttgattttgcagcaatgcgcgatgctgtgaagaagttgggaggaaatccagagaaaataaaccctgtctgccccgctgaccttgtaatcgatcattccatccaggttcatttcaacagaagggcagacagtttgcagaagaatcaagacctggaatttgaaaggaatagagaacgatttgaatttttaaagtggggttcccaggccttttgcaacatgaggattattcctcctggctcaggaattattcaccaagtgaatctggagtatttggcaagagtagtgtttgatcaggatggatgttactacccagatagcctcgtgggcacagattctcacaccaccatgattgatggtctgggagttcttggttggggtgtaggtggtattgaagcagaagctgtcatgctgggtcagccaatcagcatggtgcttccccaggtgattggctacaagctgatggggaagcctcaccctctggtaacctccacggacattgtgctcaccattaccaagcacctccgacaagttggggtcgtgggcaaattcgtggagtttttcgggccaggagtggcccagctgtccattgctgaccgagctacgattgccaacatgtgcccagagtacggcgcgacggcagccttcttcccggtcgacgacgttagcatcgcgtacctggtgcagacaggtcgtgaggaagacaaagtaaagcacattaaaaggtatcttcaggctgtaggcatgtttcgagacttcagtgactcctctcaagacccagacttcactcaggtcgtggagttagatttgaaaacagttgtgccttgctgcagtggacctaaaagacctcaggacaaagttgctgtgtctgagattgaaaaggactttgaaagctgccttggagccaagcaaggatttaaaggttttcaagttgctccagaccatcacaatgaccacaagacgtttatctataacgacagtgaattcactcttgctcatggctccgtggtgatcgccgccatcactagctgcacaaacaccagcaatccgtccgtgatgttaggcgcaggattgttagcaaagaaagccgtagaggctggcctgaatgtgaagccttacgtcaaaaccagcctgtctcctgggagtggagtggtcacctactaccttcgagagagtggagtcatgccttacctgtcccagttagggtttgacgtggtgggctacggctgcatgacctgcatcggcaacagtggacccctccccgaacctgtggtggaggctatcacccagggagaccttgtggctgttggggtactgtctggaaacaggaattttgaaggacgagtccatcctaacacccgggccaactacttagcatctcccccactagtaatagcatatgcaattgcaggcaccgtcaggatcgacttcgagaaagagcctttgggagtgaacgcacagggccaacaagtgtttctgaaggatatctggccaactcgagatgagatccaggaggtggagcggaagtatgtcatccccggcatgttcaaggaggtctatcagaagatagagactgtaaacaaaagctggaatgccttagcagccccttcagagaagctgtatgcgtggaaccccaagtctacttatatcaagtcaccgccattctttgaaagcttgactttagatctccagccccccaagtctatagtggatgcctatgtgctactaaatctaggagattccgtaacaacggaccatatctctccagcggggaacattgcaagaaacagccctgccgctcgctacttgacgaacagaggcctgacgccacgagatttcaactcctacggctcccgccggggtaacgacgccatcatggcacgggggacatttgccaacattcgcttgctgaacaagtttctgaacaagcaggcccctcagactgtccaccttccttcaggagaaaccctcgatgtgttcgatgccgctgagcggtaccagcaggctggacttcccctgattgttctggctggcaaagagtacggttcaggcagctcccgagactgggcagccaaaggtcctttcctgctgggaatcaaagctgtcctggcagagagctacgagcgcactcactgcagcaacctggttggcatgggggtgatcccccttgagtatctccccggcgaaactgcagactctctgggactcacgggtcgggaaaggtacacgatccacattcccgaacaccttaagccccgcatgaaggttcagataaagctggacaccgggaagaccttccaggccgtgatgaggttcgacaccgacgtggagctcacttacttccacaatggaggcatcctgaactacatgatccgaaagatggcccagtaggtgctggcctctcaggagacccgcgcttggtgctagacccaatgaggtaccaggcctccgctggtggaggcctgcgagcagccacctctacttctcgtgagggtgctagcaagatgagcaagtgggccctgccattcctggaggctcagcggcaggagtctctagttcggtgatttgttaatcttttatccttttctgtaatccggaatctagaatcatgggaaggtccatagtcccaaagagagctaccttctctttaaagtcactcatcaccggtcattgatttttttcactctgactaatcttcagcagaactagccagtatctcagaagtgtctcctaccctttctgttactctgtctgtctgtgctcagtgacacccttccctggagagcccattcctccgtgtatcacaccagtgttaacgacatagcttcagactctgtcacacttcaaattcatagtaatctgtgtgatcccttccttccaagtgagcgaagaccttgtggcatggctggccgtcccaagtgtttgattacctaccttccaatcaccgtgagttgtcttttaccattttcaacatttgttgacagggtttgaaagtaaccggggagcgagacaggatttctaattgaataagattaaatatattttcatg

SEQ ID NO: 3341 - DNA, 2622 bp, Rattus norvegicus
  Genbank Accession No. NM_017322
tgtatgacactacatcatgagtgacagtaaaagcgatggccagttttacagtgtgcaagtggcagactcaactttcactgttctaaaacgttaccagcagttgaaaccaattggctctggagcccaaggaattgtttgtgctgcttttgatacagttcttggaataaatgttgctgtcaagaagttaagtcgtccttttcagaaccaaacgcatgcaaagagagcctaccgtgaacttgtcctcctaaagtgtgtcaatcataaaaatataattagcttgttaaatgtgttcacaccacaaaaaacgctagaagaattccaagatgtgtacttggttatggagttaatggacgctaacttatgtcaggttattcatatggagctggaccatgaaagaatgtcatacctcctctaccagatgctttgtggcattaagcacctgcattcagctggcataattcatagggatttgaagcctagcaacattgtagtaaaatcagactgtactctcaagatccttgactttggcctggcacggacagcctgtaccaactttatgatgactccctatgtggtaactcgctactatcgggctccagaagtcatcctgggcatgggctacaaggagaatgttgatatctggtcagtgggttgcatcatgggagagctggtgaaaggttgtgtgatattccaaggtactgaccatattgatcaatggaataaagttattgaacagctaggaacaccatccgcagagttcatgaagaaacttcagccaactgtaaggaattatgtggaaaacagaccaaagtaccctggaatcaaatttgaagagctctttccagattggatatttccgtcagaatccgaacgagacaaaataaaaacaagtcaagccagagatctgttatcgaaaatgttagtgattgatccggacaagcggatctctgtggacgaagccttgcgccacccgtatattactgtttggtatgaccccgctgaagcagaagcgccaccacctcaaatttatgatgcccagttggaagaaagagagcatgcgattgaagagtggaaagaactaatttacaaagaagtgatggactgggaagaaagaagcaagaatggggtgaaagaccagccttcagatgcagcagtaagcagcaaggctactccttctcagtcgtcatccatcaatgacatctcatccatgtccactgagcacaccctggcctcagacacagacagcagtctcgatgcctcaaccggacccctggaaggctgccgatgaaacctcgcagatggcgcacttgtctgtgaaggactctggcttccatggccctgagcacatgggagctggtggaacaaatcaagaagctccatgttctgcatgtaagaaacacgacgccttgcccccactcagttccagtaggattgcctgcgtagactgtaacatgaggcagacgatgtctggagaaaaagtacaaaccacactgttagaaattttgttcaagatcattcaggtgagcaattagaatagccgagttcttttcaagtcgtgtggtgtccttggtgacagatcatgtgtaactgtggggactcgtatgcatgtgaccacaaatgcttgcttgaacttgcccatgtagcactttgggaatcagtatttaaatgccaaataatcttccaggtagttctgcttctagaataatctcttaatcctctttagtaatttggtgtctgtccacaaaaaaatagattatgtgtgtatgaattggccactatcatattatcatattttacccacttttatggtatgatttattctgtcttttgtatttcagaaggaatataattaaatttatttaataaataaaactacagcttttcttaaatttgtgatgttttaggctgagaattaccactgctttatatcgacactctgtgtcctttaaactgcccactatgggaaactttacgtacagctttctgcatgacaaagttccaagttgtatttcactctgcttaacgacttatgtcaccttgaatcctgaccacacatttcctttttcttggtcctctgaacttggatctagaatccctcacagaacttcaccttctttatcacaaagcaccccatctcagtagaatgaatcggcagattcctgagccccgctgcctaatgtagagctgacagggtggcttccccagaacggtgggtgggtgcatccttccctgagcccacccatcctttgctcccctctctttatttaaggtgaaaggtgattgggtctcatagcctttccttttgtagcattgcctaacttgtctttctcactgacagaagccaccacgtccagccagagcacatggtctcttaggagaccgggcttacttaccatgcatgtttgctgctgtccttttccattttgtggaggcatttcctttttctaagggaattcctcagatgttctagaaacattcagaagaacgcagaagaaatattctagagaattgggggttcattcttgaatattttctgatttaaaactgctcacctgaaattgatactttcagatcctgatcttgtaaattactcgagatttggtaagatgctgagttctctgt

SEQ ID NO: 3342 - DNA, 1112 bp, Rattus norvegicus
  Genbank Accession No. NM_017326
ttagtccgagtggagcgagcgagtcgagtggttgtctgttctggtctcggaaaccggtagcccttgcagcatggctgaccaactgactgaagagcagatcgcagaattcaaagaagctttctccctatttgacaaggacggggatgggacaataacaaccaaggagctggggacggtgatgcggtctctggggcagaaccccacagaagcagagctgcaggacatgatcaatgaagtagatgccgacggtaatggcacaatcgacttccctgaatttctgacaatgatggcaagaaaaatgaaagacacagacagtgaagaagaaattagagaagcgttccgtgtgtttgataaggacggcaatggctacatcagtgcagcagagcttcgccacgtgatgacaaaccttggagagaagttaacagatgaagaggttgatgaaatgatcagggaagcagacatcgatggggatggtcaggtaaactacgaagagtttgtacaaatgatgacagcgaagtagagaccctgtacagaaggtgttaaatttcttgtacagaactgttaatttgccttttctctgtttgtaacttatctgtaaaaggttccccaattgtcagaacatgcatgtatagtaattaggattcattcttccatgttttttccctatcttctgtcattgtccttcaaccttattttagaaaagtgatcaagtaccatgttgcatgtggcttctctggatatatctaagccttctgcacatctacacttagatggagttggtcaaagggaacatctgggttatgaccttttttacagtagcttttaggaaccgtcggcatgttgctgttgaagtgtggagttgtgagcgtggactgtggacagtcgacagcgtgtactaagagttgcactactgcaagcgggtgttctgtccggtactcactcgtacactatttttttgtactgctggtattgtaccagaaacattttcttttattgttacttgctttttaaactttgtttagccacttaaggaagatctgcttatggcacaatttgcctcaaatccattccaagttgtatatttgttttccaataaaaaaaaatgacaattt

SEQ ID NO: 3343 - DNA, 9136 bp, Rattus norvegicus
  Genbank Accession No. NM_017332
agagacggcagcagcgtcccgtccagttcgcctgccgcgctcgcttgtcgtctgcctccagatcccagacagagaagagccatggaggaggtggtgatagccggtatgtccgggaaattgcccgagtcagagaacctgcaggagttctgggccaacctcattggcggtgtggacatggtcacagacgatgacaggaggtggaaggctgggctctatgggttgcctaagcggtctggaaagctgaaggatctgtccaagttcgacgcctccttttttggggtccaccccaagcaggcacacacaatggacccgcagctccggctgctgctggaagtcagctatgaagctattgtggacggaggtatcaacccggcctcactccgaggaacaaacactggtgtctgggtgggtgtgagtggttccgaggcgtcggaggccctgagcagagatcctgagactcttctgggctacagcatggtgggctgccagagagcaatgatggccaaccggctctctttcttcttcgacttcaaaggacccagcattgccctggacacagcctgctcctctagcctactggcactacagaatgcctatcaggctatccgcagtggggagtgccctgctgccattgtgggcgggatcaacctgctgctaaagcctaacacctctgtgcagttcatgaagctaggcatgctcagccccgatggcacctgcagatcctttgatgattcagggaacgggtattgccgtgctgaggctgtcgtggcagttctgctgactaagaagtccttggctcggcgagtctatgccactattctgaatgccgggacgaacacagatggctgcaaggagcaaggcgtgacattcccctctggagaagcccaggaacaactcatccgttctctgtatcagccgggcggtgtggcccccgagtctcttgaatatattgaagcccatggcacgggcaccaaggtgggggacccccaggaactgaacggcattactcggtccctgtgtgctttccgccagagccctttgttaattggctccaccaaatccaacatgggacaccctgagcctgcctcggggcttgcagccctgaccaaggtgctgttatccctagaaaatggggtttgggcccccaacctgcatttccacaaccccaaccctgaaatcccagcacttcttgatgggcggctgcaggtggtcgataggcccctgcctgttcgtggtggcatcgtgggcatcaactcgtttggcttcggaggtgccaatgttcacgtcatcctccagcccaacacacagcaggccccagcacctgccccacatgctgccctaccgcatttgctgcatgccagtggacggaccatggaggcagtgcagggcctgctggaacagggccgccagcacagtcaggacttggcctttgtgagcatgctcaatgacattgcagcaacccctacagcagccatgcccttcagaggttacactgtgttaggtgttgagggccatgtccaggaagtgcagcaagtgcctgccagccagcgcccactctggttcatctgctcagggatgggcacacagtggcgtggaatggggctgagccttatgcgcctggacagtttccgtgagtccatcctgcgctctgatgaggctctgaagcccttgggagtcaaagtgtcagacctgctgctgagcactgatgagcacacctttgatgacatcgtgcattcctttgtgagcctcaccgccatccagattgccctcatcgacctgctgacgtctatggggctgaaacctgatggcatcattgggcactccttgggagaggttgcctgtggctatgcagatggctgtctctcccagagagaggctgtgcttgcagcctactggagaggccagtgcattaaggatgccaaccttccggctggatccatggcagctgttggtttgtcctgggaagaatgtaaacaacgctgccctcctggtgtggtgcctgcctgccacaactctgaggacactgtgaccatctctggacctcaggctgcagtgaatgaatttgtggagcagctaaagcaagagggcgtgtttgccaaggaggtgcgaacaggtggcctggccttccactcctacttcatggaaggaattgcccccacgctgctgcaggctctcaagaaggtgatccgggagccacggccacgctcagcacgctggctcagcacctctatccctgaggcccagtggcagagcagcctggcccgcacatcttctgctgagtacaacgtcaacaacctggtgagccctgtgctcttccaggaagcactgtggcacgtccccgagcacgccgtggtgctggagattgcaccccatgcactgttgcaggctgtcctgaagcgaggcgtgaagcctagctgcaccatcatccccttgatgaagagggaccataaagataacttggagttcttcctcaccaacctcggcaaggtgcacctcacaggcatcgacatcaaccctaatgccttgttcccacctgtggaattcccggttccccgagggactcctctcatctcccctcacatcaagtgggaccacagtcagacttgggatatcccagttgctgaagacttccccaacggttccagctcctcctcagctacagtctacaacattgacgccagttccgagtcatctgaccactacctggtcgaccactgcattgacggccgtgtcctcttccctggcactggctacctgtacctggtgtggaagacactggctcgaagcctgagcttgtccctagaagagacccctgtggtgtttgagaacgtgacatttcatcaggccaccatcctgcccaggacaggaaccgtgcctctggaggtgcggctgctagaggcctcacatgcatttgaggtgtctgacagtggcaacctgatagtgagcgggaaagtgtaccagtgggaagaccctgactccaagttattcgaccacccagaagtcccgatccccgccgagtccgagtctgtctcccgcttgacgcagggagaagtatacaaggagctgcggctacgtggctatgactatggccctcatttccagggcgtctatgaggccaccctcgaaggtgagcaaggcaagctgctctggaaagacaactgggtgaccttcatggacacaatgctgcagatatccatcctgggcttcagcaagcagagtctgcagctacccacccgtgtgactgccatctatattgaccctgcaacccacctgcagaaggtgtacatgctggagggagacactcaagtggctgacgtgaccacgagccgctgtctgggcgtgaccgtctctggtggtgtctacatttcgagactacagacaacagcaacctcacggcggcagcaggaacagctggtccccaccctggagaagtttgtcttcacaccccatgtggagcctgagtgcctgtctgagagtgctatcctgcagaaagagctgcagctgtgcaagggtctggcaaaggctctgcagaccaaggccacccagcaagggctgaagatgacagtgcctgggctagaggaccttccccagcatggactgcctcgactcttggctgctgcctgccagctgcagctcaacgggaacctgcaactggagttaggtgaggtactggctcgagagaggctcctgctgccagaagaccctctgatcagtggcctccttaactcccaggccctcaaggcctgcatagacacagccctggagaacctgtctactctcaagatgaaggtggtggaggtgctggctggagaaggccacttgtattcccacatctcagcactgctcaacacccagcctatgctgcaactggagtatacagccaccgaccggcacccccaggccctgaaggatgttcagaccaagctgcagcagcatgatgtagcacagggccagtgggacccttctggtcctgctcctaccaacctgggtgctcttgaccttgtggtgtgcaactgtgcgttagccaccctgggggatccagccctggccctggacaacatggtagctgccctcaaggatggtggtttcctgctaatgcacacagtgctcaaaggacatgcccttggggaaaccctggcctgcctcccttctgaggtgcagcctgggcccagcttcttaagccaggaagagtgggagagcctgttctcaaggaaggcactgcacctggtgggccttaaaaagtcattctacggtactgcgctgttcctgtgccgccgtctcagcccacaggacaagcccatcttcctgcctgtggaggatactagtttccagtgggtggactctctgaagagcattctggccacatcctcctcccagcctgtgtggctaacagccatgaactgccccacctcaggtgtggtaggcttggtgaactgtctccgaaaagagccgggtggacaccggattcggtgtatcctgctgtccaacctcagcagcacatctcacgtccccaagctggaccctggctcttcagagctacagaaggtgctagagagtgatctggtgatgaacgtgtacagggacggtgcctggggtgccttccgtcacttccagttagagcaggacaagcccgaggagcagacagcacatgcctttgtaaacgtccttacccgaggggaccttgcctccatccgctgggtctcttctcccctgaaacacatgcagccgccctcgagctcaggagcacagctctgcactgtctactatgcctcactgaacttccgagatatcatgctggccacgggcaagctgtcccctgatgccattccaggtaaatgggccagccgggactgcatgcttggcatggagttctcaggccgtgataagtgcggccggcgtgtgatggggctggtacccgcagaaggcctggccacctcagtcctgttatcacccgacttcctctgggatgtaccctctagctggaccctggaggaggcggcttctgtgcctgttgtctacaccaccgcctactactccttagtagtgcgtggtcgtattcagcacggggaaactgtgctcattcactcgggctccggtggtgtgggccaagcggccatttccattgcccttagcctgggctgccgagtcttcaccactgtgggctccgctgagaagcgagcttacctccaggccagattccctcagctggatgacaccagctttgctaactctcgagacacatcgtttgagcagcatgtgttactgcacacaggtggcaaaggggtggacctggtcctcaactccctggcagaagagaagctgcaggccagtgtgcggtgcttggctcagcatggccgcttcctagagatcggcaaatttgatctttctaacaaccaccctctgggcatggccatcttcttgaagaacgtcactttccatgggatcctgctggatgcactttttgagggggccaacgacagctggcgggaggtggcagagctgctgaaggccggcatccgtgatggggttgtgaagcctctcaagtgtacagtgtttcccaaggcccaggtggaggacgccttccgatacatggctcaaggaaaacatattggcaaagtccttgtccaggtacgggaggaggagcccgaggctatgctgccaggggctcagcccaccctgatttccgccatctccaagaccttctgcccagagcataagagttacatcatcactggtggcctaggtggctttggcctggaactggcccggtggcttgtgcttcgtggggcccaaaggcttgtactaacttcccgatctggaatccgcacaggctaccaagccaagcacgttcgggagtggaggcgccagggcatccatgtgctagtgtcgacaagcaatgtcagttcactggagggggcccgtgctctcatcgctgaagccacaaagcttgggcccgttggaggtgtcttcaacctggccatggttttaagggatgccatgctggagaaccagactccagaactcttccaggatgtcaacaagcccaagtacaatggcaccctgaaccttgacagggcgacccgggaagcctgtcctgagctggactactttgtggccttctcctctgtaagctgcgggcgtggtaatgctggccaatccaactatggcttcgccaactctaccatggagcgtatttgcgaacagcgccggcacgatggcctcccaggtcttgccgtgcaatggggtgccattggtgacgtgggcattatcttggaagcgatgggtaccaatgacacagtcgttggcggcacactgccacagcgcatctcctcctgcatggaggtgctggacctcttcctgaatcagccccacgcagtcctgagcagttttgtgctggttgagaagaaagctgtggcccatggtgatggtgaagcccagagggatctggtgaaagcagtggcacacatcctaggcatccgcgacctcgcagggattaacctggacagctcgctggcagacctcggcctggactcgctcatgggtgtggaagtgcgccagatcctggaacgtgaacatgatctggtgctacccattcgtgaagtacggcaactcacactgcggaagcttcaggaaatgtcctccaaggctggctcagacactgagttggcagcccccaagtccaagaatgatacatccctgaagcaggcccagctgaatctgagtatcctgctggtgaaccctgagggccctaccttaacacgactcaactcagtgcagagctctgagcggcctctgttcctggtgcaccccattgaaggttccatcactgtgttccacagcctggctgccaagctcagtgtgcccacctacggtctgcagtgcacccaagcggcccccctggacagcattccaaacctggctgcctactacattgattgcatcaagcaggtgcagcctgaggggccccaccgagtggctgggtattcttttggagcttgtgtagccttcgagatgtgctcccagctgcaggcccagcagggcccagcccccgcccacaacaacctcttcttgtttgatggctcacacacctacgtattggcgtacacccagagctaccgggcaaagctgaccccaggctgtgaggctgaggctgaagctgaagccatatgcttcttcattaagcagtttgttgatgcagagcatagcaaggtgctagaggccctgctaccactgaagagcctggaggaccgggttgctgctgctgtggacctcatcactagaagccaccagagcctggaccgccgtgacctgagctttgctgccgtgtccttctactacaagcttcgagccgccgaccagtataaacccaaggccaagtaccacggcaatgtgatcctgctgcgggccaagacaggtggcacctacggcgaggacttgggtgccgattacaacctgtcccaggtgtgtgatgggaaggtgtctgtgcacatcattgagggtgaccatcgtacgctgctggagggcaggggcctggagtctatcatcaacatcatccacagctccctggctgagcctcgagtgagtgtacgggagggctagacctgcctaccatgaagccacgacccacaccggccaccagagatgctccgatccccatcacaccctgagtgcagggactggggagggtcctgctggtgggaccccctcaccccagtggcccagcaccaccccctcccctggtggctgctacaaacaggaccatcacatgtgtcccagccacttagtggggttcccagagccactgacttggaggcaccctggtctgtgaagagtcagtggaggccagcaagagccaaactgagccttttctgccaagtgacatttgtcacactggttgtttctccattaaattctcatatttattgcattgctgggaaagaccgcccaccccagggttaactcattccagaacccctaaagtgggaaaagccatgtggggaaggctgctggctggagcccctttttgtcttagccctgtacccgctcactgcagggcagggtatggagagggctggttcccggggaacgaggaccccagcagacactgtagcccatggcccttggtccccagcactcccggctgcacccatgatgcagggcctaccagactctgcggaccgcaccgggcactcactgtatttgttttccaagattcaaattgctgcttgggttttgaatttactgcagctgtcagtgtaaagaaacatgtctgaactgtgtcctttttacaccaacctggtaaaaatgctcttgatgctgtcccgttgccacaattaaactgcacgtgagctctggcttccgttcagtctctttccagtcccagacctgagtccccagagcctccacagctcttacagtgagaatcaaattggcccactccttggaaggcgtggcattctgtcagagtaaaaggaaagtagagtgtgctgattcacgttcagcgtgtggggctggctagagaccttggcactgtagtgaacagaatgtgtccacctttaagtcaccctgaaggcatcaccatagctacagcctcacccaggggtagagaatagtactgtctacttgttgactacctggcagttggtgccagcccctatagaggaaaacagcagtgtgtggccactgtgagaagcatatccctggaaacaggtgaccagagcagagggctaatgcctacctgagtcacacaaaactgaccaggcttgagtgtccagaagagtctatcagaaggccacagcattcagtcctatccacagagagcagcagactaagttgtctccttgccagcttagaaaactgcagtgctggggtacaggtagggtgttcaggaggtccgggccccagtgattagtctaagactgaagcatctggttggctgtggtcccacctagaaaattcttaaagctcttgtcatgtacttcctgggaaggacctaccctgtctcaataatgtctctagctcgttggagtctactgactcaaacatttataaagtgtcctagaaaggcctgactcccctacaaggctgtgtgatccttcaaactcacatatgtgagccaataaaaccttgagactct

SEQ ID NO: 3344 - DNA, 436 bp, Rattus norvegicus
  Genbank Accession No. NM_017334
actttattttggactgtggtacggccaacaagaccactctgtatgcaaaagcccaacatggctgtaactggagatgaaactgatgaggagactgaccttgccccaagtcacatggctgctgccacaggtgacatgccaacttaccagatccgagctcctactactgctttgccacaaggtgtggtgatggctgcctcaccaggaagcctgcacagtccccagcaactagcagaagaagcaactcgcaagcgggagctgaggctgatgaaaaacagggaagctgctaaagaatgtcgacgtcgaaagaaagagtatgtcaagtgtcttgagagtcgagtcgcagtgctggaagttcagaacaagaagcttatagaggagcttgaaactttgaaagacatttgctctcccaaaacagattagtagaaatatttaacta

SEQ ID NO: 3345 - DNA, 3741 bp, Rattus norvegicus
  Genbank Accession No. NM_017340
acacgggtcgttgctttggtgtctgtcacttctgtcgccacctcctctgccaacaccaacactgacctccgtcatgaaccccgacctgcgcaaggagcgggcctccgccaccttcaatccggagttgatcacgcacatcttggatggcagtccggagaatacccggcgccgtcgagaaattgagaacttgattctgaacgacccagacttccagcatgaggactataacttcctcactcgaagccagcgttatgaggtggctgttaagaagagtgccaccatggtgaagaagatgagggaatatggcatctcggaccctgaagaaatcatgtggtttaaaaaactatatttggccaattttgtggaacctgttggcctcaattactccatgtttattcctaccttgctgaatcagggcaccactgctcagcaggagaaatggatgcgcccgtcccaagaactccagataattggcacctacgcccagacggagatgggccacggaactcatcttcgaggcttggaaaccactgccacatatgaccccaagacccaagagttcattctcaacagccctactgtgacttccattaagtggtggcctgggggacttgggaaaacttccaatcacgcaatagttctggctcagctcatcactcaaggagagtgctacgggttacatgcctttgttgtccctatccgtgaaattgggacccacaagcccttgccaggcatcactgtcggggatatcggtcccaaatttggttatgaagagatggataacggctacctgaagatggacaattaccgtattcccagagagaacatgctgatgaaatacgcccaggtgaagcctgatggcacatatgtaaagcctttgagtaacaagctgacgtatgggaccatggtttttgtgaggtccttcctcgtgggaaatgcagctcagagtctgtccaaggcttgcacaatcgccatacgatacagcgctgtgaggcgccagtctgaaatcaagcaaagcgaaccagaaccacagattttggattttcaaacccagcagtataaactcttcccgctcctggccactgcctatgccttccacttcgtaggaaggtacatgaaggagacctaccttcgaattaatgagagcattggccaaggggacctgagtgaactgcctgagcttcacgccctcactgctgggctgaaggcttttactacttggacagccaatgctggcatcgaagaatgtcgaatggcctgcggcgggcacggctattctcacagcagtgggattccaaatatttacgtcacttttaccccggcctgcaccttcgagggagagaacactgttatgatgctgcagacagccaggttcttgatgaaaatctatgaccaggtgcggtcggggaagttggtgggtggtatggtgtcatacctgaatgacctgccgagtcagcggatccagccacagcaggtggcagtctggccaactatggtggacatcaacagcctggagggcctgacagaagcctacaagcttcgtgcagccagattggtagaaatcgctgcaaaaaaccttcagactcacgtgagtcacaggaagagcaaggaagtagcatggaacctaacctctgtcgaccttgttcgggcaagtgaggcgcattgccactacgtggtcgttaaggtcttctcagacaaactccccaagattcaagacaaagccgtccaagctgtgctgaggaacctgtgtctcttgtattctctctatgggatcagccagaaaggaggggactttcttgaggggagcatcatcacaggggctcagctgtcacaagtaaacgctcggatcctggagctgctcaccctgatccgccccaatgctgttgctctggtggatgcctttgactttaaggacatgacacttggctctgttcttggccgctatgatggaaatgtgtatgaaaacttgtttgagtgggccaagaaatccccactgaacaaaacagaggtccatgaatcttaccacaagcacttgaagcccctgcagtccaagctttgaagtttccctgggacacgtctgagctccacaagcagcagaaactctctcctctactcactaatccttgtgaaatcgtcatcaaatttgtgtagctacagagcaaatgatgggtttcttttcctccctataagtaaagagaaatgaacagactttagagattaaatgagaaattcggtgttgtaagtgcagtaatgcagacagagacgtaggaactcagaaagcttcagagctgtggtctgacttgcatttgtactgctgctaatctcagtaggccttgactctggagaattaacagagttttaactacaaatacttacttattttcacatttttactgctaatcactggatatatgttttttaaacaaaagtgttatatagagtggaattttccaggcattcgtgcctaccactttctgatctactgctaagagcaggagtttgggggccagaaactaatagaaaccttgatgtgggtgtgtggctgtcacacaggccgctgctgcctgccatgtgggtgtgtcacccctattaactgtcacattaacatagtcaacaagaggactccttcaacacccacccaccaagaaaccagagttcccgatgggcacaagcacccactccaggctcagccttcgtggtagtggcactactgtgcctttgaccccactttttgacacagttaagttacttgtcttacctccaggctttcagccattgcctggatttcagtcatggtggctgaccttccctttcttgcttgccttccttctcctgaaagagataaaagagatagtagtcagcctctcctcatagattaagtatatggagagccctcagctatggtattactgtattttggtgactttgttaagtaaatttcctgggacaatcctgatttgaaagattctgtattctgttgcacaagctattaaaatgctcagtggtcaccaaagtatttcacacacacacactcacaaatcactcaggtcaccttttacactagaaataacaggaaagccctggccacagccatctgctgagagtgttagttgagatgtttcgttgaagatggctgaagaaagtgcaggccctggggagtttctccttgctgagagccggctctgtggtgagcccctagcagccttacgaggcggtgaaacggccccttcagatgggagcagcctctacaatcattctgagcttaaaggtgaaatatgcaccttttgtcctataaatgtcctataaatgcttggggggaggggtaatgttttgttttttttttcttgaaacagagcccagaatggccttgaactctgatcctcacagcctggtaaatgctgggcctacaggtgtgcgccgacatgtctggctgatcggagctctttattcttaaaagcacagtagggagatgattgtaacattaagtctgtgtctgtggcattcgcattgtgagagcagttccttagaacagttctgagagcacagcatcaatgtagtgaaaacgatgtcgacgcctgacatgaaatcacaaccctccgggtcatcgacacaagccttaacctttctcctggaatgactggtaatcccttaagattgacagtacacagcatgtcaccttgttggggtttctattgacagtaattcatattctggaaaggaactaataaatataaatgaccg

SEQ ID NO: 3346 - DNA, 1139 bp, Rattus norvegicus
  Genbank Accession No. NM_017343
agatttgaaccgccaccatgtcgagcaaaaaagcaaagaccaagaccaccaaaaagcgccctcagcgcgcaacgtccaacgtgttcgccatgtttgaccagtcccagatccaggagttcaaagaggccttcaacatgatcgaccagaaccgggacggcttcattgacaaggaggacctacacgacatgctcgcgtctctggggaagaaccccaccgacgcctacctggacgccatgatgaacgaggccccgggccgcatcaatttcaccatgttcctcaccatgtttggagagaagctgaacggcaccgacccagaggacgtcatcagaaacgccttcgcttgcttcgatgaggaagccacaggcaccatccaggaggattacctgagggagctgctgaccaccatgggtgaccgcttcacagatgaggaagtggatgagctgtacagggaggcccccatcgacaaaaagggcaatttcaactacatcgagttcacgcgcatcctcaagcacggagcgaaagacaaagatgactgaagaggctgcagctgacattcctgttgagtttccttattcacttcatgtctcagacacagcccccataggacctactgtgtgccactttgtgtccctcagacaccccctcccataggcctactgtgtgccgcttagtccctcagacaccccctcccataggcctactgtgtgccacttagtccctcagacaccccctcccataggcctactgtgtgccatttgtccctcagacaccccctcccataggacctactgtgtaccacttggtttctcagacagccccacccccaaacccccctaaggacctactgcgggccacttagtttcacagcctttcctttttttaatgtatttattccagaccctttctgccacttagcatgtgtataatcagactggaatggggacaatgttgtaattgtactgaaaatgagatgcaaataaaaaaatcaaccaatgtgaaagcccaggaaaatatatcggcatttctggttttgctggatttttttacatttttatataataaaaatgttattttgaaataaagattatgctgactcaaggtggagtataaaacaaaaaaaaaaaaaaaaaaaaaaaaaa

SEQ ID NO: 3347 - DNA, 2155 bp, Rattus norvegicus
  Genbank Accession No. NM_017344
gggcacgccggagcccgaacggcgcagcctggaagaggccggagcccaagggaggcggcggtagaggcagcggcgggggcagcccaggcagcccgagccccgcggcctgggcctgcgctcggcgccatgagcggcggcgggccttcgggaggtggccctgggggctcgggccgggcgcggaccagctcgttcgcggagccaggcggcggaggcggaggcggtggcggcggccccgggggctcggcctccggcccaggaggcactggcggcgggaaggcgtcagtcggggctatgggtgggggcgtgggagcctcgagctctgggggtggccccagcggcagcggcggaggaggcagcggtggccccggcgcgggcactagcttcccgccgcccggagtgaagctgggccgtgacagcgggaaggtgaccacagtggtagccactctaggccaaggcccagagcgttcccaagaggtggcttacaccgacatcaaagtgattggcaatggctcattcggagtagtgtaccaggcacggctggcagaaacgagggaactggtggccatcaagaaggttcttcaggacaaaaggttcaagaaccgagagctgcagattatgcgtaagctggaccactgcaatatcgtgaggctgcggtactttttctactccagtggggagaagaaagatgagctgtatttaaatctggtgctggaatatgtgcccgagaccgtgtaccgagtggcccgtcactttaccaaggccaagttgatcatccctatcatctatgtcaaggtgtacatgtaccagctcttccggagcttggcctacatccactcccaaggtgtgtgtcaccgtgacatcaagccccagaatttgcttgtggaccctgacactgctgtcctcaagctctgcgactttggcagtgcaaagcagttggttcggggggagcccaacgtgtcctacatctgttctcggtactaccgtgctccggagctcatctttggagccacagattacacctcgtccatcgatgtgtggtcagctggctgtgtactggctgagctgcttcttggccagcccatcttccctggggacagtggggtagaccagcttgtggagatcatcaaggtactagggacgccaaccagggagcaaatccgagagatgaaccctaactacacagaattcaagttcccccagatcaaagctcacccctggacaaaggtgttcaaatctcggacaccacctgaggccatcgcactctgctctagcctgctggagtacactccatcctcaaggctctccccactagaggcctgtgcccacagtttctttgatgaactgcggagtctcggaacccagctccccaacaaccgcccgcttccccccctcttcaacttcagtcctggtgaactttccatccaaccgtctctcaatgccattctcatccctcctcacttgaggtccccatcaggccctgctaccctcacctcgtcctcacaagctttaactgagactcagactggccaagactggcaggcacctgatgccacacctaccctcactaactcttcctgagggccctaccgactacccctcacgctcactcggaaggctcaagtgggctggaaagggccatagcccatccagctcctgcctgctggccctagactgagggcagaggtaaatgaactacccagcatctaggcctccctcaccagcctcaccttgtggtggcttttaaagaggatttaactgtttgtgggggagggaagggaagagaaggacggacggggtttggggtatgaggaccttctacccccgtggtcccctcccctcccccaggctaccactcctcccccccctcccatgtcccttgtaaatagaaccagcccagccgtatcctcttcctggcccttgggtgtaaatagattgttataatttttttcttaaagaaaacgtcgattcacaccatccaacctgccctccccctcagctgtacccccctcttgtcctctgctcccaaggcttcctccctctccccatcccaaggaggggagtagggagagcccctggtgtcttagtttccacagtaaggtttgcctgtgtacagacctccgttcaataaattattggcatgaaaaaaaaaaaaaaa

SEQ ID NO: 3348 - DNA, 2733 bp, Rattus norvegicus
  Genbank Accession No. NM_017362
taggcaagcactctactgttgaataaatcccaaccccacaattgaatttttatactcaagtaccaatacttgttcattaggcagaagaattttgcaatgataaaattatatacatgtattgctatactgttatccaatgcattgatgtgtgcatatatatttttagagtgctatatccaaatttattctgccttctaccttatacttaactatttcaacactatcaatagttttgataataaattaagtaattttctaagtgggagaaaaaagacttaacaagtcggcattttgctctgcatacatttcataattctgttagcaatgatgagccctgaatatgagtggaactgacccatttatgtttcttccaggggattccgaaagaaaggaaatgcttaacctctgcagacaggagactgaaggacggaaagttgataagggaaaagccaagggaagcagaaggtgttaaagaatacccacgcttctggaacacacaacagtgttacagcagcgtgatctggagatgctggagactctaaattacaggtgagcagaacttttcagaggctgaaacatctacaagagcaatcaggatttctcactgctgagataaccaatgaatttttaataagttctgagctctgtggtcagatcaatggctgttatccgataaagacaaattttaccctttgatttccataatcctgtccgaatggaatcttcaccttgctgctacctgtgctaactaatgccacgggattaccgtgcctcagagatgctgcaaaaaataagacacatgggtgaaagagatcaccacagcaaagtcgatgaggcatttccagtgagagtttacccttcctcgctgagcttctaccaactcctgccagatattggccaagaagaggggaggccaaacatagagcagctccaaaccttggtctaaatctgaagtgtaatttcctgagccaggatggaaggggagtcttacaatgaaagcactgtcaacggcaccccggtaaatcaccaggctttggaacgccatggactgtgggaagtcattactattgcagttgtgactgcggtggtcagcctgatgaccattgtcggcaatgtcttggtcatgatctccttcaaagtcaacagtcagctcaagacagttaacaactactacctgctcagcttggcctgtgcagacctcatcattggcatcttctccatgaacctctacacgacctacatcctcatgggacgctgggttctcgggagtctggcttgtgacctttggctggcactcgactatgtagccagcaatgcttctgtcatgaaccttctggtgattagttttgatcgttacttttccatcacaagaccactgacgtaccgggccaagcgtaccccaaagagggctggcatcatgattggcttagcatggctggtctccttcatcctctgggcgccagccatcctctgctggcagtacttggtcgggaagcggacagtaccacctgatgagtgccagatccagttcctctctgaacccaccatcacttttgggactgccattgctgccttctacatccctgtctccgtcatgaccatactctactgccggatctaccgggagacagagaagcgaaccaaggacctggctgacctccaaggttctgattctgtggcagaagccaagaagagagagccagctcaaaggaccctgctcagatctttctttagctgccctagacccagcctggcccagagagaaaggaatcaggcctcctggtcatcctcccgtagaagcacctcaacaacaggaaagacaacccaggccactgacctaagtgctgactgggaaaaggctgagcaggttactacctgtagcagctacccctcttcagaggatgaagccaagcccaccactgaccctgtctttcaaatggtctacaagagtgaggccaaggaaagcccggggaaggaatccaatacccaagagaccaaggaaacagttgtgaacacccggactgaaaacagtgactatgacactcccaaatactttctgtctccagctgctgctcacagactcaagagtcagaagtgtgttgcctataagttccgattggtggtaaaagccgatgggacccaggagactaacaatggctgtcgaaaggtgaaaatcatgccctgttccttcccagtgtccaaagacccttcaacaaaaggtccggatcccaacctcagtcatcaaatgaccaaacgaaagagaatggttctggtcaaagagaggaaagcggctcagaccttgagtgccattctcctggccttcatcatcacatggaccccttataacatcatggtcctggtttccaccttctgtgacaagtgtgtccccgtcaccctgtggcacttgggttactggctgtgctatgtcaacagcaccatcaaccccatctgctatgctctctgcaacagaactttcaggaaaacctttaagctgcttcttctctgccggtggaaaaagaaaaaagtagaagagaaattgtattggcaaggaaacagcaagctaccctgaaaccttagcacctcccctggaaagaataatgatcaccgtctggtttgcttgtttaaagaacgtcatctgctgttctgagtccttgaaggcttgtcaaggtgcaaaatcttctgtcaaatgaagagtcgtcacacatgcacctgccatgtgcggtgagtcttgac

SEQ ID NO: 3349 - DNA, 3465 bp, Rattus norvegicus
  Genbank Accession No. NM_019124
acgctgcttccccgcccatccccgttctccaggccgcccactggccatggcgcagccgggcccggctccccagcctgacgtttctcttcagcaacgggtagcagaattggaaaaaattaatgcagaatttttacgtgcacagcagcagcttgagcaagaatttaatcaaaagagagcaaaatttaaggagctgtatttggctaaagaggaggatctgaagcggcaaaatgcagtattgcaagctgcgcaggatgacttgggtcaccttcggacacagctgtgggaggcgcaggcagaaatggagaatatcaaggcgatcgccacagtctctgagaacactaagcaagaagctatagatgaagttaaaaggcagtggagagaagaagttgcttcacttcaggctgtaatgaaagagactgtgcgtgactatgagcatcagtttcacctgaggctggagcaggaacgagcgcagtgggcacagtatcgagagtctgcagaccgggagatagctgacctaagaagaaggttgtctgaaggtcaagaggaagaaaatttagaaaatgaaatgaaaaaggcccaagaggatgccgagaagcttcgctctgtcgtgatgcccatggagaaggaaattgcagccctgaaagataaactgacagaagctgaagacaagattaaagagctggaggcctcaaaggttaaggaactgaatcattatctggaggccgagaagtcttgcaggactgatctggagatgtatgtagctgttttgaacacccagaaatctgttctacaggaagatgctgagaaattgaggaaagaactgcatgaagtttgccatctcttggagcaagagcgacaacaacacaaccagttaaaacacacgtggcagaaggccaacgaccagtttttggaatctcagcgcttgctgatgagagacatgcagcgaatggagatcgtgttaacttcagaacagctacgacaagttgaagaactgaagaagaaagatcaggaggaggatgaacaacaaaggatcaataagggaaaagataacaagaaaatagacactgaagaagaagtaaaaataccagtagtatgtgctttaactcaagaagaatcttcaaccccactatcaaatgaagaggagcatttagacagcacccatgggtcagtccattccttagatgcagacttgctgttaccatctggagatccattcagtaaatcggacaatgacatgtttaaagagggactccggagagctcagtctacagacagcttgggaacctcaagctcattgcaatccaaagctttaggctataactacaaagcaaaatctgctggaaatttggatgagtcggattttggaccactggttggagcagattctgtgtctgagaactttgatactgtgtcccttgggtcactgcagatgccaagtggatttatgttaaccaaagatcaagaaagagcaattaaggcaatgacacctgaacaggaggagacagcatccctcctctcaagtgtcacacagggtatggagagtgcatatgtctctcctagtggttaccgcttagtgagtgaaacggaatggaatctcctgcagaaagaggtacataatgctggaaataagcttggtagacgttgtgatatgtgttccaattatgaaaaacagttacaaggaattcagattcaggaagctgagacaagagaccaggtgaaaaaactgcagttaatgctcaggcaagctaatgaccagctagagaagacaatgaaagagaaacaggagctagaggacttcctcaggcagagtgccgaggactcaagccaccagatatctgcacttgttttaagagcccaagcctctgaggtattacttgaagagttacaacagagtttttcccaagcaaagagggatgttcaggagcagatggcagtgctgatgcagtcacgtgaacaggtctcagaagagctggtgaggttacagaaagacaatgacagcctccagggaaagcatagcttgcatgtgtcattacaactagcagaagacttcattcttccagatactgtgcaggtgctccgggaactggttttaaaatatcgtgagaacattgttcatgtgcggacagcagcagaccacatggaagagaagctgaaggctgaaatactttttctaaaagagcaaattcaggcggaacagtgtttaaaagaaaaccttgaagagacattacagctggaaattgaaaactgcaaggaggaaatagcttccatttctagtctaaaagctgaattagaaagaataaaagttgaaaagggacagttggaatctacattaagagagaagtcgcaacaacttgagagcctccaagaaataaaagttaatttagaggaacagttaaagaaggaaactgctgctaaggccactgttgaacagctcatgtttgaagagaagaacaaagctcagaggttgcagacagaattagatgtcagtgaacaagtccagagagattttgtaaaactttctcagactcttcaggtgcagttagagaggatccggcaagcagactccctggagaggatccgggcaattctgaatgataccaaactgacagacattaaccagctccctgagacatgacaccctgatggcaggattctgacctgcattttgggtttttaactcatctttagaataacattaattattatttaactcttaatggaagaagtcacagcaaaaggaggactggagaaatgcagttctggagggagaaggctgctgtgtgcagggacagccaacagacgtttcaaagggaacactaatgagacactggactcgattccaacaggcgtgggatcagattgggtgccagaaaagtgctgtttccttgcctgcttcctccagcgtggactctggaacataattcctgccatgaaagcaacttcccaatagtgtttggaattacgttttctgttcatacaaactgggagagaaaagtttctttctcctgtggtctggggctcatcagtagcagtgttcagctagcagagaggtgtagtgcgctgtgtgagtattttatattaaaatgtggagtgagagcaggccattggctattgattgtgtttcccttgttcaatgcattttgtttcctttttaaccattccttctattggaagaccttaaatgctattgtaacttgcttgagaactataggaccatggcaaacaaaagcaattaaaattaggagaatctgaatctttggctgaggccaatatatattatatatatatcaatttatggaaaaaaagcacaaataaccttggaagcactttgtctgcacaccatgatgaacttcctgggcccaaaggtaccagggcaaataactggcaccatctaccctttcgaagtgttttagttactggatcagtggaaaataatactaataaaacaagctatctcttacatct

SEQ ID NO: 3350 - DNA, 333 bp, Rattus norvegicus
  Genbank Accession No. NM_019129
atggccctgtggatgcgcttcctgcccctgctggccctgctcgtcctctgggagcccaagcctgcccaggcttttgtcaaacagcacctttgtggtcctcacctggtggaggctctgtacctggtgtgtggggaacgtggtttcttctacacacccaagtcccgtcgtgaagtggaggacccgcaagtgccacaactggagctgggtggaggcccggaggccggggatcttcagaccttggcactggaggttgcccggcagaagcgtggcattgtggatcagtgctgcaccagcatctgctccctctaccaactggagaactactgcaactga

SEQ ID NO: 3351 - DNA, 333 bp, Rattus norvegicus
  Genbank Accession No. NM_019130
atggccctgtggatccgcttcctgcccctgctggccctgctcatcctctgggagccccgccctgcccaggcttttgtcaaacagcacctttgtggttctcacttggtggaagctctctacctggtgtgtggggagcgtggattcttctacacacccatgtcccgccgcgaagtggaggacccacaagtggcacaactggagctgggtggaggcccgggggccggtgaccttcagaccttggcactggaggtggcccggcagaagcgcggcatcgtggatcagtgctgcaccagcatctgctctctctaccaactggagaactactgcaactag

SEQ ID NO: 3352 - DNA, 1004 bp, Rattus norvegicus
  Genbank Accession No. NM_019131
cttagccgcagggggcgccggcgttgcaaagcgggcctgggcgggacgaaccggacctggctccgtaactgcaggagcccagcagtagcagctgcagagcgcggaggcagagcacagcctcagccgccgcctcgccatggcgggtagcagctcgctggaggcggtgcggagaaagatccggagcctgcaggaacaggcagatgccgcggaggagcgtgcgggcagcctgcagcgagagctggaccaggagcggaagctgcgggaaaccgctgaagctgacgtagcatctctgaacagacgcatccagctggttgaggaggagttggatcgcgctcaggagcgtctggccacagctctacagaagctggaggaggctgagaaggctgcagatgagagtgagagaggcatgaaagtcattgaaagccgagcccaaaaagatgaagaaaagatggagattcaggagatccagctgaaagaggccaagcacattgctgaagatgctgaccgaaagtatgaagaggtggcccgtaagctggtcatcatcgagagcgatctggagcgtgcggaggagagggctgagctctcggaaggcaaatgtgccgagcttgaagaagagttgaaaacggtgacgaacaacttgaagtcactggaggctcaggctgagaagtactctcagaaagaagacaagtatgaagaggagatcaaggttctctctgacaagctgaaggaggctgagacccgggctgagtttgcagagagatcagtaaccaaattggagaaaagcattgatgacttagaagataagtttctttgcttctctcctcccaagactccttcatcaagccggatgtcccacctctctgagctctgcatctgtctgctctccagctgacccaggtttctttctagtgcccacccaccctagggccaggcacagaccgtgctttctattgtacagaggtgatcctcccagtgtaaaataaacactgtacgctagtcctgtt

SEQ ID NO: 3353 - DNA, 1738 bp, Rattus norvegicus
  Genbank Accession No. NM_019132
gcagcagcagctcccgcggctcctgctctgctccgcctcggccccggagcgaggggcggagagccgcgcgcttgccttagtccgagccgccaccctccccgcgttccccgctttcccggcccgcccgaggccgcccgccccgtccccgccgccccgcagcccggccgcgccccgccgccgccatgggctgcctcggcaacagtaagaccgaggaccagcgcaacgaggagaaggcgcagcgcgaggccaacaaaaagatcgagaagcagctgcagaaggacaagcaggtctaccgggccacgcaccgcctgctgctgctgggtgctggagagtctggcaaaagcaccattgtgaagcagatgaggatcctacatgttaatgggtttaacggagagggcggcgaagaggacccgcaggctgcaaggagcaacagcgatggtgagaaggccaccaaagtgcaggacatcaaaaacaacctgaaggaggccattgaaaccattgtggccgccatgagcaacctggtgccccccgtggagctggccaaccctgagaaccagttcagagtggactacattctgagcgtgatgaacgtgccaaactttgacttcccacctgaattctatgagcatgccaaggctctgtgggaggatgagggagttcgtgcctgctacgagcgctccaacgagtaccagctgatcgactgtgcccagtacttcctggacaagattgatgtgatcaagcaggccgactacgtgccaagtgaccaggacctgcttcgctgccgcgtcctgacctctggaatctttgagaccaagttccaggtggacaaagtcaacttccacatgttcgatgtgggcggccagcgcgatgaacgccgcaagtggatccagtgcttcaatgatgtgactgccatcatcttcgtggtggccagcagcagctacaacatggtcatccgggaggacaaccagaccaaccgtctgcaggaggctctgaacctcttcaagagcatctggaacaacagatggctgcgtaccatctctgtgatcctcttcctcaacaagcaagatctgcttgctgagaaggtcctcgctgggaaatcgaagattgaggactactttccagagttcgctcgctacaccactcctgaggatgcgactcccgagcccggagaggacccacgcgtgacccgggccaagtacttcatccgggatgagtttctgagaatcagcactgctagtggagatggacgtcactactgctaccctcactttacctgcgccgtggacactgagaacatccgccgtgtcttcaacgactgccgtgacatcatccagcgcatgcatcttcgccaatacgagctgctctaagaagggaacgcccaaatttaattcagccttaagcacaattaattaagagtgaaacgcaatcgtacaagcagttgatcacccaccatagggcatgatcaacaccgcaacctttcccttttctccccagtgattctgaaaaccccctcttcccttcagcttgcttagatgttccaaatttagtaagcttaaggcggcctacagaagaaaaagaaaaagaaaaaggccacaaaagttccctctcactttcagtaaataaaataaaagcagcaacaaacagaaataaagaaataaatgaaataaatgaaactcaaaatgaaataaatattgtgttgtgcagcattaaaaaatcaaaataaaaattaaaaatgagc

SEQ ID NO: 3354 - DNA, 2400 bp, Rattus norvegicus
  Genbank Accession No. NM_019133
gtcgtcctgagccccttgcgctccgcccccgcggcccaccgacccactgccccttggatcccctgccccaagctgccaccatgaactacctgcggcgccgcctgtcggacagcaacttcatggccaatctgcctaatgggtatatgacagacctgcagcgcccgcaaccacctccgccgccgccctcagccgccagcccaggggccactcccggatccgctgctgcctctgctgagagggcctccacagctgctccagtggcctctccagcagcccctagtcccgggtcctcggggggcggtggcttcttctcctcgctgtctaacgcggtcaaacagaccacagcagctgcagccgccaccttcagtgagcaggtgggcggtggctctgggggcgcaggccgcgggggcgccgccgccagggtgctgctggtcatcgacgagccgcacaccgactgggcaaaatacttcaaagggaagaagatccatggagaaattgacattaaagtagagcaagctgaattctccgatctcaatcttgtggctcatgccaatggtggattctccgtggacatggaagttcttcggaatggggtcaaagttgtgaggtctctgaagccagactttgtgctgatccgccagcatgccttcagcatggcacgtaatggagactaccgcagtttggtcattgggctgcagtatgctgggatccccagtgttaactctttgcattctgtctacaacttttgtgacaaaccctgggtgtttgcccagatggttcgactacacaagaagcttggaacagaggaattccctctgattgatcagactttctatcccaatcataaagagatgctcagcagcacaacataccctgtagttgtgaagatgggccacgcacactctgggatgggcaaggtcaaggtagacaaccaacatgacttccaggatattgcaagtgttgtggcactgactaagacatatgccactgctgagcccttcattgatgctaaatacgatgtgcgtgtccagaagattgggcagaactacaaggcctacatgaggacatcagtgtcagggaactggaagaccaatacaggctctgctatgcttgagcagattgctatgtctgacaggtacaagttgtgggtagacacgtgctcagagatttttgggggacttgacatctgcgcagtggaagcactgcatggcaaggacggaagggatcacattattgaggtggtgggctcctccatgccactcattggggatcaccaggatgaagacaagcagctcatcgtggaacttgtggtcaacaagatgactcaggctctgcctcggcagcgggatgcttcccctggcaggggttcccacagccagactccatccccaggagccctgcccttgggccgccagacctcccagcagcctgcaggacctcctgctcaacaacgacccccaccccagggaggccctccacaaccaggcccaggacctcagcgccagggacccccgctgcaacagcgcccacccccacaaggccagcaacatctttctggccttggacccccagctggcagccctctgccccagcgcctaccaagtcccacagcagcacctcagcagtccgcctctcaggccacaccaatgacccagggtcaaggccgccagtcacggccagtggcaggaggccccggagcacctccagcagcccgcccgccggcctccccatctccacagcgtcaggcagggcccccacaggctacccgtcaggcatctatctctggtccagctccaccgaaggtctcaggagcctcacccggagggcagcagcgccaaggccctccccagaaacccccaggccctgctggtcccattcgtcaggccagccaggcaggtcccggacctcgcactgggccacccaccacacagcagccccggcccagcggcccaggtcctgctggacgtcccaccaaaccacagctggctcagaaacccagccaggatgtgccaccacccatcattgctgctgccgggggacccccgcacccccagctcaacaaatcccagtctctgaccaatgccttcaaccttccagagccagccccgcccaggcccagccttagccaggatgaggtgaaagctgagaccatccgcagcctgaggaagtctttcgccagcctcttctccgactgacacctactctgagaaccctaaacccctagacaacccgtctctgggtcctgagtccatttctcacctttggaatctccaaatcccttgagaacccctctctcctggttctacatcccacttctcattcctcaagatgtcccttgagaaacgtggtcctaaatccagttctcacattgggaatccccaagtccatttagaatcctgg

SEQ ID NO: 3355 - DNA, 2145 bp, Rattus norvegicus
  Genbank Accession No. NM_019137
agcccggttgcactttggagaaaccaggagccgccgcccgaggcaggtgcgggcgagccagggcgccgcggccccccaaccctcgtccccgagccaagcgccgggagcctggagctggggcgcccggattccctgccagccacgcgcgccccagcccagcgaggccccgggcgccccgccgccaccacgccatgctccacctgagcgacttctccggccccgacgcgctcctctccaagcccaccgaaggctgcgcccacaccagccccgagctgccccggctgcctgctagggacgctccctcggccgccgcgtatcctggaggcgacttcttgagctgggctctgagcacctgcggcgccgggggggacttaacagactcctgcttcctggagggccctgcacccacgcccccttcgggcctcagctacagcggcagcttcttcatccaggcggttcccgaacacccgcacgacccggaggccctcttcaacctcatgtctggcatcttgggcttggcacccttccctagccccgaggcggcagcgtctcggtcccccctggatgtccctttccccgcgggtcccgatgccttgttgccggacctttactccccggatctgagttcggccgccttcccggaggcgttttgggaggccgcgccttcggcgggcgctccctcgcagtgcctgttcgagccccagctctccccgcccgacgtcaagcccgggctgagggcgcctcccgcttcgccagcgctggacgctgctgcttcggccttcaaagggccctacgccccctgggagctgctgtcggccggggctccggggaactgtgggtcgcagggaagcttccagaccaccccggaggcacgcttttccgccgtggggaccaaggtcgaggacctgctgtccatcagctgccccgccgagctgcccggtccggctagcagactctacccgccaggggcctacgatgccttctcgctggccccaggtgacttaggggaggggaccgagggcctcccggcgctgctgacccctccgggcggggagggagggagcggcggcgaaggcggagagttcctggccgtccctcaagcgcagctgtccccgctgggcctgcgcggcgccgccacggcagacttctccaaagccctggtggccgacctcccggggggcagcggagtggcggcgccttcatcccccgccacctccttccccgcggccaaagcccggcgcaagggacgccggggcggcaagtgcagcgcgcgctgcttctgcccgcggccgcacgtcaaggccttcgcctgccccgtggagagctgcgtgcggacgttcgcgcgctccgacgagctcaaccgccacctgcgcatccacacgggccacaagcccttccagtgccgcatctgcctgcgcaacttcagccgcagcgaccacctcaccacgcacgtgcgcacccacaccggcgagaagcccttcgcctgcgacgtgtgcggccgccgcttcgcgcgcagcgacgagaagaagcgacacagcaaggtgcacctcaagcagaaggcgcgcgccgaggagcgcctcaagggcctgggcttctactcgctgggcctctctttcgccgcgctgtagccggagctggctccgtaggtcggcgccgccggccgtcggcgcacgcgacacggtcctgccgctccctcgtccctgctgccttccctgcctcttccacgcacgtccggggccacccgcagcccagctccagttcccccgaagcgcccgccgctcacgcccttcagcacgggctccgcggacagcgcccgctgttttcggagccgccttcctctagccacccgctctggggactgtcctctcggtccacccacagagcaggcgataccttaggactgaagagagtttttgtaactggcgtacgccccacgccttcctctttatcccttcccagagtcaagctggggatgtaccgagccggtctctcaagaactttgtacagcaagtccagcaagcctttggatgtgatgtctttgctttggggttatttcctttttgttgtcgttcattttttgtaaagcagacgctactctcaagcatttgacaaaactgtttatttttgcaattaaaattattgtgc

SEQ ID NO: 3356 - DNA, 6469 bp, Rattus norvegicus
  Genbank Accession No. NM_019140
cggcccgccaggcagctccggccgtgcgcgcacgccgagccgccggagcccgggccgacccgtgccggagcagcatgcggagcccgcagccgctgctcctctggacacctcagcctgaggcctctccgtgagttacggggacaccatcccccaccagggcggaggctggaggccactgccaagcatggcgcccacctggagacccagcgtggtgtctgtggtgggtcctgtggggctcttccttgtactgctggccagagggtgcttggctgaagagccacccagatttatcagagagcccaaggatcagattggtgtgtcaggaggcgtggcctccttcgtgtgccaggccacaggtgaccctaagccacgggtgacctggaacaagaagggcaagaaagtgaactcacagcgctttgagaccattgactttgacgagagctcgggggccgtgctgaggatccagccacttcggacaccccgggatgagaacgtgtacgagtgtgtggcccagaactcggtgggggagatcacagttcatgcgaagctcaccgtcctgcgagaggaccagctgcctcctggcttccccaacattgacatgggcccccagttgaaggttgtagagcgcacacgcacagccaccatgctctgtgctgccagcggaaaccctgaccctgagatcacctggttcaaggacttcctgcctgtggaccccagtgccagcaatgggcggatcaagcagcttcggtcaggtgccctgcagattgagagcagcgaggagacagaccagggcaagtacgagtgtgtggccaccaacagcgctggggtgcgctactcatcacctgccaacctctacgtgcgagtccgccgtgtggccccccgcttctccatcctgcccatgagccacgagatcatgcccggtgggaatgtgaatatcacttgtgtggctgtgggctcacccatgccctacgtgaagtggatgcagggggcagaggacctgacgcctgaggatgacatgcccgtgggtcggaatgtcctcgaactcacggatgtcaaagactcagccaactatacttgtgtggccatgtccagcctgggagtgatcgaggccgttgctcagatcactgtaaaatctctccccaaagcccctgggactcccgtggtgacggagaacactgctaccagtatcactgtcacatgggactcaggcaatcctgaccctgtgtcctactacgtaattgagtataaatccaaaagccaggatgggccgtatcagatcaaagaagacatcaccaccacgcgctacagcatcggcggcctgagccccaactctgagtatgagatctgggtgtcagctgtcaactccatcggccagggcccccccagtgagtcggtggtgacccgcacaggcgagcaggcaccagccagtgctcccaggaatgttcaggcgcgcatgctcagtgccaccaccatgattgtgcagtgggaggagcccgtggagcccaatggcctgatccgtggctaccgcgtctactacaccatggagcccgagcatccggtgggcaactggcagaagcacaatgtggacgacagtcttctgaccactgtgggcagcctgctagaggatgagacctacactgtgagagtgctcgccttcacatcggtgggcgatgggccactgtcagaccccatccaggtcaagacccagcagggagtgcccggccagcccatgaacttgcgggctgaggccaagtcagagaccagcattgggctctcgtggagtgcaccacggcaggagagtgtcattaagtatgaactgctcttccgggagggcgaccgaggccgagaggtggggcgaaccttcgacccaaccacagcctttgtggtggaggacctcaagcccaatacggagtacgcgttccggctggcggctcgctcgccgcagggcctgggcgccttcaccgcggttgtgtgccagcgcacactgcaggccaaaccgtcagccccccctcaagacgttaagtgcaccagcttgcgctccacggccatattgatccttctggaagctttggagaaatggacggagtaccgtgtcaccgccgtggcttacacagaggtgggaccagggcccgagagctcgcccgtggtcgtccgcaccgatgaggacgtgcccagcgcgcccccgcggaaggtggaggcggaggcgctcaacgccacggctatccgagtgctgtggcgctcgcccacgcccggcaggcagcacgggcagatccgcggctaccaggtccactatgtgcgcatggagggcaccgaggcccgcgggccaccgcgcatcaaggacatcatgctggcggatgcccaggaaatggtgatcacaaacctccagcctgagactgcttactctatcacagtagccgcgtataccatgaaaggcgatggcgctcgcagcaaaccgaaggtggtggtgaccaagggagcagtgctgggccgccccaccctgtcggtgcagcagacccccgagggcagcctgctggcgcgctgggagccccccgcggacgcggctgaggacccagtgcttggctaccgcctgcagtttgggcgcgaagacgcggccccggccacgttggaactggcggcgtgggagcggcggttcgcggcgcctgcacacaagggcgccacctatgtgtttcggctggcggcgcggggccgcgcggggctgggcgaggaggcctcggcggcgctgagcatccctgaggacgctccgcgtggcttcccgcagatcctgggccccgcgggcaacgtgtccgcgggctccgtaatactgcgctggctgccacccgtgcccgccgagggcaacggcgccatcatcaagtacacggtgtccgtgcgggaggccggcaccccagggcccgcgacagagaccgaactggcggcggcggcccagccgggggccgagacagcgctcacactacaggggctgcggccggagacggcctacgagctgcgcgtgcgcgcgcacacgcgtcggggccccggccccttctcacccccgctgcgatacaggcttgcgcgggacccagtctcccccaagaacttcaaggtgaagatgatcatgaaaacttcagtgctgctaagctgggagttccctgacaactataactcacccacgccctacaagatccagtacaatggactcacactggacgtggatggccgcactaccaagaagctgatcacgcacctcaagccacacaccttctataacttcgtgctcaccaaccgtggcagcagcctgggaggcctgcagcagacggtcaccgccaggaccgccttcaacatgctcagtggcaagcctagtgtcgccccaaagcctgacaacgatggttccattgtggtctacctgcctgatggccagagtcccgtgacagtgcagaactacttcattgtgatggtcccacttcggaagtctcgtggtggccagttccctatcctactaggtagtccagaggacatggatctggaggagctcatccaggacctctcccggctgcagaggcgcagcctgcgccactcaagacagctggaggtgcctcggccttacatcgccgctcggttctccatcctgccagctgtcttccatcctgggaaccagaagcaatatggtggctttgacaacaggggcttggagccaggccaccgttatgtcctctttgtacttgctgtgctgcagaagaatgagcctacatttgcagccagtcccttctcagaccccttccaactggacaacccagacccgcagcccattgtggatggcgaggagggcctcatctgggtgatcgggcccgtgctggccgtggtcttcatcatctgcatcgtaattgccatcctgctgtacaagaacaagcctgacagcaaacgcaaggactcagagccccgcaccaaatgcttattgaacaatgcagacctcgccccccatcaccccaaggaccctgtggaaatgcgacgtatcaacttccagacgccaggtatgctcagccacccgcccattcccatcacagacatggctgaacacatggagagactcaaagccaacgacagcctcaagctctcccaggagtatgagtccatcgaccctggccagcagttcacttgggaacattcgaacctggaggccaacaagccaaagaaccgatacgccaatgtcatcgcctatgaccattcacgagtcatcctgcagcctttagaaggcatcatgggtagtgattacatcaatgccaactatgtggacggctatcggcggcagaacgcatacatcgccacgcaggggcccctgcctgagacctttggggacttctggcggatggtgtgggagcagcggtcagccactgtggtcatgatgacacggctggaggagaaatcacgggtcaaatgtgaccagtactggcctaaccgaggcaccgagacatacggcttcatccaggtcaccctactagatactatggagctggccaccttctgtgtcaggaccttttctctacacaagaatggctctagtgagaagcgtgaggtacgacattttcagttcacagcatggcctgaccacggggtacccgagtaccccacacccttcctggcgtttctgcgcagagtcaagacctgcaacccgcctgacgctggcccagttgtggtccactgcagcgcgggtgtggggcgtactggctgcttcattgtaattgatgccatgttggagcgcatcagaacagagaagacggtggatgtgtacggacacgtgacactcatgcggtcacagcgcaactacatggtgcagacagaggatcagtatagcttcatccacgaggcactgctggaggctgtgggctgtggcaataccgaggtccccgcgcgcagcctctacacctatatccagaagctggcccaggtggagcctggcgagcatgtcacaggaatggagcttgagttcaagaggcttgccagctccaaggcacacacttcgagattcatcactgccagcctgccttgcaacaagtttaagaaccgcctggtgaacatcctgccgtacgagagctcgcgtgtctgcctgcagcccattcgtggtgtcgagggctctgactacatcaatgccagcttcatcgacggctacagacagcagaaagcctacattgcaacgcagggtccactggcagagaccacagaggacttctggcgtgccctgtgggagaacaactccactattgtggtaatgctcaccaagctccgcgagatgggccgggagaagtgccaccagtactggccagctgaacgctctgcccgctaccagtactttgtggttgacccgatggcagagtataacatgccacagtacattctgcgtgagtttaaggtcacagatgcccgggatggccagtcccggaccgtccgacagttccagttcacggactggccagagcagggtgcacccaagtcaggggaaggcttcattgacttcatcggccaagtgcataagaccaaggagcagtttggccaggatggccccatctcggtgcactgtagtgctggagtgggcaggaccggagtattcatcactctgagcatcgtgctggagcgaatgcgctacgagggggtggtggacattttccagacagtgaaggtgcttcggacccagcggcctgccatggtgcagacagaggatgagtaccagttctgcttccaggcggcgttggaatacctgggcagctttgatcattatgcaacataagccatggccccgcccaacacctcgacccagctccaagtgccctgaatgtgagcccagccctcggtgctgggtgggaggcggcccagggaggaaacctcctctccctggagacaggcactgccttctgaagggcacattcctcattcccttctgactccaaaacgaggttccagggtggggggtagggtggagagtagaggagccactgctcccatagctggggtcacaagggacagaactctgctcccacacttccctgcctgcggaattccgaaaacaattctatttccaaagctacagaagagcacacagtctgacttgtaggtgggtgactgatgagaatgctgttatggtatcagacgtgtagtgtattgctaggaataagcctgtgaggatttgtactatgaggcatactcctagtagagaaccgaagtttcatcatgatgagatgtttgatgtggggtggggtgttgagggggttttttttgttcaagccaaaggtaactttattgattcatgaatctggaaagttcaagtacaggttttattccagaaaagaactgattctgagcacagtgtagtcagtgctccatcactctgggttgcccaaaaaaaagacttgcacaatgattccagttgacatgcaacatggacagaaacatttcacaaagccacacccatatatgaaggagg

SEQ ID NO: 3357 - DNA, 8329 bp, Rattus norvegicus
  Genbank Accession No. NM_019143
ctcgcacccgctgcactgcacaggggaagaaaaggagcccagggtgtgagccggccagcggccacaacttctggtcctctcccgtgtcctccttccatcttcttacaggcgtccccacctcaggacttttcctgcaggctgcgaggggaaccaacttcgtggccactagcctcctggagagggcgactctcctcccatccactcaagatgctcaggggtccgggacccgggcggctgctgctgctagcagtcctgtgcctggggacatcggtgcgctgcaccgaaaccgggaagagcaagaggcaggctcagcaaatcgtgcagcctccgtccccggtggctgtcagtcagagcaagcctggctgttttgacaacgggaagcattatcagataaatcagcagtgggaacggacctacctaggcaacgccctggtttgtacctgctatggaggaagcagaggttttaactgcgagagcaagcctgaacctgaagagacctgttttgacaaatacactggaaacacttacaaagtgggtgacacttatgagcgccctaaagattccatgatctgggactgtacctgcattggggctgggcgaggcaggatcagctgtaccattgcaaatcgctgccatgaagggggtcagtcctacaagattggtgacaagtggaggaggccacatgagactggtggctatatgttggagtgtttgtgtctggggaatggaaaaggggaatggacctgcaagccaatagctgagaaatgttttgatcacgctgctgggacttcctacgtcgtgggggagacctgggaaaagccctaccaaggctggatgatggtggactgtacttgtctgggcgaaggcaatgggcgtatcacctgcacctcccggaacagatgcaatgatcaggacaccaggacgtcctacagaattggagacacatggagcaagaaggacaacagagggaacctgctccagtgtgtctgcacaggcaacggcagaggggagtggaagtgtgagcgacatgttctacagagtgcttcagctggatctggctccttcacagatgtccgaacagctatttaccaaccccagacccacccccagcccgcaccgtacggccactgtgtcacagacagcggtgtggtctactctgtgggaatgcagtggctgaagtctcaaggagacaagcagatgctgtgcacttgcctgggcaatggcgtcagctgccaggagacagctgtgacccagacttacggtggcaactcaaacggggagccctgtgttctcccgtttcactacaacggtaggaccttctactcctgcaccaccgaagggcggcaagacggacatctgtggtgtagcacaacttcaaattatgaacaagaccagaagtattctttctgcacagaccacgcggttttggttcagactcgaggtgggaattccaatggtgccttgtgccacttccccttcctgtacagcaaccggaattacagcgactgtacttctgagggtaggcgggacaacatgaaatggtgcggcaccacccagaactacgatgccgatcagaagtttggattctgcccaatggctgcccatgaggagatctgcacgaccaacgaaggggtcatgtatcgcattggggaccagtgggataagcagcatgacctgggccacatgatgaggtgcacgtgtgttgggaacggccgtggacaatgggcctgcatcccctactcccagctccgagatcagtgcatcgttgatgacattacttacaacgtcaacgacacgttccacaagcgtcacgaggagggacatatgctgaactgtacctgcttcggtcagggccggggcagatggaaatgtgaccccatcgaccgatgccaagattcagagacccggacattttaccagattggtgactcctgggagaagtttgtgcatggtgtcagataccagtgttactgttacggccgtggcattggggagtggcactgccagcctctgcagacctacccaggcacaactggacctgttcaagtaattatcacggagacccccagccagcccaattcccaccccatccagtggaatgccccggagccttcacacatcaccaagtacattctcaggtggagacctaaaacctctacgggtcgctggaaggaagctaccattccaggccaccttaactcctataccatcaaaggcctgaccccaggtgtgatctacgagggacagctcatcagcatccagcagtacgggcaccaagaagtgactcgctttgacttcaccaccagcgccagcacacctgtgaccagcaacacagtgactggagagactgcgcccttttctcctgttgtggccacttccgaatctgtcactgaaatcacagccagcagcttcgtggtctcctgggtctcagcttccgacacggtgtcaggattccgagtggagtacgaactgagcgaggaaggagatgagcctcagtaccttgatcttccaagcacagccacttctgtgaacattcctgacctgctcccgggcagaaagtacatcgtcaacgtctatcagatatctgaagagggaaagcagagcttgatcctgtctacatcacagactacagcacctgatgcgcctccagaccctactgtggaccaggttgatgacacttccattgttgttcgatggagcagaccccaggcacctatcacagggtacaggattgtctattcaccttcagtagaaggcagtagcacagaactcaaccttcctgaaacggccaactccgtcaccctcagcgacctgcagcccggtgttcagtacaacatcactatctatgctgtggaggagaaccaggagagcacacccgttttcatccagcaggagactactggcgtcccacgatccgatgatgttcccgctccaaaggacctacagtttgtggaagtgaccgacgtgaaagtcaccatcatgtggacacctcctaatagcgcagtgactggataccgtgtggatgtcctgcctgtcaacctgccaggggaacatgggcagaggctgcctgtcaacaggaacacctttgctgaagtcaccggactgtccccaggggtcacgtacctcttcaaagtctttgctgtgcatcagggcagggaaagcaagcctctgacagcacaacagaccaccaaactcgatgctcccactaacctccagtttgtcaatgaaacggacagaacagttctggtaacttggactccacctcgagcccggatagcaggctaccgactgacagtgggcctcacccgaggaggccagcccaagcagtacaatgtgggacccatggcttccaagtatcccctgagaaatctgcagcctgggtctgagtacactgtgaccttgatggctgtgaaaggcaaccagcagagtcccaaagccaccggagtctttactaccctgcagcctctgcgctccattccaccttataacaccgaggtgacagagaccacaatcgtgatcacctggacccccgctccaaggattggcttcaagctgggtgtacgaccaagccagggaggtgaagcaccccgagaagtgacttcagactcaggaagcatcgttgtgtctggcttgactccaggcgtggaatacacgtacaccatccaagtcctgagggacggccaggagagagatgcaccaattgtcaaccgagtagtgacaccgctgtctcccccaaccaacttgcacctggaggccaatcctgacactggagtgcttaccgtctcctgggagaggagcaccaccccagatattactggctacagaataaccaccacccccacaaacgggcagcagggaaccgctttggaagaagtggttcatgccgatcagagttcctgcacttttgaaaaccgtaatcctggcctggagtacaatgtcagtgtttacactgtcaaagatgacaaggaaagtgcccctatctctgataccgtcatcccagaggtgccccagctcactgacctaagctttgttgatataactgactcaagcatcggcctgaggtggaccccgctaaactcttccaccattatcgggtaccgaatcacagtagttgcggcaggagaagggatccccatttttgaagattttgtggactcctcagtaggatactacacagttacagggctggaacccggcattgactatgacatcagcgttatcactctcattaatggcggagagagtgcccctactacactgacacagcaaacggccgtccctcctcccacggatctgcgattcaccaatatcggtccggacactatgcgggtcacttgggccccgcctccgtccattgagctaaccaacctcttggtgcgctactcacctgtgaagaacgaggaggatgtggcagagctgtccatttcaccctcagacaacgccgtggtcctaacaaatctcctgcctgggactgagtacctagtcagtgtctccagcgtgtacgaacagcatgagagcatacctctcagaggaagacagaaaacaggtctggactccccaactggttttgattcttctgatgtcaccgccaactcattcaccgtccactgggtggctcctcgggcccccatcaccggctacatcatccgccatcacgccgagcattctgccggaagacccaggcaagaccgagtgccgccctcaaggaattctatcaccctcaccaaccttaatccgggcacggagtacattgtcaccatcattgctgttaatggcagagaggagagccccccactgattggccagcaatccacggtttccgatgtcccgagagatctggaggtcatcgcttccacccccaccagcctgctcatcagttgggaaccccccgccgtctctgtgcgctattacagaatcacctatggagagacaggaggaaatagccctgtccaggaattcactgtgcccggaagcaagtccaccgccaccatcaacaacattaaaccaggagcagactacaccatcaccctgtatgctgtcactggccgtggggacagtccagccagcagcaagccagtttccatcaattatcaaacagaaattgacaagccatcccagatgcaggtgacggatgtccaggacaacagcatcagtgtcaggtggctgccttcaacttctcctgtgacaggttacagagtgaccaccgctcccaaaaatggcctaggaccaacaaaatctcaaactgtcagtccagatcaaacagaaatgaccattgaaggtttgcaacccaccgtggagtatgtggttagtgtctatgctcagaaccggaacggagaaagccagcccctggttcagactgcagtgaccaacattgaccgccctaaaggactggcattcactgatgtggatgtcgattccatcaaaattgcctgggaaagcccacaggggcaagtttccaggtacagggtgacctactcaagccctgaggatggaatccatgagcttttccctgcgcctgatggtgacgaggacacggcagagctgcacggcctcaggccgggttctgagtacacagtcagtgtggttgccttgcacggtggcatggagagccagcccctgattggagtccagtccacagccattcctgcgccaaccaatctgaagttcactcaggtgtcacccaccaccttgactgcccagtggacagcgcccagtgttaagctcactggctaccgagtgcgggtgaccccgaaggagaagacaggaccaatgaaagaaatcaacctttctccagacagcacctccgtgattgtgtcagggctcatggtggccaccaagtatgaagtcagcgtctatgctctcaaggacacattgacaagcagaccagctcagggagtcgtcacgactctggagaatgtcagccctccaagaagggcccgtgtgaccgacgctacagaaactaccatcactattagctggagaacgaagacagagacgatcactggcttccaagtcgatgccattccagccaatggccagaccccggttcagaggaccatcagcccggatgtcagaagctatactattacaggtttacagccaggcactgactacaagatccacctgtacacgctcaacgacaatgcccggagctctcctgtggtcattgatgcctccacggccattgatgccccatccaacctgcggttcctgaccaccacacccaactccttgctggtatcatggcaggcaccccgtgccaggattactggctacattatcaagtatgagaagcctggatcccctcccagagaagtggtccctcggccccgccctggtgtcacggaggccaccatcactggtctggagccaggaaccgagtacaccatctatgtcatcgcactgaagaacaatcagaagagtgagcccctgattgggaggaaaaagacagatgagcttccccaactggttacccttccacaccccaatcttcatggaccagagatcttggatgttccctccacagttcaaaagacccccttcgtcaccaaccctgggtatgacaccgaaaatggtattcagcttcctggcacatcccaccaacaacccagtgttgggcaacaaatgatctttgaggaacatggctttaggcgaaccacgccacccactgcggccacccccgtcaggcttaggccaagaccatacctgccgaatgtagatgaggaggtccaaatcggtcatgttcccaggggagacgtagactaccacctctatcctcatgttccggggctcaatccaaatgcctctacaggacaagaagctctctctcagacaaccatctcttggacgccattccaggagagttctgagtacatcatttcatgccaacctgttggcactgacgaagagcccttacagttccaagttcctggaacttctaccagtgcgactctgactggccttaccagaggggtcacctacaacatcatagtggaggccctgcacaaccagaggaggcacaaggtccgagaagaggttgttactgtaggcaacactgtcaacgaaggcctgaaccagcctacggatgactcatgctttgacccttacacggtttcccattacgccgttggagaggaatgggagcggttatctgactctggctttaagctcacttgccagtgcttgggctttggcagtggtcatttcagatgcgattcatctaaatggtgccatgacaacggtgtcaactacaagatcggagagaagtgggatcgtcagggagaaaatggccagcggatgagctgcacatgtctcgggaatggaaagggagaattcaaatgcgatccccatgaagcaacgtgttatgacgacgggaagacctaccacgtaggagaacagtggcagaaagagtatctcggagccatttgctcctgcacgtgtttcgggggccagcggggctggcgctgtgacaactgccgcagacctggggctgctgaacccagtcccgatggtaccactggccacacctacaaccagtatacacagagataccatcagagaacgaacactaatgtaaattgcccaattgaatgcttcatgccgttggacgtgcaggctgacagagatgattccagagagtaatctttccatccagcccaagccaacaagtgtctctctaccaaggtcaatccacaccccagtgatgttagcagaccctccatttctgagtggtcatttcacccttaagccttctgctctggagtcaagttctcagcttcagctcaacttacagcttctccaagcatcgccccgcgggatgttttgagacttccctcttaaatggtgacagttggtgccctgttctgcttcagggtattcagtactgctcagtattattgtctaagagaatcaaaagttcttgtgatttggtctgggatcaaagggaaacacaggtagccaaccacgatgcaatgaattgaatggtagtacccaagagcgggagcaggaagttaaaccagacagttctgctttcttttgccgtctgatctgcagcactgtcaggaggcctgtcctgtggctgtgtccaaacaccccacaggactcactgtcccaacaatcctaattgcctagaaatatctttctcttacctgttatttatcaatttttcccagtatttttatacggaaaaaattgtattgaagacactttgtatgcagttgataagaggaattcagtataattatggttggtgactatttttataatgtacatgccaacactttactactgtggaaagacaagtgttttaataaaaagatttacattccat

SEQ ID NO: 3358 - DNA, 1381 bp, Rattus norvegicus
  Genbank Accession No. NM_019144
ccccagagaataaagtctcagcgatcaccgcttctgttccaggagcttccttgcctcttgcgtcctctatgaccacctgtgcttcctccagcatggatacgtggatggtgctgctgggcctgcaaatcctgctgctcccactcctggctcactgtacagccccagcttccaccctgagattcgtggctgtgggtgactggggaggggtccccaatgccccattccacacagcccgggaaatggccaatgctaaagaaatcgccagaaccgtgcagattatgggcgctgacttcatcatgtccctgggggacaacttctacttcactggagtgcatgacgccaatgacaagaggttccaggagacctttgaggatgtgttctctgaccgtgccctccgcaacatcccctggtacgtgctggctggaaaccatgatcaccttggcaatgtctcggcacaaattgcctactccaagatctccaagcgctggaacttccccagcccttattaccgtttgcgtttcaaagttccgcggtcgaacatcaccgtggccatctttatgctggacaccgtgatgctgtgtggcaattccgacgactttgtcagccagcagcctgaaatgccccgagacctgggagtggcccgcactcagctgtcctggctcaaaaaacagttggcagcagccaaggaggactatgttttggtggccggtcactaccccatctggtccatcgccgagcacggacccacccgctgcctggtcaagaacttgaggccattgttggctgcatacggggtcaccgcctacctgtgtgggcatgaccacaacctgcagtatcttcaggatgagaacggtgtgggctatgtgctgagtggggccggcaacttcatggacccttctgtgcggcatcaacgaaaggtccccaacggctacctacgctttcactatggatctgaggactctctgggtggcttcacatacgtggagataggctccaaagaaatgagcatcacgtatgtggaagcctctggaaaatcactcttcaagaccagcctccccaggcgacccagaccctgaagacctacaagggtcctgcttatcccctaatgggtctgagggagggagcctctgcaagcctgatgggtgggccctgtgaggacctcacccaccggcagctttttctctgccctggtactctggcagagtgggaagggggaaccacagaggcttacatataggaaagaagtacactcacaccaactggcccccacagccaggcttaccctgtggttttggggtagacctttcttgggagtggggctttcttttaaatcaagcatctcactgtcactgctgttcaataaaaacaatagttgacaagg

SEQ ID NO: 3359 - DNA, 1832 bp, Rattus norvegicus
  Genbank Accession No. NM_019145
ctggtggggcctgatagagctggcagggttggctgggaggggcgtgtaggctgacacaggacactccaaccccccaaccccaagacctgtaaagctactgtcctactcatcactgggcagaactgaggcaccatgcacgggggccagggacctcagctcctcttgctgctgctggctacctgcctgggggcccagagccgcaaccaagaggagcggctgcttgcggacctgatgcgcaactacgacccccatctgcggccggctgagcgtgactcagatgtggttaatgtcagcctgaagcttaccttaaccaacctcatctcccttaatgagcgagaggaggccctcacgactaatgtctggatagaaatgcaatggtgcgactatcgcctacgctgggacccgaaagactacgaaggcctgtggatattgagggtgccatctaccatggtctggcagcccgatatcgtgctgggaaacaatgtggacggtgtcttcgaggtggcgctctactgcaatgtgctcgtgtcccctgatggttgtatctactggctgccgcctgccatcttccgctcctcctgctccatctctgtcacctacttccccttcgattggcagaactgctccctcgtcttccagtcccagacttacagcaccagcgagatcaacttgcagctgagccaggaggatgggcaagccattgagtggatcttcattgaccccgaggctttcacagagaatggggaatgggccatccggcatcgaccagccaaaatgctactggatcctgtgactccagcagaggaggcaggccaccagaaggtggtgttctacctgctcatccaacgcaagcccctcttctatgtcatcaacatcatcgtcccctgtgtgctcatctcctcagttgcgatcctcatctacttccttcctgccaaggcgggcggccagaagtgcacagtggccaccaacgtgctcctggcccagaccgtcttccttttcctcgtggctaagaaggtgcctgagacctcccaggcagtgccgctcatcagcaagtacctgaccttcctcatggtggtgaccatcctcatcgttgtgaactctgtggtcgtgctcaatgtgtccttgaggtccccacacacacactccatggcccggggggtccgcaaggtgtttttgaggctcctgccccagctgttacggatgcatgtgcatcctcgggctcctgctgctgtccaggatgcccggctgcgactccagaatggctcttcctcagggtggcccatcatgactcgagaggaaggggacctctgtttgcctcgaagcgaactcctctttaggcaaaggcagcgcaatggattggtgcaggcagtactggagaagttagagaatggtccagaaatgaggcagagccaggagttctgtggcagcctgaagcaagcctccccggccatccaggcctgtgtggatgcctgtaacctcatggcgcgtgcccgacaccagcaaagtcactttgacagtgggaatgaggagtggttgctggtgggccgagtgctggaccgagtctgtttcctagccatgctctccctcttcatctgcggcactgctggcatcttcctcatggcccactacaaccaggtgcctgacctgccattccctggagacccccgcccctacttgcctttgccagactgagccaaccaatcactcctgcgccctggagtcagccatgtgggtcatgctgtttatggagctgtattctctgttgatcctgatgggctcctggggagcaatcattcttgggagaagatagaggaataaaggaataggaataa

SEQ ID NO: 3360 - DNA, 2917 bp, Rattus norvegicus
  Genbank Accession No. NM_019152
cccagggaccgcagcaatctcccaaactccccttccccaggatggcagaggagttaatcacacctgtgtactgcaccggggtgtcagcccaagtgcagaagcaacgggacaaggagttgggcttgggccgccatgaaaatgccatcaagtacctgggccaggattatgaaaatcttcgtgcaagatgcctgcagaacggggtcctcttccaagacgatgccttccctccagtttctcatagcttgggcttcaaggaactgggtcccaattcctctaaaacctatggcatcaagtggaagcgtcctacggaactgctgtcaaacccccagttcatcgtggatggagccacccgaacggacatctgccagggagcactgggggactgttggctcctggctgccattgcctcgctcactctcaacgagactatcctccaccgagtggttccctacggccagagcttccaggagggctatgctggcatctttcatttccagctgtggcagtttggggagtgggtagatgtggttgtggatgatttgctacccaccaaggatggaaagctggtgttcgtgcactctgcccagggcaacgagttctggagcgctctcctggagaaagcctatgcaaaagtgaatggcagctatgaggccctttcgggaggctgcacctcagaggccttcgaggactttaccggtggggtcactgagtggtacgatctgcagaaggcacccagcgacctctaccagatcattctgaaggccctggaacgaggctccttgctgggctgctccattaatatttccgatatccgtgatttggaggctattacttttaagaacctggtgaggggccatgcatactctgtgacggatgccaagcaggtcacttaccagggccagcgggtgaacctaatccggatgcggaacccctggggtgaagtggagtggaaaggaccctggagtgacaactcctatgagtggaacaaagtggacccctatgaacgtgagcagctgagggtcaagatggaggacggggagttctggatgtccttccgggacttcatacgtgagttcaccaaactggaaatctgcaaccttacacctgacgcccttaagagcagaaccctccggaactggaataccacattttacgagggcacctggcgccggggaagcactgctggaggctgcaggaactacccagctaccttctgggtaaacccccagttcaagatccggctggaggaggtggatgacgcagacgactatgacagtcgagagtccggctgcagcttcttgttggccctcatgcagaagcatcgccgcagggagcgtcgctttggccgggacatggagaccattggttttgcagtgtaccaggtccctcgggagttggcgggtcagcctgtgcacttgaagcgtgacttcttcctggccaatgcttctcgggcacaatcagagcactttatcaaccttcgagaggtcagtaaccgcatccgcctgccgccgggggagtatatagtggtgccctccaccttcgagcccaacaaagagggtgactttctgctgcgcttcttttcagagaagaaggctgggacccaggaactagatgaccagatccaggccaacctccccgatgagaaagtgctctctgaagaggagatcgatgacaacttcaaaaccctgttcagcaagttagcaggggatgacatggagatcagtgtcaaggagttacagaccatcttgaacagaatcattagcaaacacaaagacctgcgcactaacggcttcagcctggagtcgtgccgcagcatggtgaacctcatggatcgagacggtaatgggaaactgggcctggtggagttcaacatcctgtggaaccgcatccgaaattacctgaccatcttccgcaagtttgacctggacaagtctggcagcatgagtgcttatgagatgaggatggccatcgaggctgcaggcttcaagcttaacaagaagctgcatgagctcatcatcacccgctactcagagcccgacctggccgtggactttgacaactttgtgtgctgccttgtgcgcctggagaccatgttccggtttttcaaaattctggacacagacctggatggtgttgtgacctttgatctatttaagtggttacagctgactatgtttgcatgaagcgggatggctcctctgcctgtgttcttccttcttcctctgccaagccacacctccccgccatgccgtaccagaccatgtcagctgccagtgccttccctcaaaaaaaggagggcaccttgtcctcctgtccccttgtcctcctgtcctttcacctccccactacctctgttcaattgctctaggcagagtcacagggcccttcctgcccctgtagctaaggcaaccctgacccctgctcatggctaagagcaggaaggcagctccctgcttactccttcctgcctccggggcaggagtaggcatccctgcccctcccactccctgctactgtccagatgtgtgtctcacctaatctgtggaggctctagcccctgtcatcccctagacctgcagacttcgtaaccactagctagttccttgtctgcacctgggtgttgaaggcctcacctcactatgggagccccacagccagttcaccttcctgtgccttcatgtgcagcagccaagatccctctgcaaaccaaagtacacctctcctgcccgtgtgcccaccaggaacttcctggccgggagggcactcaggccctccgtatccccaccccccttcctctattttttaatatttttcaaggaaatgcttgagggactagtgtactggttatggaggaccaggacctggggggtgggttggggaggtcccatgtttcagtgcagtgggaaaataaaatgaa

SEQ ID NO: 3361 - DNA, 1588 bp, Rattus norvegicus
  Genbank Accession No. NM_019156
ccaggcaagacagtgagactccagaagctccgagcccagtttgccaaggccctctgctagaggcctgccatggcatctctgaggccctttttcatactagccctgctggcattggtttctctggctgaccaagagtcatgcaagggccgctgcactcagggtttcatggccagcaagaagtgtcaatgtgatgagctttgcacctactatcagagctgctgtgttgactacatggagcagtgcaagccccaagtgacccggggggatgtgtttaccatgccagaagatgagtattggagctatgactacccggaggaaaccaagaacagtaccaatgctggcgtgcaatccgagaacacctctctacactttaacctaaagcctcgagccgaagagactataaagccaacaactcctgatcctcaggaacagtcaaacacccaagaacctgaagtggggcaacagggagtggccccaaggcctgacaccactgatgaaggaacctctgagtttccagaagaagagctgtgtagtggaaagccctttgatgccttcacagacctcaagaatggttccctttttgccttccgaggtgagtattgctatgagctagatgaaacagcagtgaggcctgggtaccccaaactcatccaagatgtctggggcatcgagggccccatcgacgctgccttcactcgcatcaactgtcagggaaagacctacttgttcaagggtagtcagtactggcgctttgaggatggtgtcctggaccctgattatccccgaaacatctctgaaggcttcagtggcataccagacaacgttgacgcagccttagcccttcctgcccacagttacagtggccgggaaagggtctacttcttcaagggaaaacagtactgggagtatgaatttcagcagcagcccagccaggaggaatgtgaaggaagctctctgtcagccgtgtttgagcactttgccttgcttcagcgggacagctgggagaacatttttgaactcctcttctggggcagatcctctgatggcgccaaaggaccccaattcatcagcagggattggcatggtgtaccagggaaagtggacgctgctatggccggccgcatctacatcactggctccacattccgctctgtccaggccaaaaaacagaagtctgggcgtcgaagtcgaaaacgctaccgttcacgccgagggcgtggccatagccgcagccgcagccgcagcatgagctctcgtcgcccatcgcgttcagtctggttctctttgctctccagcgaagagagtgggctaggaacctacaattacgattatgatatgaactggctgatacctgccacctgcgagcccattcagagcgtctatttcttctctggagacaagtactaccgagttaaccttagaacacggcgagtggactctgtgaatcctccctacccacgctccattgctcagtattggctgggctgcccaacctctgagaagtaggaatcagcacccacacagctgagcttcagaaacctcgtcctccagctttttctcccagcccaataaagtgttggccccaaaa

SEQ ID NO: 3362 - DNA, 1463 bp, Rattus norvegicus
  Genbank Accession No. NM_019158
  misc_feature (1)..(1463): n = a or c or g or t
cgaaagcaatcctttaaaagcgcagagtcagcggaccagtctgagttctggagttaagtgagcacatctccttcagctggtgcagctcctggagctctgactcccaccttccggagcagatatgtctggggagcagacgccgatgtgtagtatggacctacgtgagatcaaggggaaggagaccaacatggctgacagttaccatggcatgtcctggtatgagcagtacatacaaccgtgtgtggtggaacttttgggctccgctctcttcatcttcattgggtgtctatcggtcatcgagaacagtccaaatactgggctcctgcagcctgccctggctcatgggctggccttggggctcatcattgctaccttggggaacatcagcggtggacacttcaaccctgctgtgtcgctcgcagtcacactggttggaggcctcaagaccatgctgctaattccctactgggtctcccagctgtttgggggaatgatcggagctgccctggctaaggtggtgagtccagaggaaaggttctggaatgcgtctggggcagcctttgccatagtccaggagcaggagcaggtggcagaagccctgggggtagagatcgttatgacgatgctcttggtattggctgtgtgtatgggtgccgtcaatgagaagacaatgggtcccctagccccattctccattggtttctctgtcattgtggatatcctggcaggtggtgggatctctggagcctgcatgaaccccgctcgcgcctttggacctgccgtgatggctggctactgggacttccattggatctactggctggggcccctcctggctggcctctttgtgggactgctcattaggctcttcattggagatgagaaaacccgcctgattctaaagtcgaggtgaagaactgctggcagcatccccactgcctggagtcctcagctgtttgtcctgagttgaggacaggacaattccattattttctgcaggacctgagctcagaggagccactctgacagcagcagaccttggcctggcttcccaggcaggcaggcagctgctgctgtcctgagcatgctcctggaacctggaactcctttgtgcccatggactgggcttggggcccagcctaaagacatgtagagaccacatagaaaaggaggacaggtctctgttcttgagaaagggcagggcatgggagagccgagcaggtggagcatgcagttgctaatgcacactgttcatttttccagccctctttcttttttactgtgttgggtttggaacccagtccatgcgtactaggtgagcactttgctacggagcctcctgttctccccaccctctttcctcttggttacactgttacagaagggctttcaggagcccaaagatntccttgcctccccagctgccaatctgactttgtaataaatggcttagtgttcctgcc

SEQ ID NO: 3363 - DNA, 1407 bp, Rattus norvegicus
  Genbank Accession No. NM_019163
atgacagagatacctgcacctttgtcctacttccagaatgcacagatgtctgaggacagccactccagcagcgtccgtagccagaatgacaatcaagaacggcagcagcatcatgacagacagagacttgacaaccctgagtcgatatctaatggccgaccccagagtaactttaccaggcaggtgatagagcaagatgaggaggaagacgaagagctgacattgaaatatggagccaagcacgtcatcatgctctttgttcctgtgaccctctgcatggtcgttgtggtggccactatcaagtcagtcagcttctacacccggaaggatgggcagctaatctataccccattcacagaagacaccgagactgtaggccagagagccctgcactcgatcttgaatgccgccatcatgatcagtgtcatcgtcgttatgaccatcctcctggtggtcctgtataagtacaggtgctacaaggtcatccatgcctggcttattgtttcatctctgttgttgctgttctttttttcattcatttacttaggggaagtattcaagacctacaatgtcgccgtggactatattacggttgcactcctgatctggaattttggtgtggtcgggatgattgccattcactggaaaggcccactccgactgcagcaggcgtatctcattatgatcagtgccctcatgtccctggtatttatcaagtacctccctgaatggaccgcatggctcatcttggctgtgatttcagtatatgatttggtggctgttctgtgccccaaaggtccacttcgtatgctggtcgaaacagctcaggaaagaaatgagactctctttccagctcttatctattcctcaaccatggtgtggttggtgaatatggctgaaggagacccagaagcccaaaggagggtacccaaaaaccccaagtatagcacacaaggaacagagagggaagagacacaggacactggcactgggagcgatgatggtggcttcagtgaggagtgggaggcccaaagagacagtcacctggggcctcatcgctccactcctgagtcaagagctgctgtccaggaactttctgggagcatcctcactagtgaagacccggaggaaagaggagtaaggcttgggctgggagatttcattttctacagtgttctggttggtaaggcctcagcgaccgccagtggggactggaacacaaccatagcctgctttgtagccatattgatcggcctgtgccttacgttactcctgctcgccattttcaagaaagcgttgccggcccttcccatctccatcaccttcgggctcattttctactttgccacggattatctcgtgcagcccttcatggaccaacttgcattccatcaattttatatctag

SEQ ID NO: 3364 - DNA, 1856 bp, Rattus norvegicus
  Genbank Accession No. NM_019184
gtctccctgagaaggctgccatggatccagccctagtcctggtgctcactctctcctctctgcttctcctctcactctggagacagagctttgggagagggaagctccctcctggtccaacacctctcccaatcattggaaacacccttcagatatatatgaaggacatcggccaatcaataaaaaagttttcaaaagtctacggccctatatttactctgtatttgggcatgaagccctttgtggtgttgcatgggtatgaagctgtgaaggaagctcttgttgatctaggagaggaattttctggaagaggcagttttccagtatctgaaagagttaacaagggccttggagtcatttttagcagtgggatgcaatggaaggagatccggcgtttctccatcatgaccctgaggacttttgggatgggcaagaggaccattgaggaccgtattcaagaggaggctcagtgccttgtggaggaactgaggaagagcaaaggtgccccttttgatcccacctttatcctgggctgtgctccctgcaatgtgatatgctccattattttccagaatcgccttgattataaagatccgacttttcttaacttgatgcacagatttaatgaaaacttcaggcttttcagctccccatggctacaggtctgcaatactttccctgccattattgattacttccctggaagtcataaccaagtacttaagaatttcttctatataaaaaactatgttttggagaaagtaaaagaacaccaagagtccttggacaaggacaatcctcgggacttcattgattgtttcttgaacaaaatggaacaggaaaagcacaatccgcagtctgagtttacccttgaaagcttggtggctactgtaactgacatgtttggagctggcacagaaacaacaagtaccactctgaggtatggactcctgctgctgctgaaacacgtggatgtcacagctaaagtccaggaagagatagaacgtgtaattggcagaaaccggagcccctgcatgaaagacaggagccagatgccctacacggatgctgtagtgcatgagatccagagatatattgaccttgtccccacaaacctgcctcatttagtgacacgtgatataaaattcagaaactacttcattcccaagggtaccaatgtgatagtatcgctgtcatccatactgcatgatgacaaagaatttcctaatccagagaagtttgaccctggtcactttctagatgagagaggtaactttaagaagagtgactactttatgccattctcagcaggaaagaggatatgtgcaggagaagccctggctcgcacggagctgtttttgttcttcaccaccattttacagaattttaacctgaagtctctggttgatgtaaaagacattgacacaacaccagctatcagtggatttggccatttgccccctttttacgaggcttgttttattcctgtgcaaagggcagactctctaagctctcatctgtaatgtctcttctgagggtcctgtctacttcattcttggtactatagtagctttaactcacatatccccatttccttcggatccagtgaacatcaaacctcattgagttgagttccctgagtcaatatatagttctattcctgttccctatatcttgtgacgttccctatatcttgtgacattcccatgcagtacttacatagttagtgctaatacttgtatgacttcattactgttaatactgttttcactatataaaagcaaaatattttagaatatgagaattcagagtcatctgttcccttcatgtgctaaataaatactaatttttggacc

SEQ ID NO: 3365 - DNA, 1844 bp, Rattus norvegicus
  Genbank Accession No. NM_019185
cgacttgggaggacctgttgctcttcactgacctcgatcaggccgcgaccgccagcaagctgctgtggtccagccggggcgccaagctgagtcccttcgcggccgagcagccggaggaaatgtaccagacgctcgccgctctgtccagccaggggcccgccgcttacgacggcgctcccggcggcttcgtacactccgcagctgcggcggccgcggcggccgcggcagccagctctccggtctacgtgcccaccacacgcgtgggctccatgctgcccggcctgccttacctgcagggggcgggcagcgggcccagcaatcacgcgggcggcgcgggcgcccacccgggctggccccaggcctccgccgacagccccccgtatggcgggggtggtgcagcgggcggcggcgcggccggacccggaggtgcgggatcagccacagcccacgcctctgcacgcttcccctactcgcccagcccgcccatggccaacggcgccgcgcgggaccccgggggctacgtggctgcgggcggcgcgggcgcgggtagcgtgagtggcggtggcggcagcctggcggccatgggtggccgggagcaccagtacagctcgctgtccgcagccaggccgctgaacgggacgtaccaccaccaccatcatcaccacccgacctactcgccctacatgggcgctcctctgactcccgcctggccagcgggacccttcgaaacgccggtgctccacagtttacagagccgcgcgggagctccactcccggtgccacgaggccccagcgcagacctgttggaggacctgtcggagagccgcgagtgcgtgaactgtggctccatccagacgccactgtggagacgagatggcaccggtcattacctgtgcaacgcatgcggtctctacagtaagatgaacggcctcagcaggcccctcatcaagccacagaagcgcgtgccttcatcacgacggcttggactgtcctgtgccaactgtcacaccacaaccactaccttatggcgtagaaacgctgagggtgagcccgtgtgcaatgcttgcgggctttatatgaaactccatggggtgcctcgaccacttgctatgaaaaaagaaggaattcaaaccaggaaacgaaaacctaaaaatataaataagtcgaaagcttgctccggtaacagctctgttcctatgactccaacttcctcctcctctaattcagatgactgcaccaaaaatacttctcctcccacacagtcgactgcctcaggggtgggtgcatcagtgatgtctgcagtgggagaaagtgccaaccctgagaacagtgacctcaagtattcaggtcaagatggcctctacataggtgtcagtttgtcctcccctgccgaagttacatcctcggtgcgacaggattcttggtgtgctctggccctggcctgagctggtgctgccaagggctctgaaggcctcataccacttgtgtctgattttgtccagcagtccagatggcggcaaaaaatgcagacataacattccttcgatgcgtgatttctgtgcctttgttttgaaagagatatatttcccaagaagcttattgaagtaagaagagatgggtctttgtaggaaggggcagcacagtgggcgtgtggcctattcctgtcagcctgggtctgcttccagccagcttgcctctggctctgctccacaccagtgggagaaactgtgacaatgactggggccttgtctgctaaggaagattgagagattaaaaaaaaaatagtttgtgtattgctccaaatcatgtgcttcttgtgatcaaccttggttatcccagaattc

SEQ ID NO: 3366 - DNA, 1067 bp, Rattus norvegicus
  Genbank Accession No. NM_019186
acggaggaccgtcagccagcaatcgcgtagctcgatcgatcacccaggaagagaaattgtaagcagataagaagaacgcgttcggtttgggacaccatttgcagctggaaatggggaatggactgtcagaccagacttccatcctatccagcctgccgtcctttcagtcctttcacattgttattctgggtttggactgtgctggaaagacaacagttttatacaggctgcagttcaacgaatttgtaaatactgtacctaccaaaggatttaacactgagaaaattaaggtaaccttgggcaattccaaaacagtcacttttcacttctgggatgtaggtggtcaagagaaattaagaccactgtggaagtcatatacccgatgcacagatggcattgtgtttgtggtggactctgttgatgttgagagaatggaagaagccaaaactgaacttcataaaataactaggatatcagaaaatcagggagtccctgtgcttattgttgctaacaaacaagacctgaggaactcactctctctctcagagatcgagaagttgttagcaatgggtgaactgagctcatcgactccttggcatttacagcccacctgtgcaatcataggagatgggctaaaggaaggacttgagaaactacatgatatgataattaaaagaagaaaaatgttgcggcaacagaaaaagaagagatgaatggcagtacttttatatcggtgtggaataggttttacttggtctgatttctgacaagctgaagagtgtctacagcctggtttgcctgtctgccctcacggatgctattaaagctttgttttgttgaacagtcagatacccaactctgttgccttgtggaagatgagtaaatgcaatgcttcttaaaggggtctcttctccgtgacccacaaatcttttggtactaccattttgggaagccaaaaaaggctagtaattgaccagaaaacaattttgtggaaatttgacctgaagttagtgaaataaaactttgaagagtgtaaaaaaaaaaaaaaaaaaaaaaaaaaaaaaaaa

SEQ ID NO: 3367 - DNA, 2113 bp, Rattus norvegicus
  Genbank Accession No. NM_019191
gggcagcgcggagcccgtcggaagaggaaggaacaaaaggtccggggcccggctcggacgggccgggaccaggcgctgggtgcagggtagatttaccaggctgtttctgagtgtggattgttacccttggtaagaaaatgtcgtccatcttgccattcactccgccagtggtgaagagacttctgggatggaaaaaatcagccggtgggtctggaggagcaggtggtggagaacagaatggacaggaagaaaagtggtgtgaaaaagcagtgaaaagtctggtgaaaaagctaaagaaaacaggacgattagatgagcttgagaaagccatcaccactcagaattgcaatactaagtgtgtcaccataccaagcacttgctctgaaatttggggactgagtacagcaaatacggtagatcagtgggacacaacaggcctttacagcttctctgaacaaaccaggtctcttgatggtcgtcttcaggtgtctcatcggaaagggctgccacatgttatatattgccggctgtggcgctggccagaccttcacagccatcatgagctcaaggcgatcgagaactgcgaatacgctttcagtctgaaaaaagatgaagtgtgtgtgaacccttaccactaccagagggtggagacaccagtcttgcctccagtcttggtgcctcggcacacagagattctaacagaactgccgcctctggatgactatacccactccattccagaaaacacaaatttcccagcaggaattgagccacagagtaattacatcccagaaacaccaccacctggatatatcagtgaagatggagaaactagtgaccaacagttgaaccaaagtatggacacaggctctccggctgaactgtctcctaccactctctcccctgtcaatcacagcttggatttgcagccagttacttattcagaacctgcattttggtgttcaatcgcatattatgaactaaaccagagggttggagagaccttccatgcgtcacagccctcactcactgtagacggctttacagatccatcgaactcggagaggttctgcttaggtttgctctccaacgttaacagaaacgctactgtagaaatgaccagaaggcatataggaaggggagtgcgcttgtattacataggtggggaagtgtttgccgagtgcctaagtgatagtgcgatctttgtgcagagccccaactgtaaccagagatacggctggcaccccgcgacagtgtgcaaaatcccaccaggctgtaacctgaagatcttcaacaaccaagaatttgctgctcttctggctcagtctgttaaccagggttttgaggccgtttatcagctgactcgaatgtgcaccataagaatgagcttcgtgaaggggtggggagcagaataccggaggcagacagtaacaagtactccttgctggattgaacttcatctgaatggccccctgcagtggttggacaaagtattaactcagatgggatccccgtcagtgcgatgctcaagcatgtcctaaagtccgtcagcagtggagctcattggaagacttaacgtaccaactcctccgccacagtactcgtgtgtgatcccgtggactgtgctagtcaaaacccagagcgaaaacagcacttgaggtctcatcagttaaagcaccttgtggagtctgtttcctacatttgaattttagatgggaaattagtgtctagaaatgccctcccagaggggacaaagaagacttaaagacttaatgatgtctcgttgggcataagacagtgtcccaaaggttattaataccagtagtagttgtgtacagtaacgtgtccagacccagtattgcagtgctctgctgtttgtataccttcttagtgtgcataaatgaggtgtgtgctgctgcttggtctaggcaagcctttataaaattacagtacctaatctgttattcccacttctccgttatttttgtgtcttttttaatatataatatatatatcgagattttcaaattatcatttagaagcagattttccttgtagaaactaatttttctgccttttaccaaaaataaactcgtgggggaagactcgtgcc

SEQ ID NO: 3368 - DNA, 1053 bp, Rattus norvegicus
  Genbank Accession No. NM_019195
gcggcgaccccccggcggcgcggagatgtggcccttggcggcggcgctgttgctgggctcctgctgctgcggttcagctcaactcctgcttagtaaagtcaaatctgtagagttcacgtcatgcaatgacactgtggtcatcccttgcaaagtccttaatgtggaggcccaaagcaccgatgaaatgtttgtgaagtggaagttgaacaaatcgtatattttcatctatgatggaaataaaaatagcactactagagaacaaaactttaccagtgcaaaaatctcggtctcagacttgctcaaaggcattgcctctttgacaatggatacccatgaggctgtggtgggaaactacacctgtgaagtgactgagctttccagagaaggcaaaacagttatagagctgaaaaaccgcccagtttcgtggttttctacaaatgaaaagatcctcattgttattttcccaattttggctatactcctgttctggggaaagtttggtatattaacactcaaatacaagtccagccatacgaataagagaatcattctgctgctggttgccgggctggcactcacactcatcgtggttgttggcgccatccttttcatcccgggagagaagcccgtgaagaacgcttctggtcttggcctcattgtaatctccacaggaatattaatactgcttcagtacaatgtgtttatgacagcttttggaatgacctctttcaccattgccatattgatcactcaagtgctgggctatgtccttgctgtggtcgggatgtgtctctgcatcatggcttgtgaaccagtgcacggcccccttttgatttcaggtttgggaatcatagctctagcagaattacttggactagtttatatgaagtttgtcgcttccaaccagcgaactatacaacctcctaggaataactgaagggaagtgacggactgtaacttgaaagtcagaaatggaagaatacagttgtctgagcaccatggccttcacaactcacagctggaaggaacacacaacagtgactgactttcatc

SEQ ID NO: 3369 - DNA, 2430 bp, Rattus norvegicus
  Genbank Accession No. NM_019201
acgaggcgcggctggcggcgcggtggcggctcggcacggcggtggccggtcgcaggcggccgggcggaatagcagactgcgccgaagccgccccaggcgcagggctcgcggcggcggagagcgccggactcatcggggcccgcggccacccgcgcctttcaatgggcagctcgcacttgctcaacaagggcctgccgctggtaagactttgaacccgacgcaggcttcagtggctgctgtggagcagaagcctgagagctttggttggagacaataagacgtgggatgaggctccgtgacagaacgcggttcggcctggggattctgaagacaaaaagctttggacaggcgaattcatggtcgtggaaaccccgccccaattaagcaatgtcaggcgtccgacctcccatcatgaacgggcccatgcacccccggcccctggtggcgctgctggatggccgggactgcacagtggagatgcctatcctgaaggatgtggccacagtagccttctgtgatgcgcagtccacacaggagatccatgagaaggtactgaatgaggcagtgggcgccctgatgtaccataccatcacactgaccagagaagatctggagaagtttaaagctctcagaatcatcgtccgaattggcagcgggtttgacaacatagacatcaagtcagctggtgatctaggcatcgcagtgtgcaatgtaccagcagcatctgtggaagaaacagcagactccaccctgtgccacattctgaacctataccgacgaactacctggctacaccaggcacttcgggaaggcactcgggtccagagtgtagagcagatccgagaggtggcttcaggagctgccaggatccgtggagagaccttgggcatcattggactaggtcgtgtgggccaggcggtggcacttcgggcaaaggcttttggcttcaacgtcctcttctatgacccatacctatctgatggaatcgagcgggccctggggctgcagcgtgtgagcacactgcaggacctgctcttccacagtgactgcgttaccctgcattgcggcctcaatgagcacaaccaccacctcatcaatgacttcacagtcaagcagatgagacaaggagccttcctggtgaacacagcccgtggtggcctggtggatgagaaggcactagcccaggccctgaaggaagggcggatccgtggcgcagcgctggacgtgcatgagtcagagcctttcagctttagccagggacccttaaaggatgcacccaacctcatctgcaccccccatgctgcatggtacagtgagcaggcgtccattgagatgcgagaggaggcagcccgggaaatccgacgagccatcacaggccggatcccagatagcttgaaaaactgtgtcaacaaggaccacctgacagctgccacccactgggccagcatggaccctgctgtggtgcaccctgagctcaatggggctgcctacagcaggtaccctccaggtgtggtgagtgtggcccccactggcatcccagctgctgtggaaggtattgttcccagcgccatgtccctgtcccatggcctgccccctgtggcccacccaccccacgctccttctcctggccagactgtcaagcctgaggcggatagagaccatacgactgaccagttgtagcctgtgaggagctctccagccttgacacctggtggagggagctgcacacccttggacccaagtgtgcagaggtgacatccagtgtggccctagcactccagagactggcccgggcgtgcaccaggcggggcaagaggaagcacgtccccaagttgattgtagttgtcccgtcctgtgggctggctcactgtcctgtgtcctttgcgttcctcgtttaagcaaaagaagttagtagctaattctatcacgaatgttcttgtctgtgtacagtttttagaacattaccaaggatttgtttgcttagctgtcaacaaaaagaaaacctgagggagcattcagcaagtcagtttgagattatttttccttttctacgttggaacgtgccccggaatgtggccgtcggcacacttctcaggacaatgaatccttcctgtttttctttttatgccacacagtgcattgtttttctatctgcttgtcttatttttagaataatttagaaaaacaacaaaggctgtttttcctaattttggcatgaaccccttgttccaaatgaagacggcatcgcgagtggctctgaggtgtgtctgcagtgcccagtgtgctcaggaccatcggggtctgtcctggggaaggcaggggttggcagacccttgcctacgtggtgccgtcctgctgatgtggtaggctagcaatattttggttaaaatcatgtttgtgactgtaaccatttgtatgaattattctcgt

SEQ ID NO: 3370 - DNA, 4372 bp, Rattus norvegicus
  Genbank Accession No. NM_019202
cctccacctctcaaatgctgggattgcaggatgtccccccacccctgctcccttgtgtccttgcttcctgctgccggaatgtatcacttaattgccaggtacccatggtctgattccaggatagaagggcgggcgagggggttggaggagaggcctctattatttccgcggtctggcaggcctggaagcaaagcttcaagtgcagaaggaggagtgtcggggaatggcagaaaaggctggaacagcaatgcagacctaggtaaagggcacagagctgagggaagctcctgggaggctccctgcagctcctgcctctgcacatgacccggactccttttctctctttggatctgcgtccagggactggcttgtacacacccctcccaggagaccccttggcagctgcacactcaggctccatccaagttggctctgcccctggggaaggctgctcaaaaggcctggctcccagtttctggggacccacagagagcctctcacctcgcagctcagctccatccgcctcctgtgcctggctgcgaccagctgggtctaactatagacagtcagcaacttcagccacttcaccgagtttcccaacagctttgagatttggaagccggaagcctgactgccttctcagaagctacggtccactacctcagccattctgttggagctgaactggcagatgaaggtgagacccaggcaccatggacctcctggtctcctcaggaatgaagggcatcgctgtcttccttgtctttatcttctgctggacaacctccaccctcagcagcttctggcagttccagaggatggtcaaacacatcacggggcgcagcgccttcttctcctattacggatatggctgctactgtgggcttgggggccgagggatccctgtggacgccacagacaggtgctgctgggctcatgactgttgctaccacaagcttaaggaatatggctgccagcccatcttgaatgcctatcagtttgccattgtcaacgggaccgtgacctgtggatgcaccatgggtggcggctgcttgtgcgggcagaaagcctgtgagtgtgacaaactgtctgtgtactgcttcaaggagaacctggccacctacgagaaaactttcaagcagctcttccccaccaggccccagtgtggcagggacaaactccattgctaggcaggccaccgtccctctgtcacctgctctagtctgagcccttctgaaaaaaactgtcttccccttcccctccaagagtccccaggctcctgcagctcagccttgctgtctagggagtgtcttctcaggcattaggggaccggaggtggagaattcctgccctggaatcagaccatgggtacctggcaattaagtgatacattccggcagcaggaagcaaggacacaagggagcaggggtggggggacatcctgcaatcccagcatttgagaggtggaggcaagaggtggggggtagcctccactatacggtaagttcaaggctaacctgagctacctgagaccttgccttgaaaaaacttttttaaaaaacgtttaaaggaaaagaaaacagaaagacacggggactgggctgaaaggtactctcaaaccgatttcccaggaagagcggagagccccaggttcagctccagcctgaactcccccataccctcagtcctggtcaggatgtgtgtctgactggggaaccaagtcctccacccgggtggagcttagctgggaactacgcaggtgtcctagaaaatacagtcctaagagcctcacccggagtctcatccccatttgctccaggactgacctctgtaaatcttccagcaggaagcaggctgtacccatctcaggaggtggggtgctgttagaacaatggtgtgcaccagtgacacaaagatgtcatggttaagatggcatcaagaagtggaaaggacattcggaacagtgggtccaaggcacccaaagtcctcaccccaatttagaagccgttggtcctgtaagacttaaatctactaaacaaggaaggtctaactgggctggaatctgaagttcatggtgccaggctggggcggtgggtggggacgtggccgtggccatgaccatgattgcctctctgcatggtgacacttgccttttgcaccctagctctcagcacatctgaaaaggacagactctcctgttcattccttgaatctgagactctcctcactaatgtagcaaaaatggaggtctaaagtgcaggcttcagcctctgaggtccagggcaggaggaagctggggctcagcctcctggaggatgagagcttgccgggtgagcatcagcgacagcagacccttgggctcagagagtccgcaagcctgggagagcctggccgagccctgactgcagcacacagagccgtgagcctcatacaagaagccacattttggggaagcttcagggtggctgattccacagctgttgggttcagaacggaagccgggagcactcactctcagatatggaagctttgttttacgagcgcttagcaccagttcaggatctgaacttcgtcctgaccggagagtccgtaccacatttttataggatgggaacacagagcgaggggcgtggagtaagctgttgaacgaccgatcatattttgacctaagaggttaagtaaggacgttaacatgggtgactgggcattagtcaggtcacctggttttggggtctttgaatcagctttcgtggccaggtcccttcctggactttggctcggaatttagaacgataagggaacgaagaggtgggcaagcttcgggcagtcagtaagaggcagcacattcatgacctgtgtgccttgtttagataatgggataagagtatctcctctcttacaccccttactggttaacagacaaacacgagacatctgaagaagcaggacaggagttaggttctggggcacaggaacatgaactcggttttgatcctgccggcaaggtggatcttgttcctgagaaggctggactcaggaaacttcctcttaacaagttagttgatggcgctggtccttagtcaccgatactgtcaggctctcagctcttgggccagacttggcggccatgggagtgtggtcacttgccccgtccccttcttccaggaggtactggggaaaatggttggatttgtggagttgtagggaacactcatggctcccttcacttagtaggtcagctaacatatgtgtatcgagcccataccgtgtgccatgtgcagtgctgagcagcagggagtcagagatttaaagacacacacacagacttcaagtctgagaattttgaatcccagggagaaccgctgagagccatggcgcttctaccaatgccagaggctaacacccggactgagaaaactaagcacgaggagacagcagggtcagcagagggcctgggagctagggccctgagcagtacctagttcaaatcacagagtcgtctttcttcctccaccctacccaggtacagcaagtagacacgggtgggggcagggcagggatgcaggaacattagggcacaccgatgtggctaggctaagctagagcatgttaccttctcaggggtcctgtcatgtcagagactggttccaacctggaaagatgtctgagtgacagctgtggtagaagaagagaggccagggtgatatcagcatgaagggctggattgctatgtgagatccagatctcttctgccactggggtcagcttctacacctggaaatagatgggctgcgttatggagggtggtgtgagtccctgtctgcgttgtgccgggaatcagagcagagtgttagcgctgtaaaaggacatgctggtgcttgcaggaaatcatcgatttcttggaagggcagccattcatctacaccagggattgactttatgccaggcttgtgatgagggtagaaaagtagaaattctgtccgctgcaaggagcagtcagaggacacaaggaccaaatagcttgggagttgcggaagtaggtgtctgctgagggagcagtgaccactgggggaaaggctccttcaaggaattcagggacaggggtgagggctgacatcttgcctgagaccctaaagaagagaaggagttgagagggctgagtatgctgtgtggagccccacccccacccccacccccacccccaccccaggtatatggatggaggataatgcgggggtcgggttcctctcaaatccatcatcccaccttcgagctgctggcacggccttgccagcacagcccgattctgtgttgacaaaatactcgaacgaaatgattacatgcaaataaaatgcaagaggaaaaatctaaa

SEQ ID NO: 3371 - DNA, 4301 bp, Rattus norvegicus
  Genbank Accession No. NM_019206
ggcacgagaagtcggaccctcccaccctgctcacaccctccaagtggtccacggagttccgagactttctgaagatagccttggataagaacccagaaacccggcccagtgctgcgcagctgctgcagcatcccttcgtcagtacagtcaccagtaataaggcccttcgggagctggtggctgaggcgaaggctgaggtgatggaggagatcgaggacggcaaggaggacggcagggaggacggcagggaggatgggaaagaggaggattgagacgagaaggatgctgtgagtgctgttccgcccccagtcaaccacactcaggactcctctgccaatggaactcagccaagcctcaactctgacaagcttctccaggattcttctacccccctgcctcccagccagcctcaggagcctgtgaacgggccctgtaaccaaccctcaggggatggatccccccagaacaccagccctgcagatgaggtctccaagaatgacaatggcttaaaggtacctgttcccctccggaagtcccggccattgtccgtggatgccagaattcaggtgaccgaagagaaacaaatcactgaccaggctgagaaccccagttctgcagccagcaaacccccgaaggtcaaccagagccgacctaacagcagcgccctggagactttgggtgtcgagactctggccaatggaggcctggagctccctggctctgtaactccaaaccattctaagagggcgtcggactgtagcaacctgtctacctcagagagcatggactacggcacctccttgtctgctgacctgtcattgaacaaagagacgggctcattgtctctcaagggctcaaaactgcacaacaagaccctgaagaggacccgccggtttgtggtggacggtgtggaggtgagcatcaccacctccaagatcatcagcgaagacgagaagaaagacgaggagatgaggtttctcaggcgccaggaactccgagagcttcggctcctgcagaaagaagagcatcggaaccagacgcagctgagcaccaagcacgagctgcagctggagcagatgcacagacgatttgaacaagaaatcaacgccaagaagaaattctatgacgtggagctagagaacctggagcggcagcagaagcagcaggtggagaagatggagcaggaccacagcgtgcgtcgcagagaggaggccaagcggatccgcctggagcaggatcgagactacgccaggttccaagagcagctcaagcagatgaagaaggaggtgaagaatgaggttgagaaactgccccggcaacagcggaaggagagcatgaagcagaagatggaggagcacgcacagaagaaacaactgctggaccgagactttgtagccaagcagaaggaagacctggagctggccatgaagaagctcacggcagaaaacaggcgtgagatctgtgacaaggaacgtgattgccttaacaagaagcaggagctcctccgagaccgagaggcagccctgtgggagatggaggagcaccagttacaggagagacatcagctggtgaagcagcagcttaaggaccagtacttcctgcagcggcatgacctgctgcgcaagcacgagaaggagcgggagcagatgcagcgctacaaccagcgtatgatggagcagctgaaggtcagacagcagcaggagaaggcgcggctacccaagatccagaggagtgacggcaagacccgcatggccatgtacaagaagagcctgcacatcaatggtgcgggcagtgcctccgagcagcgggagaaggtcaagcagttctcccagcaggaagagaagaggcagaaggcggagaggctgcagcagcagcagaaacacgagaaccagatgcgagacatggtggcacagtgcgagagcaacatgaacgagctgcagcagctgcagaatgaaaagtgtcatctgttagtggagcatgaaacccagaagctgaaggccctggacgagagccataaccagagcctgaaggaatggcgagacaagcttcggccacgcaaaaaggccctggaagaggatttgaaccagaagaagcgggaacaggaaatgttcttcagactaagtgaggaggcagagaccagacccaccacacccaacagagccagcaagttcttcccctacagctctggggatgcttcctaacacacacatgcctgggctgcggtgcggcagtacagccaccagggccaccaaccctctacaaacaagtgactcaggacctcttcctcttgcttctgtgccagctccaactacccagcaccccagttgcccacagcaccaccccagtgcttctgatggatgacctcatcccaactcagattcccatcacctggaagtgacctgggctgttggggtccgggaccgagcgggatgggcgtacccctcctgtttgccaaaacaccagctctactgtctgtgggcacaagcgctactgatgacatcaccacgaacccatccttattgtgatccttgtggttttttcttctccttcagtaattcctcacagtgttggaaaacatccctcagagccattttgcttctcagcagccagctctcaggggtgtccccattaccctgcttcgcacagctgactttgtgctcgatgagacgctgtgtatgtgggggtagggagtggggaaagggaggccagaaatgttcattctgctggtttctgacattttatgccatctcattttgcctctccctgtcacacacacacacacacacacacacacacacacacacacacacacacacacaatgcaaacacacaacttggccctcctgaacctgatcgtaggacacggagtacagagcatgtcaggtggagcagctgctggggcatgctgagtgctggccccaaagcccagagaaggcacaggctgtactgcagcctgcctgccactcgtttggctgcacacaggatcctgtgttcaggggtaaactcccctccacacttgtcttctgctgcctagcgcatgccaatctcgcccttgcccagttgttggcaagtactggggaaggctcctgacctttgacctttgccccagtcctgcactggagtcccactgtacatttccactaagccggacagtcctttggacttctctgtttaggaagagatgcttcccacccctgggaacagccgaagctcaggaaaatgccaagcctcgtgcctgggcctttgggttgctcaggtagcctcccaagatgctgcgccccataggctaccatgcccagaaaagcagctggtcggcccagccggcgttcgctgatagcgccttagggctcagttaaagcacaggtaaatggctggctgctttgtataccctccttttagacagcatcaccccagggattaggatgggatgggtgggggcggggcacccaggcagtggagtctgggagtggctgagacctcagcagtatttccccatcactgccccatgctgagacaaccttctaggacgtttcctcagatgctgactgggtgcttgggaggggagtgggctagtaaaacaaaataggaaaacaggtcttgggactcccagatcttgtgtgcagtaaggaagttcacagagccccaggaaggcgatagttctcagggtagcgagcgtcagcttgctttcaggccgcacaccgaggagtcttgaggaacagttgacttctttcttactggtgcatgggggctgggaaacacaagttgtcagagtgcagctgtgggactcagagatgggaagtgggcaaggccacgccctgcagggctctaccattgtttacaatgtacttggctgcattcgggggtggggggaacttgacagtggctattaggcaaaatgccggttttgtggttcaggtaacagtctttgaccactccctgacgtcattcgtactgtcctcctccttgttgcttccacacttagtcccacctgagctctggtacctctgctgtgccttttttgagtggggtctagccttgtcttccagcctcataatttaacctaagtgcaatgcctgccaccgacaaaggcccgtgaagtattcctcatgtcctgtgctaacgttttctgtataggaacaggcagaaatgtctttagcaccgcggatataactaacttatatttcccttcacgaaggatagaagtaacgggtgtgtcatttccaacggtcatgtataatttttgtaaactgttctctgcaaacaaaaaaaatgtaaatatgcttctaataaaataataaggt

SEQ ID NO: 3372 - DNA, 897 bp, Rattus norvegicus
  Genbank Accession No. NM_019213
cggcacgaggacgagagcacccgggaagagtcggcgccgctagtgccgggaccaggagcctccgcgagcaagatggccgctcccgagaccgaggccagggggcaggggtactaagtccggacccgcgtgcccttctcccggccgcctgcgccctcatcaagacctcgcgcttctagccaagacatctacatggattattctcgccgtggtcacgaggccgttccaatagagctctagttggcccagattgagaactctggcatttggctgctctgagctggaacctccgggaggtctgctgcaacaggtgcgaccctgaccgctccatgctcgtgggcgcggggaggcgtggcctcccccggggcggccacctctgttggttgctgtgcgctttcaccttaaagctctgcgaagcagaggccccggtgcgcgaggagaagctatcagtgagcacatcaacttcaccatgttggttggtagaagagtttgtggtgaccgaagagtgtactccgtgttctaacttccagattaaaacgacacctgagtgtggttctacagggtatgtggagaaaatcacatgcagctcatctaagaggaatgaattcaaaagctgccgttcagctcttctggaacaacacttattttggaagtttgaaggcatcgtggtgggggtagctttagtcttcgcttgccttgtcatcattcgtcagcgacagctggacagaaaggctcttgaaaaagtccggaagcaaattgaatccatatagctgaatctgctgtgtatggtgggtcccacggatgcatctcagatggagaaagttcagggctaatgtgccctcataagccttgtggtagtgcatcttcaatgactcctcttccaggccattaatgagcaca

SEQ ID NO: 3373 - DNA, 1356 bp, Rattus norvegicus
  Genbank Accession No. NM_019220
cccggagctgtcgatcggggacaaagcgcggccgcccgcgccccccgagccgcccgagccggggccagccccccgcgactgacatgatgtttccgcaaagccggcactcgggctcctcccacctcccccagcagctcaagttcaccacctccgactcctgcgaccgcatcaaggatgagttccagctgctacaagcgcagtaccacagcctgaagctggagtgtgacaagctggccagcgagaagtcagagatgcaaaggcattacgtcatgtactatgagatgtcttacggattgaacatcgagatgcacaaacaggctgaaattgtgaagaggctgaatgggatttgcgcccaggttctaccctatttgtcccaggagcatcagcagcaggtcctgggagctatcgagagagccaagcaggtcacggctcccgagctgaactccatcatccgacagcagctccaggctcaccagctgtcccagctccaggcgctggccctgcccctgacaccgctgcctgtcgggctccagccgccatccctccctgcggtcagcgcaggcacaggcctgctgtcactctctgctctgggctctcagacccacctctccaaggaggacaagaacggacacgatggggacacccaccaggaggatgatggagagaagtccgattagctcctggggagagggagggggaggggggataccaggggagacaggcacagagagcacagtgttctgagggccacactgcacacagctcggtccctacccaagcttccacctccagtcctggttccagctgtgcaccctgggcctaggagacgccagagggacagcccaggctacagggaaaattccccaccttcaacatttccccgggctacagccaccaatctcggcccagaatgtacacaacgctagccgcccctttccaccctgtgcaccccgaatttgccccctttccccttctctgcttcctgcactgcacacctgctaggcccagacccctccccccagctcacccagctctggttccctcaaccgcggaaagaaagcattggctcgggactgcagtgggggtgggcaccccacaaacttccctctccccttccccaaataaacgtgagggttaaaagtcggtttgtttattatttctttttcgtcccagtactctatagctaccatctaagagagaaaaagaaggaagccctggagcgagcgagggtctgtctgtgcatatagttagatttttctggtcgcctcgctttgcaccgagaggtggagggccgctgtactgagggtggggtctagctgtgccttcaaaataaaaacatgaaaaggtcaaaaaaaa

SEQ ID NO: 3374 - DNA, 1800 bp, Rattus norvegicus
  Genbank Accession No. NM_019222
  misc_feature (1)..(1800): n = a or c or g or t
ggagcggagagcggtgagcgacatgtccttccgaaaagttgtgcggcagagcaaattccggcatgtatttggtcagccagtcaagaatgaccagtgctatgaggacattcgagtctcccgagttacctgggacagtaccttctgcgcagtcaaccccaagttcctggcagtgattgtggaagccagtggtgggggtgcctttatggtgctccctctaaacaagacaggccgcattgacaaggcctacccaacagtatgtgggcacacaggacctgttctggatattgactggtgcccccacaatgacgaagtcattgccagtggatcagaggactgcactgtcatggtgtggcagattccagagaatgggctgacctcccctctgacagagccagtagtggtgcttgaggggcataccaagcgtgtgggcatcatcacctggcaccccacagcccgaaatgtgcttctcagtgcaggttgtgacaatgtggtgcttatctggaatgtgggcactgcagaggagctgtaccgcctagacagcttgcaccctgacctcatctacaatgtgagctggaaccacaacggcagcctcttttgcacagcttgcaaggacaagagtgtccgaatcatcgatcccaggcggggcaccctggtggcagaacgggagaaggctcatgagggggctcggcccatgcgggccatctttctggctgatgggaaggtgttcaccgctggtttcagccgcatgagtgaacggcaactggcactctgggacccagaaaactttgaggagcccatggccctgcaggagctggattcaagcaatggggctctactgcctttctatgacccggacaccagtgtggtctacgtctgtggcaagggtgattccagcatccggtactttgagatcacagatgaacctccctacatccactttctgaatacctttaccagcaaagaaccccagaggggtatgggcagcatgcctaagaggggcttggaggtcagcaagtgtgaaattgccaggttctacaaactgcatgaacgcaagtgtgagcccatagtaatgactgtgccaagaaagtctgacctctttcaggatgatctgtaccctgacacagccggacccgatgctgctcttgaggcagaggattgggttagtggtcaggatgctgatccaatcctcatctcactacgggaagcctatgtgcccagtaaacaacgggacctgaaggtcagccggcgcaacgtgctatcggacagcaagcctgccggttacagccgctccggagtctccacagctactgcaattactgacattcccagtggcaaccttgctgggtctggtgaagctgggaagctggaagaggtgatgcacggacttcgggcacttcgggtgctggtcaaggaacaaggggagcgtatcagccgcctggaggagcatctgggccgcatggagaatggggatacataggaccaccagggacctgctcccgatactgcctccttctcctccaacccttcccacctagcttctgtggccaggtcacaccaggcagtttgctgctcagtgcctctgtggcaggtcatggccagtttgcacctctccacagcctggggcncaggttggaagcaccacctggcttttggaagatttttgtaccaaggcaaattccaagtactctaagggaccatctcctcgacttgcccaacccactgccccctcactagaaaaagcagcagagatgggttctatattttcattccaaataaaagctctttctaaagccaaaaaaa

SEQ ID NO: 3375 - DNA, 351 bp, Rattus norvegicus
  Genbank Accession No. NM_019223
atggcggcggcgctgaccttccgccgtctgttggctctccctagggctgcccggggtttcggggtgcgagtgtcgctgagcggggagaagatcacgcataccggccaggtgtctgatggaaaagactacagggggattcgttttgtagatcgtcagaaagaggtgaatgagaactttgccattgatttgatagcacaacaacctgtgaatgaggtggaccgtcgtatcatagcctgtgatggagggggtggagccttgggccaccccaaggtgtatataaacctggacaaagaaacaaaaacgggtacgtgtgcctactgcggcctgcagttcaagcagcagcatcactag

SEQ ID NO: 3376 - DNA, 3726 bp, Rattus norvegicus
  Genbank Accession No. NM_019229
atgcctcacttcaccgtggtgccggtggacgggccgcgacgcggcgactatgacaacctcgaggggctcagttgggtggactacggggagcgcgccgagcgggaagactcggatggacagggtaaccacagagagaatagtcccttccttagccctttggacgcctccagaggaaatgactactatgaccggaacctggcactgtttgaggaggagctggacatccgcccaaaggtatcatctctcctgggcaagcttgtcagctataccaacctcacccaaggagccaaggagcacgaggaagctgagagtggagaaggtggccgtcggagagccgccaaggcacccagcatgggcacccttatgggagtgtacctgccctgcctgcagaatatcttcggggtcatcctcttcctgcggctgacctggatggtgggcacagctggcgtgctgcaggctctcctcattgtcctcatctgttgctgctgtaccctgctgacagccatctccatgagtgccatcgccaccaatggtgtggttccagctggtggctcttacttcatgatttcccgctctttgggaccagaattcggaggtgctgtgggcctatgcttctacctggggaccacatttgcagcagccatgtatatcctaggagccattgagatcttgctgacctacattgctccaccagctgccatcttttacccatcgggcacacacgacatgtcaagcgccaccttgaataacatgcgggtgtacggaaccattttcctgactttcatgaccctagtggtgtttgtcggtgtcaagtatgtgaacaagttcgcctcactcttcctggcctgtgtgatcatctccatcctctccatttacgtgggaggcatcaagtccgcttttgaccctcctgtttttccggtgtgcatgctgggcaataggactctgtctcgggaccagtttgacatctgtgccaagacagttgtggtggacaatgagacagtggccacccggctgtggactttcttctgccacagccccaaccttactgctgactcctgtgacccctacttcctgctcaacaatgtgacagagattcctggcatacctggggcagctgctggtgtgctccaggaaaacctgtggagtgcttacctggagaagggtgaggttgtggagaagcatgggctgccctccacagatacccttggcctgaaggagagcctgtccctgtatgtggtggccgacatcgccacatccttcaccgtgctggttggcatctttttcccttctgtaacaggcatcatggctggctcaaaccgttccggggacctccgtgatgctcagaagtctatccctgtggggaccattctggctattgtcaccacttcactcgtgtacttcagcagtgtgattctcttcggtgcctgcatcgagggtgtggtgctccgggacaagtacggtgatggcgtcagcaggaacctggtggtaggcaccttggcctggccttcaccttgggtcatcgtggtcggctccttcttctcaacatgtggtgccggcctccaaagtctcactggggcgccacgtttactgcaagccattgccaaggataacatcatccccttcctccgggtgtttggccacgggaaagccaatggtgagccaacgtgggccctcctcctgacagcgctcatcgctgagctgggcatcctcatcgcctcccttgacatggtggcccccattctttccatgttctttctgatgtgttacctctttgtaaacttggcctgtgctgtgcagacacttctgaggacccccaactggcggccccggttcaagtactatcactgggcgttgtctttcctgggcatgagtctgtgcctggctctcatgtttgtctcctcctggtactacgccctagtggccatggtcatcgcaggcatgatctacaagtacatcgagtaccaaggggctgagaaggagtggggtgatgggatccgaggcctgtccctgagtgccgcacgatatgcactgctgagactagaggaagggcctcctcacacgaagaactggcggcctcagctcctggtgctgctgaagttagacgaagatcttcatgtgaagtaccctcggctcctcacctttgcctcccaacttaaggctgggaaaggcctgacaatcgttggctctgtcatccagggcagctttctggagagctatggggaagcccaggctgctgagcagacaatcaagaacatgatggagattgagaaagtaaaaggcttctgccaggtagtggtggccagcaaggttcgagaggggctggcccacctcatccagtcttgcggcctgggtggcatgagacataactccgtggtgctgggctggccctatggctggcgacagagtgaggacccacgtgcctggaagacctttatcgacactgtgcgctgcaccacagctgcccacctggccctgctggtgccaaagaacatagctttctaccccagcaaccacgagcgctacctggagggccacattgatgtgtggtggatcgtgcatgacggaggcatgctgatgctgctgcccttcctgctgcgccagcataaggtttggaagaagtgccggatgcgcattttcaccgtggcccagatggacgacaacagcatccagatgaagaaggatctggccatcttcctgtatcacctccgcctggaagctgaagtggaggtggtagagatgcacaacagtgacatctcggcctacacctacgagcggacactgatgatggagcagcggtctcaaatgctgcgacagatgaggctgaccaaaacagagcgggatcgagaggcccagctggtgaaggacaggcactcggctctgaggctagagagcctctactccgacgaggaggatgagtctgtgacaggcgctgacaagatccagatgacatggaccagagacaagtacatggctgaaccctgggaccccagccatgcccctgacaacttccgggagctggtgcacattaagccggaccagtccaatgtgcggcgtatgcacactgctgtgaagctcaatgaagtcattgtcacacgctcccatgatgcccgcctggtcctactgaacatgcccggcccccctaagaacagtgagggtgatgagaactacatggaattccttgaagtcctaaccgagggccttgaacgggtgttgttggtgcgtggtggtggccgggaagtcatcaccatctattcttgagcccgatggagtcttgtggcctggagttgggttgtctaagacaacagtgcccagccttgcacctacttgccagttctgccttgcccagccttgctttggactagctttgctaggtctccagggaaaccaagcttgggccttgcaatgggaatggatccgagggcccacgggacctggaggatttagggactttcccctcccatactccaagggaggcctctcctgactcgagatgactggtgagggctgatgtgggatttgaagtcccagactggctcacaagtgctatttattgtatatttattgtgtggatgtcatcatttcagaaaggggggagacaataaaagggggagccgagctgggcctgtctgcaggaagatctggctcaggctgctgtgggcagcatcaagccaagtggaatggagctggccaagctgagcctgacttttttcaataaaacctcgtgcc

SEQ ID NO: 3377 - DNA, 1547 bp, Rattus norvegicus
  Genbank Accession No. NM_019237
ctgctgctgctgctgctgctgctgttgctgctgctgctgtttccagcactccccctacacaatgctgcctgctgccctaacctccctgctggggccattccttctagcctgggtgctgcctcttgcccgaggccagacccccaactacacgagaccagtgttcctgtgtggaggggatgtgaccggggagtcgggttacgtggcaagtgagggtttccccaacctctaccccccaaacaagaagtgcatctggacaataacggtgcctgagggccagactgtgtccctgtccttccgagtctttgatatggaactccacccttcctgccgctatgatgctctggaggtctttgctggatccgggacctcaggccagcgacttggacgcttctgtggcaccttcaggcctgcgcctgtagttgcacctggcaaccaagtgactttaaggatgacaactgacgagggcactgggggacgaggattcctgctctggtacagcggtcgggccacctcaggcactgagcaccagttttgcggggggcggatggagaaggcgcagggaaccctgaccacgcccaactggcctgagtcggattaccccccaggcatcagctgttcctggcacatcattgcaccctcaaaccaggtgatcatgctaaccttcgggaagtttgatgtggagcctgacacatactgccgatatgactctgtcagtgtgttcaatggagctgtgagtgacgactcaaagaggctggggaaattttgcggagacaaggcccctagccccatctcttccgaagggaatgagctcctggtccagtttgtatcagatctcagtgtcactgccgatggcttctcagcctcctacaggaccctgccacgggatgccgtggaaaaggagtcagccccaagtccaggggaggatgcacagcatggtccccagtcccgctctgaccctaagacaggaactgggcccaaagtcaaaccacccagtaagcctaaagtccagcctgtagagaaacctgagggctctcctgctacccaggcaactccagttgctccagatgcccccagcatcacttgcccaaagcagtacaagcggtcaggcaccttgcagagcaacttttgctccagtagcctggtggtgacaggaacagtgaaggccatggtccggggcccaggggagggcctcactgtcaccgtcagtctcctgggtgtctacaaaaccggagacctggacctgccctctccagctagtggcacctctctgaagttctatgtgccctgcaagcagatgccccccatgaagaaaggagccagttacctgctgatgggtcaggtggaagagaacagaggccccatccttcctccggagagcttcgtggtgctctacaggcccaaccaggaccagatcctgagtaacctaagcaagagaaagtgcccctcccagcctaggccagatgcctgatgtcctcgccagatcagagtgtggtgcttttatccaaataaatgtttcttgactcaggaaggaaaaaaaaaaaaaaaaa

SEQ ID NO: 3378 - DNA, 1662 bp, Rattus norvegicus
  Genbank Accession No. NM_019238
ggccccgctcctcgccctgcctaccgccggcatctaaacacaggtgggagtgggagatcccgacaggtgagccccgcgccccgcagccacaaggatggagttcgtgaagtgtctaggccacccggaggagttctacaacctgctgcgattccgcatgggaggccggcggaatttcatacccaagatggaccggaactcgctcagcaacagcttgaagacttgctataagtatcttgatcagaccagtcgcagcttcgccgcggttatccaggcgctggatggggacatacgtcatgcggtgtgtgtgttttacctgatcctccgagccatggacacagtggaggatgacatggccatcagtgtggagaagaagatcccactgctgcgaaactttcacactttcctctatgagccggagtggcggttcaccgagagcaaggagaagcaccgagtagtgctggaggacttccccacgatctccctggagtttagaaatttggctgagaaatatcaaacagtgatcgctgacatctgtcacaggatgggatgtgggatggcagaatttctaaacaaggatgtaacctccaaacaggactgggacaagtactgtcactatgttgctggactggtgggaatcggcctttctcgcctattctctgcctcagagtttgaagatcccatagttggtgaagacacagagtgtgccaattctatgggtctgtttctgcagaaaacaaatatcattcgtgattatctggaagaccaacaagaaggaagacagttttggcctcaagaggtatggggcaaatatgttaagaagctggaagactttgttaagccagagaacgtagatgtggccgtgaagtgcttgaatgaactcataaccaacgccctacaacacatccctgacgtcatcacctacctgtcaaggctccggaaccaaagtgtgtttaacttctgtgccattccacaggtaatggccattgctacgctggctgcctgttacaataaccatcaggtattcaagggagtagtgaagattcggaaggggcaagcagttaccctcatgatggatgccaccaacatgccagctgtcaaagctatcatataccagtacatagaagagatttatcaccgggtccccaactcagacccgtcagctagcaaggccaagcagctcatctccaacatcaggacgcagagccttcccaattgccagctcatctcccgaagccactactcccccatttacctgtccttcatcatgctcttggctgccctgagctggcagtacttgagcactctgtcccaggtcacagaagactatgtccagagagaacactgactttgtttagctggaagcggaagtccacgtgaagtgggtttttcttcttcccccagctggattttgacttcccttggtttttccttctactctaatctttcggagaactgagtgtgggacctttaggaactctgaagaggaaaggacgccttgccctcagcagcctggtgcttcctggatgtggtccctgcctcttgtagccactggcatcatgttgaccgaagcactggaaaggccacatgtgatcctagtgaacctggctagaatgctgattgaatctatttaatttgaaacagcctttgaatacctatcacagt

SEQ ID NO: 3379 - DNA, 1736 bp, Rattus norvegicus
  Genbank Accession No. NM_019242
tctcacccgcgccgctcctcgcctctcttgttagccggagactcgcctctcagccgcccgccgcacagacgcacgagtatacagtgcagctccatcggctgatccttgctgagctccaagtgtaggcggcaccgggcggcccacgatgccgaagaacaagaagcggaacgctccccaccgcggtggcgggggtggcggcggctccggggcagcgacgtcggcggccacgacaggtggcccgcatcggactgttcaacctttcagtgatgaagacgcatccattgaaacaatgagccactgcagtggctatagcgatccttccagtttcgcggaggatggaccagaagttcttgatgaggaaggaactcaggaagacttagagtacaagttgaagggattaattgacctaacccttgataagagtgcgaagacaagacaggcagctcttgaaggtgttaaaaatgcgctgtcttcaaaagtgctgtatgagtttgttctcgagagaagaatgactttaactgatagcattgagcgctgtctgaaaaaaggaaagagtgatgggcagcgcgcagctgcagcgctcgcgtccgttctttgtattcagttgggccctggattggaaagtgaagagattttaaagactcttggaccaatcctaaaaaaaataatttgtgatggaacagcgagtatccaggctaggcagacttgtgcaacttgctttggtgtttgctgttttattgccacagatgacatcactgagctgtattcaactctggagtgcttggaaggtatcttcaccaagtcctaccttaaagagaaagacacgaacgttccttgcagcactcctaatacagtgcttcacatcagctcgcttctcgcatggacgctactgctgaccatatgcccaatcagtgaagtgaagaaaaagctggagctgcatttccataaacttccaagcctcctttcttgtgatgatgtaaacatgagaattgctgctggcgaatctttggcacttctgtttgaattggccagaggaatggagagtgactttttttatgaagatatggattctttgacccagatgctccgggctctggctacagatggaaataaacaccgtgccaaagtggacaagagaaagcagcgctctgtcttcagagacgtcctgagggctgtggaggaacgggattttccaacagaaactgttaaattcggtcctgagcgcatgtatattgatagctgggtcaaaaagcacacctatgacacgtttaaagaggctcttggatcagggatgcagtaccacttgcagacaaatgaattccttcgcaatgtatttgagctggggccccctgtgatgctcgatgctgcaacacttaaaaccatgaagattcctcgttttgaaaggcatttatataactctgcagctttcaaagctcgaacaaaagcccgaagcaaatgccgagataagagagcagatgttggagaattcttctagatgtctgtctttgatgtctgttttctaatttcttcctttattattatttttgctacttctaatgtacataagcttttagagacttttttatcttggtcaacttagataatttttgatgtagggatgggttatattttaatttaatgtacagtgttacaaattaatgagttctttattctgtaaaaataactgataaccacaaataaaagtgtttgtgatgcttggtcaaaaaaaaaaaaaa

SEQ ID NO: 3380 - DNA, 5825 bp, Rattus norvegicus
  Genbank Accession No. NM_019243
cagcgcccaggaggaggaggcggagagtcgctcccgccggccgagcatggggcgcccggcgccgaggccgctgctgctggcgctcctatcgctggctgtctgccgcgggcgtgtggtgagagtccctgcgggcaccctggttcgagtggtgggcactgagctggtgatcccctgcaatgtcagtgactatgatggccccagtgagcaaaactttgactggagcttctcgtcttcgggaagcagctttgtggagctcgccagcacctgggaggtgggcttcccggcgcagcagtaccgtgagcggctgcagcggggcgacatcctgttgaggaggacagccaatgatgctgtggagctgcacataaagaatgtccagccctcggaccaaggccactacaagtgttcaactccaagcacagacgccaccgtccagggcaactatgaggacacaatgcaggttaaagtgctggcagatgccctggtggtgggccccagctcccggcctcctccaggcctgagcctgcgcgagggggagccctttgaacttcgatgtatcgcatctactacgtcaccgttgcacacacacctggcacttcggtgggaactgcaccgtggcccagtgcaccgaagcatcctagccctaagccacgagggcaggtttcacccaggacctggctatgaacagcgctaccacagtggggatgtacgcctggacacggtgggcagcgatgcctaccgcctctccgtagcccgggcactctctgcagaccagggttcctacagatgtgtggtcagtgagtggatcacagagcaaggcagctggcaagaaatccaagaaaaagctgtggaagtggccactgtggtgatccagccaacagctctgcaactggccgtgcccaggacagtgtctgtgaccgaaggaaaggacctggacctttcttgcaacatcacaacagaccgtgtggatgatgtccggcctgaggtgacatggtacttcaaaaagacacccgatacctctttgcttgcctcccatatgctggctcggctggaccgtgattccctggtacacagctcaccacacgttgctctcagccacgtggatacccgctcttaccatctactggtgcgagatgttagcaaagaaaactccggttactatctatgcctcgtggccctctgggctcctggacacaaccggagctggcacaaggtggcagaggccatgtctgccccatctggtgtaagcgtgacctggctagaaccagaataccaggtctacctgaatgcttctaaggtccccgggttttccgacgaccccacagaactgcaatgccgggtgatagacacgaagcgtgtggatgccggtgtccgacttactgtgtcgtggtactatagaatgaaccgtcgcaatgatgacgtggtggccagcgagcttctcgccgtcatggacggggactggactctgagatacggggagagaagcaaacagcgggcccaggacggcgagtttatcttttctaaggagcacacagacacattcagtttccggatccaaaggactacggaggaagacaggggcagttattactgtgttgtgtctgcctggaccaggcagaggaacagcagctgggtgaagagcaaagatgtcttctccaagcccgtcaacatattctgggcctcggaagattctgtgctcgtggtgaaggcacggcagccaaagcctttctttgctgcagggaatacatttgagatgacttgcaaagtgtcttccaagaatattaagtctccacgatactctgttctcatcacggctgagaagcctgttggggacctctccagtcccaatgaaaccaagtacatcatctccctggaccaggattccgtggtgaagctggagaactggaccgacgcatctcgggtggacggcgtcgtgttagagaaggttcaagaggatgagttccgataccgaatgtaccagactcaggtctccgatgcgggcctgtaccgctgcatggtgacagcctggtctcctatcgggggcagcttgtggcgagaggcagcgaccagtctttccaatcctattgagattgacttccaaacctcaggtcccatatttaacgcctctgtgcattcagacactctgtccgtcacccggggagatctcatcaagttgttctgtatcgtcactgtggacggagcagtgctggacccagatgacatggccttcgatgtatcctggtttgcagtacactcttttggcttggacaaggctcccatcctcctatcctccttggaccggaagggagtcgtgactacaggccagagggactggaagagtaccgtcagcctggagcgagtgagcgtgctggaatttttgctgcaagtgcatagctctgaggaccaggactttggcaactactattgttctgtgactccctgggtgaggtcaccaactggttcctggcagagggaagccgagatccactccaggcccatctttataactgtgaagatggatgtgctgaacgccttcaagtacccgctgctgatcggcgtgggcctgtccacagtcatcgggctcctgtcctgcctcattgggtactgcagttcccattggtgctgtaagaaggaggtgcgggagacgcgtcgggagcgccgcaggctcatgtccatggagatggattaagcagttggagggacagaggaacgttgtaggagcagtggggtggggggtgagaagaggactctgagattttacaaccgagtgtgttacactaaaaccggtcctctctaatctcaggtgggactcagcgctctctcttttctgcatgtcaagttccgagcgcggacatgtttaccagcacacggctcttcttcccacggcactttctgatatgtaacaatcgagtgtgtgtctccccccccccgctgaagctgtttaatggttaacccccgtctaattagttttctcctagcagcttatcgatcctctgattcacgtgtgttgatcacttttgatttaagggatcgcagtgaggaagggcgaaagcattcagagttggtcatcatgagtaagagggtacctgcccacccgaaagccagcatccacaagcagccatctggagagctgctacctgctgctctctaccctggcccagaactgatagagacctgtgccaaggcaagctgtggctatgactaccctgcccatcccccattgtcaggagtttaaactatattggaacctaaactctataacttcttgaccccataagccttttgtttccctttctcctctaccctcttctgttttcgggtttgtttctgtgagagtgaggatatggcagccctggagtctagaatttggctttccaccaagcaccttatctcgccaccttagccttaagaatgagtatgaagaaaaatccaccaccacctctgtccagggcaggtctgtgaggagaggacactggggaaggaaaggcacagatgcttgcttacttgctcactctgtagttctgaggccgctgtgcctgctccaggaatcccagggtgagtgggagcagagggcatctgagttgtgccgctgagccaggtgccctgtcccttcatgagaggcactgtcccttgtacccccaggaccagcatgggagccacaaatgtgccacattgagctccttcccaggaaggcagattgctgcctgccagactgactgacttcaaggaatcagaaattgcctggagcaagcgtgtgttctctgtgacctttttcagtccttgaagtctttttaagatccccgcagggggtggtgaagaggggtatactttgtggacggtttgctttcctattagaaacacaaagggaacccagcaatttagtgttatgtgaatggcctgtaaaataggattgaaggcagccggctctgcctgactgggcccagcaggaataggacagagggcaggcacaccttccaggtcaccagtgcctgctccatcagggcctcagccatgcaaagtctctcgccctagcatagccttccaggagcctccgataggtactgaggctcatcagccacccggtaccctcaccctaccctctacctctgaaggatttaacattgttgtcttccaaaggggagtgggggaggagagctcctttctcttaagcaataaagtaataagaaaagatggccattcacgggcagctctagtcaccatgggaccggatgcgctgagctcccccctccccaccttctctccatgtggcccatggtggcttttgtatttgccacccagtttcctctgcttgtttcgagcccaccttggagactgctcttatgatgagattctgagccggtggctctagcccaggtggggggtacaggtttagagtcggtagcaagaagagggacagcaggtgcaccccacacaagcaagagaggccagagaaagaggggaggcttcggaagacatggctgttctacatgtcgctctcttattgctagctcagacgtgaggcacaggtgactgtacaaacaggaattaggggagtagaaccaagtattaggaacttcaagcctgtgccattactggagaagattcagggcctttgcagtgcagccctccttaggaggacaagagagatttagccttggatgagttgaggtgagccctagctgtacatgaacccacagaggtccaagcgggtaactgatggtgagagatgagtgatcggtcctaccttcccctttcccttttgtctgatgttgagatttgaacctgagttgtggaggtcatgcccaaacccctccatgttgcttagggctggaagagggaccagaaaccccaggacctagttccttttgggaatattggcattctggggtatgtgtctttttaagtgtggtcaaacactcttgatgtaccaaatagtgttccccgtgaagcgctcttcctgaggctcccacccagcaacactggtctgagggaaggaaaggccaaaccaggcctgggcacatgaaattgcacttcttaaagagaaactttttagaaggttgggtatttttcttaatcacaaaaatctcccactgaaagaacctaagctacattcagatcgaagcctctaaattaaattgtttactttacaatgtttacacacatgactcacttttttagaaaaataagaaaactgcaaactccggctttttaacaacttttcagctttttcatgcatgggatagatatgctggcaacctgactcaccagctggatcaaatcctcatttagaaatgtcccgatatgtggatatatgtgtcttcccccctcccaaccacacagctccctcctgcccagacctctgtctgtttctctggtggcttttgcctcctgctttgcagaccgcctgcagccatgattttgttacggcatccacgagccaaagactgcgccttgggagcaggaacaataagcaatactacaccactcgctactgtcgggggtctttttctctttcttttcttttttagcttcactgatggcaacagaggaagaaaggaattgaggtttaggcaagttctcttcccctgtgtgaccagattctcggtgacacacagttgtgcagatcactaggagaacaaggttgggttttcttttctagtgtgtaacacaaggatctgcaggattttccgtagacaaagaggtctcgtgtatttttgtccctatccaaggttatacaaactaattgtgttgttttatactgtggccacaaatattatgcaatgcaccatttgtttttgtttttattttattaaaggaaatttaattta

SEQ ID NO: 3381 - DNA, 2781 bp, Rattus norvegicus
  Genbank Accession No. NM_019257
cgtggatttcacacaggatagcaattacctgttgactggaggacaggacaaactgctgcgcatatacgacttgaacaaacctgaagcagaacgaggagttgagttcgtgtgtgtagggaggcagacagctccgacgcagactacggacctctccaggtctcagccgtcaaagaccctgtccggtaggaaacactagccggggatcatgagtggctgtcgagtgttcattgggagactaaatcccgcagcgagggagaaagatgtggaaagattcttcaagggttacggacggatcagagatattgatttgaaaagaggttttggttttgtggaatttgaggacccaagggatgcagatgacgctgtttatgaacttgatgggaaggaactttgcagtgaaagggttactatggaacatgctcgggctcggtctcgaggtggaagaggtagaggacgatactccgaccgttttagcagtcgcagacctcgaaatgatagacgaaatgctccacctgtaagaacagaaaatcgacttatagttgagaatttatcctcaagagtcagctggcaggtttgttgaaatacagttttgatattttaatgtggcatttaagaatgttaatgggtagttaatgttttattaatatatcttaaattattgctttatcttaaattaatggatttaattcaattataattttaaactttagttaaatgtaactgggggatgtttcagattttaatattagtgatcaaatgtaaatgttttgaggttattttttcatgttttttaaaatcaattttaaccaaatattaaaccctttatttgccagcctatctgtgtcgttggccttatgacgaggagtgcctgtgggttatcctaatcgttgtcttggtcactcttggttgggcctggttgactttgccagtcagctcctacagtgatcagttggccacctctagagatctgtgtttgccggtctagacgtaatcggtgcacttacttgaagtgccgggttgcagcgattccagaacgttgataacgtgatctgatccctaagttgagagctgtcttcctgtaacgcttccgaataagaggtcctggtcgaaagagttgaaagatacgaaattagttggtcgttggaatcctgatcgcagtaaagtggtccttggtaactgcacacgagtaaaacatgtctgcatcgccagtagtctgctaatagggagggctgtgcgattaaaggcttccatcgattgggtagtatccttcaagtgggtggcgaagagccagtcgggcctatgtcatgaaggtttctccgaccgcttaatggtttgctgcttgactgagcctagggaaatgttaataaaggtaaagtaaatttttttaatgacatatggggcacaaaataactggtgtctttgtaaatgttgttttacttttttttttgtttttgttttttttaaatataagactagtctttaaaagatgtactgttcctttttgtttttttgttgtttgttttgtttttttgtttgtttttccccctttttgtactgagctcagttagactaatactataatgttaaaaactggaatttcctctagcattttgcttaaaagcaatatgctatttgcttatttcgtgccctggcatactttttgaattccgatagaatacaagtgtggtatatgccatgtttgtactatctaacaacttctcttccagtagtcttgtttataccatgtggttgtttgtgtgtcacttttccctttctctccttaacataattgtcttgtgttaaggatctcaaaaagatttcatgagacaagctggggaagtaacctttgcggatgcacatcgacctaaactaaatgaaggggtagttgagtttgcctcttatggtgacttaaagaatgctattgagaaactttctggaaaggaaattaatgggagaaaaatcaaattaattgaaggcagcaaaagacacaggtcaagaagcaggtcacgatctcggaccaggagttcctctaggtcccgtagccgatcccgttcacgcaggagcaagtcttacagccgatcaaggagcaggagccggagccggagcaagtcccgttctggtagtaggtctcccgtgcctgagaagagccagaaacgtggttcttcgagtagatctaaatctccagcatctgtggatcgccagaggtcccgatcccggtccaggtccagatcagttgacatggcaattaattaaactgtaaataacttgcctgggggcctttttttaaacaaaacaaaacaaattcccaaaccatacttgctaaaaattctggtaagtatgtgctttttctgtggggtgggatttggatggggttgggctggatttctttgtagatgtggaccaccaaggggttggtgaaaactaattgtattaaatgtcttttgataagccttctgctcacacttttgtgactgtctgaagtatatagttgtgtatatgatagagctcttttataactaaacgatttaattttttgtactgaaaaaatttgaatattttagttcatgttcagatatgttaacataagattagtttaatttgctcaattaaactaatgaatagctttggacactttaaaagagctctaaatttgcttgtatataaaagcttagtttgagttttccttgttagggtcaagggtgtcttcttgcccattaacagctgtagatagacttaaagcagctgtttgttactgataataaaatactaagtattataaaa

SEQ ID NO: 3382 - DNA, 1124 bp, Rattus norvegicus
  Genbank Accession No. NM_019259
cggcacgagccggtcgtccttccctttgcacgtgtccaccccgcgatgctccctctgctgcgctgcgtgccccgcgccctgggtgccgccgccacgggcctccgagcctccatcccggccccgccgcttcggcatttactgcagcccgcgccccggccatgcctccggcccttcggtttgctcagcgtacgagccggctccgctcggcgctctggcctcctgcagcccccaggttcctgcgcgtgcgctgcggctctgcacacggaaggagacaaggcctttgttgaatttttgactgatgaaattaaggaagaaaagaagatccagaagcataagtcccttcccaaaatgtctggagatggggagctggaagtgaacggcacggaggctaaattattgcgcaaagttgccggagaaaagatcactgtcactttcaacattaacaatagcatccctccaacctttgatggtgaagaggagccctcacaggggcagaaggccgaagagcaggagccagaactgacatcaactcccaattttgtggtggaagtgacaaagactgatggcaagaagacccttgtactggactgccactatcctgaggacgagatcggacaccaagatgaggccgagagtgacattttctctattaaggaagtgagctttcagaccactggtgactctgagtggagggatacaaactacacactcaacacagactccctggactgggccttgtatgaccacctaatggatttccttgcggaccgaggggtggataacacttttgcagatgagttggtggagctcagcacagccctggagcaccaggaatatatcacctttcttgaggacctcaaaagctttgtcaagagtcagtagaactgtgagactgagggctctaatataaacggccagctctcctgggcgagcaaaagctgccttgacctcacaactatgctttgccctggctgtcatcctaatatatgggggaaagcaagtttaaattatcgccgttacacctccatttacgattcctttgggctcttttcctgtacacatctattatttgtagatttttgtagtacatgatgatgaacaataaactgacttcctcgtgccga

SEQ ID NO: 3383 - DNA, 1136 bp, Rattus norvegicus
  Genbank Accession No. NM_019262
gggcttcttggacgtttttgggaggggacagcaagggaaggtccttctgcctctagggacccagacttccgctttctgcagacagcagcaggctctgggctctgggaatccactgctgtctggcctagaagcatcatagaacacgaggattccatacacaggaggcccctgaagctgagctgagctgatgaagacacagtggagtgagatcttgacacccctgttgctgctgctcctgggtttgctccatgtctcctgggcccaaagcagctgtactgggtcccctggcatccctggggtccctggcatccctggggtccctggctctgatggcaaaccaggcactccagggataaaaggagagaaagggctccccggactggctggagaccatggtgagttaggagagaaaggggatgcagggatccctgggatcccaggcaaagttggccccaagggtcccgtcggccctaagggtgctccaggcccccctggaccccgcggtcccaaaggtggctctggagactacaaggctacccagaaagtagccttctctgccctgaggacggtcaacagcgccctgcgaccaaaccaggccattcgcttcgaaaaggtgatcaccaatgttaatgataactacgagccgcgcagtggcaagttcacctgcaaggtacctggcctctactacttcacctaccacgccagttcccgcgggaatctgtgtgtgaacatcgtgcgcggccgcgaccgagaccgcatgcagaaagttctcaccttctgcgactatgcccaaaacaccttccaggtcaccacgggtggggtagtcttgaagctggagcaggaagaggttgttcacctgcaggccacagacaagaactccctgctgggcgtcgagggagccaatagcatcttcactggctttctgcttttccctgacatggatgtatgatcacggggtcaaatcactcctatccaaaacctcctccctgccagtaatcctccctggaccccagacactgccctttgactgcccaaagccctgaccagagccctgtagatgttacagaatgggtaaataaactcttcaaggccaagaaaaaaaaaaaaaaaaaaaaaaaaaaaaaaaaaaaaaaccc

SEQ ID NO: 3384 - DNA, 3037 bp, Rattus norvegicus
  Genbank Accession No. NM_019269
gaactcacgagcctcgcacgcagaggccctcagcgccccgtttcccgctctgcggtatccccagatccccggacgggtgctgtgggaggctgaggacggcatgcgggactacgacgaggtgaccgccttcctgggcgagtgggggcccttccagcgcctcattttcttcctgctcagcgccagcatcatccccaatggcttcaatggtatgtctatcgtgttcctggcggggaccccggagcaccgttgccttgtgcctcacaccgtgaacttgagcagcgcgtggcgcaaccacagtatcccgttggagacgaaggacggacgacaggtgcctcagagctgccgccgctaccgactggccaccatcgccaacttctctgcgctggggctggagccgggacgggacgtggacctggagcagctggagcaagagaactgcctggatggctgggagtacaacaaggacgtcttcctgtccaccatcgtgacagagtgggacctggtgtgtaaggatgactggaaagccccactcaccacctccttgtttttcgtgggtgtgctgatgggctccttcatttcgggacagctctcagacaggtttggtcgcaagaatgtgctgtttttgaccatgggcatgcagactggcttcagcttcctgcagctcttctctgtgaacttcgagatgtttacagtgctttttgtccttgttggcatgggtcagatctccaactacgtggcagcatttgtcctgggaacagaaattctttccaagtcaattcgaattatattcgccaccttaggagtttgcatattttatgcatttggcttcatggtgctgcctctgtttgcatacttcatcagagactggaggatgctgctgcttgcgctcactgtaccaggggtgctgtgtggggctctctggtggttcatccctgagtccccccgatggctcatctctcaaggccgagttaaagaggcagaggtgatcatccgcaaagctgccaaattcaatgggattgttgcgccttccactatcttcgatcccagtgagttacaagacttaaattccaagaagcctcagtcgcaccacatttatgatctggtccgaacacgaaatatcaggatcatcaccatcatgtccataatcctgtggctgaccatatcagtgggctacttcggactttctcttgacactcctaacttgcatggggacatctatgtgaactgcttcctactggcagctgttgaagtccccgcctatgtgttggcctggctgttgctacagcacctgccccggcggtattctatctctgctgccctcttcctgggtggcagtgtccttctcttcatacagctggtgccttcagaattgttttacttgtccactgccctggtgatggtgggcaagtttggaatcacctctgcctattccatggtctatgtgtacacggccgagctgtaccccactgtggtcagaaacatgggtgtgggggtcagctccacagcatcccgccttggcagcatcctgtctccctactttgtctaccttggtgcctatgatcgcttcctgccttatatcctcatgggaagtctgaccatcctgacagctatcctcaccttgttcttcccagagagctttggtgcccctctccccgacaccattgaccagatgctcagggtcaaaggaataaaacaatggcaaatccaaagccaaacaaggacgcaaaaagatggtggagaaagcccaacggtcctaaagagcacagccttctaacaccctgtccagaaggtgaaaaactgaaaggaaacctgcgtgtagtcagaaatgctctcaatcactgagggctttctgttctgttgaccttgtgtctcacatgctcacggatggggcatctgtcctgaagagccaccttcctccagggccaccaaggctaaccacacacagcttgcacatcccatcacagtgtggactggggcctcccagagaagttactgagtctcttgaagcagtgggacttggaagactgagaaacatctgctagacatgctttgttatcctgtaagacctgatagtcacagacagaacagcaggtctgtttcccctcctttccctaactgaagaacttacaggaaaggaataaaagtgactcagtggtggtgtgcttgtctaggatgcaccagaaggaaacaaaaatttcttttcagaaaataagtgattccatggggagtttgatttctcatcttacctaagttaaccaaaatcctgtgatcattttaacccacaacagaagaacacaagaccaagggaaccctaaaggaaactgaggtgaggctggtacataaagcagacagtgtgtggactgtggctgctctgcccctcagccagctgtactgtgtgtgtctggtcagggtcctgccttgcccagaccctgtgagaaacctactgttgaggccaggcttggcctccactgctgtgtaaatcagaactcaggctgccagacacttggctgtgtcttgagggaaatgtatggataacagagtgttccttccttcttccagcactgtcatgggagtttgtcatctgctgttgtatctcaagctatttgtcctttagcagaaacttgggaactgcctgtgtttcccagctcagggttaccctggctggtgtgcagttgccaatataaatggccttcacagtcttagccactagagcggctctgagtgccaaaaatactaacaccatgcttcttccttttacgatgtgtaatcatgaggaaaatcacaagaaagaaatgtaaattgtgttcacagtctctcagagtcgctggctgcagtcacatcggtggggatttcgtgttcagtgattgtcttctcttctgattatgttgccatggtgctccgaaagcacacgcttcacgctcttaaaatgcaaaacaaacacagaaacccgtattttgtgaaagctactgaagtgccttgggcaaggatatggttttaataaactgatttttttttttaaataaaaaaaaaaaaaaaa

SEQ ID NO: 3385 - DNA, 3115 bp, Rattus norvegicus
  Genbank Accession No. NM_019280
gttgaacagcagccagagcctgaagaagccaactccagggcggaggaaaggaagcagaaggctcagcaccagtctccaacacttggcaagatgggtgactggagcttcctgggggagttcctggaggaggtccacaagcactctacggtcatcggcaaggtctggctcaccgtcctgttcattttccgcatgctggtcctcggcaccgctgctgagtcctcctggggagatgagcaggctgatttccggtgtgataccattcagcctggttgccaaaatgtctgctacgaccaagccttccccatctcccacattcgttactgggtactgcagatcatctttgtgtccacaccatctctggtgtacatgggccacgccatgcacactgtgcgcatgcaggaaaagcagaagctgcgggaggctgagaaagctaaagaggccggtggcaccggcacctatgagtacttggcggagaaagccgagctgtcctgctggaaagaggtgaacgggaagattgtcctccagggcaccctactcaacacctatgtctgcaccattctcatccgcaccgctatggaggtggccttcatggtgggccagtacctcctctatgggatcttcctggacaccctgcatgtctgccgcagaagtccctgtccccaccccgtcaactgttatgtctcgaggcccacagagaagaacgtcttcattgtctttatgatggctgtggctggactgtctctgtttctcagcctggctgaactctaccacctgggctggaagaagatccgacagcgcctggccaagtcacggcagggtgacaagcaccagcttcttggcccctccaccagcctggtccagggcctcactcctcctcctgacttcaaccagtgcctaaagaacagcccagatgagaaattcttcagtgacttcagtaataacatgggctcccggaagaatccagaccctctggccactgaggaagtgccaaaccaggagcagatcccggaggaaggtttcatccacacacagtatggccagaagcccgagcagcccagtggcgcctctgcaggccaccgctttcctcagggctaccacagtgacaagcgccgccttagtaaggccagcagcaaagcaaggtcagatgacctgtcagtgtgaccctcctcttagggaggaccagtcccagaaggaagccaaggagggtgaggcaggacagaagcggtctctctgactgtataccttcctcagcaccttctctcccgggtctggatggtgttgctcattaatcctccaaatttcagttctgagccgtattctcaaagattgggctactcctcaaatccccaaccccacatcctctaccagtattcgcagtgaagactttcaagtgatttagtgatatggtgggagcaggaatgggaaccttggcaaaatctggtctgggtaggacagacatgaagattcgacattagcaacagataaaccctcaccccaaatcttgtcttcttcggtactaggcccatcctttttattttttaaaggaagaatccaaggttgagagtattcatcaaataatctgcattgtattgttcctttgaatctgtcgtttccatgtgccatacctcagagtgctggtgaggtaactgtgggttgcccttggctgcatctccctcctcccagtcttaaaggggtgtccttggtcctcggccagcatcagctttacaagtgccttggtatgtgcctttggaaaacactgcatgttgatgatgctgcagccttactgccaggctagacacccagctcagaagggtgccaagacctctagaagtcactgtgcacataagcattgctggaattgccaccagctgtcatcctgcagtcctttacagttcaacctagtgatagaaaccgtcctggacagctcacccagtgttcctctaaaatcttggttaacaggaatgtccaaagtcaccatcctctcttggaccctggccagattaccagccaccaagttcagtggaatttccccaggatttaatgaaacaaagagagcattgtgcttctcaggttccttggggggtgttgggggggattcttctgtggagatgaaaagagaggagggggaggacactggaaaactattttcccttctgcatatgccttccactgcctcccagcttggactgctgagaggtgtggtgatagatagcaacggaggcccaagatctctctcttagaggcatcaaggggacctggaagccgagatggagctccggttggttttgacacggcccttatttagtgcagatgctcctgtgtttccttgggacccttaggtacatcagggagggactgtagaaaattcctgccttcctcagggtctatcctgggctatctactgagaggatccacagtcggtgtctctccttatgcagatggaaagatgctcagcgtcagatatcaagacttacaaacacaatgctctgtgtgtgtgtgtgtgtgtgcatgtgtgtgtatgagtgtgtgcatactcaaccatctatgtgtgtatatgtgtgtgtgtgcatgctcaaccatctgtgtgtgtgtgtgtgtgtgtgtgtgtgtgtgtgtgtgtgtgtatacccgtgtatgcatgcagatagaatggtaaagaagagccctgaagaactgtaaggaaacatgtagaaaacttgggtttttctgcctccttttctgttgcccgacaggacagctgagcttgcttcctaatcagcctaaaggtcaaacctgggaagtcagtacaggagggtgaaggttcagaggtcaacccctgcccatgtgaccatctctgggtccctctgctggtatttggatggctgaagatacttgggaaaggctgactggctgtcccagccccagtgtatctcattcattcctgacaccgacgctatgattctctgcttttctagttatgggatgtgtgtttgtcttctgaaatggggccttttgagttagaaaatctgagaccagtcttcgatggtgaggtttttcagaagagaaagagaaagtaatatgtgtgactggttttaaataaaatacgtctctacatgttaaaaaaaaaaaaaaaaaa

SEQ ID NO: 3386 - DNA, 1940 bp, Rattus norvegicus
  Genbank Accession No. NM_019283
cacaaccaccaaatatatccacacgttgacgtgatttcttgcccttactcacactaagcccgcgtgtcgatccatctctatggatcccgaacctactgaacactccaccggcggcggctcggttccccgccagccgcccagcgcgcagacggggcttgatgtccaggttgtcagcgcagctggcgactcaggtaccatgagccaggacaccgaagtggacatgaaagatgtggagctgaacgagctggaaccggagaagcagcctatgaatgcagcggacggggcggcagccggggagaagaacggtctggtgaagattaaggtggccgaagacgaggcggaagccggggtcaagttcacaggcttatccaaggaggagctattgaaggtagctggcagcccgggctgggtgcgcacccgctgggcgctgctgctgctcttctggctcggttggctgggtatgctggcgggcgccgtggttatcatcgttcgggcgccacgctgccgtgagctgccggtacagagatggtggcacaagggcgccctctaccgcatcggcgaccttcaggccttcgtaggcccggaagcgagaggcatagctggtctgaagaaccatctggagtacttgagcaccctgaaggtgaagggcctagttttgggcccaattcacaagaaccagaaggatgaagtcaatgaaaccgacttgaaacagattgatcccgatttaggctcccaggaagattttaaagaccttctacaaagtgccaagaaaaagagcattcacatcattttggacctcactcccaactataagggccagaatgcatggttcctccctcctcaggctgacattgtagccaccaaaatgaaggaggctctgagttcttggttgcaggacggtgtggatgggttccaagttcgggatgtgggaaagctggcgaatgcatccttgtacttggctgagtggcagaatatcaccaagaacttcagtgaggacaggcttttgattgcagggaccgcgtcctctgacctgcaacaaattgtcaacatacttgaatccaccagcgatctgctgctgaccagctcatacctgtcacagcccgttttcactggggagcatgcagaactcctagtgattaagtatttgaatgccactggcagccgctggtgcagctggagtgtgtcgcaggcaggactcctgacatcctttataccggctcagtttctccgactctaccagctgctgctcttcactctgccaggaactcctgttttcagctatggggatgagcttggccttcaggcagttgcccttcctggacagcctatggaggctccattcatgctgtggaatgagtctagcaactcccaaacctcaagtcctgtaagcctcaacatgacagtgaagggccaaaatgaagaccccggctccctcctcacccagttccggcgactgagtgacctccgtggtaaggagcgctctctgttacacggtgactttgatgcactgtcttcctcatctggcctcttctcctacgtccgccactgggaccagaatgagcgttacctggtggtgctcaacttccaggatgtgggcctgtcagccagggtaggagcctccaacctccctgctggcataagcctgccagccagtgctaaccttttgcttagtactgacagcacccggctaagccgtgaggagggcacctccctgagcctggaaaacctgagcctgaatccttatgagggcttgttgttacagttcccttttgtggcctgatccctctacacagaacctgccacccttctttcctctctcaggcctttggaattctggtctttctctccttattttgtttttgtttttaaacttttgcagattacatatgaattcttacactgggtgtttttgtcttcaaaataaaaaaaatcacccctgc

SEQ ID NO: 3387 - DNA, 1430 bp, Rattus norvegicus
  Genbank Accession No. NM_019289
atggcttaccacagcttcctggtggaacccatcagctgccatgcctggaacaaggaccgtactcagatcgccatctgccccaacaaccacgaggtgcacatctacgagaagagcggtgccaagtggaacaaggtgcacgagctcaaggagcacaacgggcaggtgacaggcatcgactgggcccccgagagtaaccgcattgtgacctgcggcacagaccgcaatgcctatgtgtggacgctgaagggccgcacgtggaagcccacgctggtcatccttcggattaatcgagctgcccgctgcgtgcgctgggcccccaatgagaacaagttcgccgtgggcagtggctcccgtgtcatttccatctgttattttgagcaggagaatgactggtgggtgtgcaaacacatcaaaaagcccatccgctccactgtccttagcctggactggcaccccaacaacgtgctcctggctgcaggctcctgtgacttcaagtgcaggatcttctctgcctatatcaaggaggtggaggaacggccagcccctacaccgtggggctccaagatgccctttggggagctgatgtttgaatcgagcagcagctgtggctgggtgcatggtgtctgcttctcggccggtgggagccgagttgcttgggtcagccatgacagcactgtgtgcctggtagatgctgagaagaagatggccgtggcaaccctggcctctgagacattaccgctcctggccatcaccttcatcacagaaaatagtctcgtggcagcgggccacgactgcttcccggtgctgtttacctatgacaacgctgcggggacattgagctttggtggccggctggatgtgcccaagcagaactcccagcgtggcctgacagcccgagagcgcttccagaacctcgacaagaaggccagctctgaagggggtgcagccacaggggctggcctggattcactgcacaagaacagcgtcagtcaaatctcggtgctcagcgggggcaaggccaagtgctcgcagttctgcaccacaggcatggacggtggcatgagcatctgggatgtgaagagcttggagtcagccttgaaggacctgaagatcagatgagctgtgaggagtgctgtcctcatcccacatgctggggaggagggaaaggggttggggaggctaagggctgctttgctgaatgcttctagggtgtagtacaggtctgcaaaggggatgctctctctccaaagaggggaagaggaaggtggggaactttcctgcctatttaatgaaaatgtgccttttaaagagatgctttcattcattgcaaaccaaaaacaagacaaaaaacccaaagcacaatgctggtcataaactgcttcaaaatgtgggctaataaacataccaaatgtgaaaaaaaaaaaaaaaaa

SEQ ID NO: 3388 - DNA, 1459 bp, Rattus norvegicus
  Genbank Accession No. NM_019291
gcgtgactatgtcccaccactggggatacagcaagagcaacggaccagagaactggcacaaggagttccccattgccaatggagaccgacagtcccctgtggacattgacaccgggactgcccagcatgacccttccctacagcctctgctcatatgttacgataaggttgcttccaagagcattgtcaacaatggccattccttcaacgttgagtttgatgactcccaggactttgcagtgctgaaagagggacccctcagtggctcctacagattgatccagtttcactttcactggggctcatctgatggccagggctctgagcacaccgtgaacaaaaaaaaatatgctgcagagcttcacttggttcactggaacaccaaatatggggattttggaaaagctgtgcagcacccagatggactggctgttttgggtatttttttgaagattggacctgcctcacaaggccttcagaaaatcactgaagcactgcattccattaaaacaaaggggaaacgtgcagcctttgctaactttgatccttgctcccttcttcctggaaacttggactactggacatatcctggctctctgaccactccgcccctgctggaatgtgtgacctggatagtgctcaaggaacccattactgtcagcagtgagcagatgtctcatttccgtaaactgaacttcaattcggagggggaggctgaagaactgatggtggacaactggcgtccagctcagccgctgaagaacagaaagatcaaggcgtcctttaaataaaatgaccctgcagctggggtccaaaaagcacaagtgtggctgcctctctgtagctaagcacagttccgccttggtgattcagatcccgactttgcatctgatattgtaggcctttttacctctcacccattgtgcttactaataaaatgtgaaaaggaagacccaggtgtctcatgtggtggtagcatggtggcaggctggtggttgacttagggcatcctttctcagccacaacaatgcaatgcaaagaacagatatggcctcttgcttctccacagccatagaataatgagtactcaggcctgtttattaaaatgctatttttaaaaccatataaggtagaatgattgtttacaaatccacatcatgagacaaactgaggcaatttaggcaaatcaggtaaaacagtcatagttttatggttattaattagatgaatgttcactattccaagatcttatattaaagaaaaacttttaaaaagcttatatatttgtagcaaagttattcttaaatatgaattatgttgtaacttagtgacttttgatttctagaggtgtaaatgaagatgtaaaaattgatatagttgtgatacagagtatatttcccttcagataacttaccataacctaatggataatgtattttagatatattctctaataaaa

SEQ ID NO: 3389 - DNA, 988 bp, Rattus norvegicus
  Genbank Accession No. NM_019292
ttctgtccctgaagagccagcttgcctcctcctggtgctccctgctccaagctatcctacaacactgagagaaagaagagacgcagtcagatgaaaccgcagtgccttttgacatgatctaacccagaagcaggagctgtccagcgctgagagacaggaaaggccatggctaaggagtggggttacggcagccacaatggccctgagcactggcatgaactttatccaattgccaaaggggacaaccagtcacccattgaactgcatactaaagacatcaggcatgatccttctctgcagccttggtcagtatcttatgatcctggctctgctaagaccatcctgaacaatgggaagacctgcagagttgtgtttgatgataccttcgataggtccatgctgagaggtgggcctctctctggaccctaccgacttcgccagttccatcttcactggggctcctcggatgaccatggctctgagcacacagtggatggagtgaagtatgctgctgagcttcacctggttcactggaacccgaagtataacacttcggaggaggctctgaagcagcccgatgggattgctgtggttggcatttttctgaagataggacgggagaaaggcgagttccagattctccttgatgccctggacaaaattaagactaagggcaaggaggctccttttaatcacttcgacccatcgtgcctgttccctgcttgccgggactattggacctaccatggctccttcaccacgccaccctgcgaggagtgcattgtgtggctgctactgaaagagcccatgacagtgagctcagaccagatggccaacgtgcgcagcctgttcgccagtgcagagaatgagcccccggtgcctctggtggggaattggcgccctcctcagccgatcaagggcagggtggtgagggcctccttcaagtaaggctctggacgtgccctcttcggaaaggaattccagcccg

SEQ ID NO: 3390 - DNA, 1201 bp, Rattus norvegicus
  Genbank Accession No. NM_019293
cgccaccaccccgccatgctcagagccaagatgctcgggagaggcccctacaagcccttagccatcctcaggcacatgggacctctctgtgccacaaggccacagcactggcgcttccagcattcctacgcagagaaacacagcaactgtgcccggcaccctctctggactggcccagtgtcctcaccgggaggcacccagcagtctcccattaatatccagtggacggatagtgtctatgacccgaagctggcaccgctcagggtctcctatgatgctgcgtcctgcagatacctctggaacactggttacttcttccaggtggagtttgacgattcctgtgaggagtcagggatcagtggtgggcctctgggaaaccactacaggctgaagcagtttcacttccactggggagcaacagatgaatggggctctgagcacatggtggacggccatgcctacccggctgagctccatttggttcactggaattccatgaaatatgaaaattacaagaaagccaccacgggggagaatggactggcggtgattggagtgtttctgaagctcggggcccatcacgaggccctgcagaggctggtggacatcttgccggaagtaagacacaaggacacacaggtgaccatggggccctttgacccttcttgcctgctgcctgcctgccgggattactggacctaccctggctccctcaccaccccaccactggctgagtcagtcacctggattgtgcacaagatgcccattgaggtgtccccgagccagctgtccacattccgtacactcttgttctccgggcgaggtgaggacgaggaggtgatggtgaacaacttccgcccgctccaaccactcaggggccgcaacgttcgctcctccttccaggtccccagggtgggaacaaagtcttgatctcaggatgaggtctgtaaggataggcagagcggatggaaaagggggtgcgcatttccagggtgcgacgcctggattaaaaaaaaaatggctgcagagatggctcaggggttaagagcactgactgctcttccagaggtcctgagttcagttcccagtaaccacatggtggctcacaaccatctgtaatgggatccgatgccctcttctggtgtgtctgaagagagcgacactgcactcatatgcattaaattaataaatctttaaaaaa

SEQ ID NO: 3391 - DNA, 6071 bp, Rattus norvegicus
  Genbank Accession No. NM_019299
ccctcccttccccttctcctcctctcccttggagagcccgggcaggcactgccctgcagccccagtgacaggaggagaccatactccccgacagcgccatggcccagattctgccaattcgctttcaggagcatctccagctccagaacctgggtatcaacccagcaaacattggcttcagtaccctgactatggagtcagacaaattcatctgcattagagaaaaagtgggagagcaggctcaggtggtgatcattgacatgaatgatccaagtaatccgattcgaagaccaatctcagcagacagtgccatcatgaatcctgccagcaaagtgattgcactgaaagctggaaaaactctacagatatttaacattgaaatgaaaagtaaaatgaaggcccacaccatgaccgatgatgtcaccttctggaaatggatctctctgaatacggttgctcttgttacggataatgcagtttatcactggagcatggagggggagtctcagccagtgaagatgtttgatcgtcattccagcctcgcagggtgccagatcatcaattaccgtacagatgctaagcagaagtggttgctcctgactggcatatctgcacagcaaaatcgcgtggttggagctatgcagctgtattctgtagacaggaaagtctctcagcccattgaagggcatgcggcgagttttgcacaatttaagatggaaggaaacgcagaagaatcgacgttattttgttttgctgtgcggggtcaggcaggggggaagttacatatcattgaagttggtacaccacccacaggaaaccaaccctttccaaagaaggcagtggatgtcttctttcctccagaagcacaaaatgattttcctgttgcaatgcagatcagtgaaaagcatgacgtggtgttcctgattaccaagtatggttatattcacctctatgaccttgagactggcacgtgcatctacatgaacagaatcagtggagaaaccatctttgttactgctcctcatgaagccacagctggaataataggagtcaacagaaagggacaagtcctatcagtttgtgtggaagaagagaacataattccttacatcaccaatgtcctacaaaatcctgatttggctctgagaatggctgtgcggaacaacctagctggtgcagaagagctcttcgcccggaaatttaatgctctcttcgcccagggaaactactcagaggctgcaaaggtggctgctaatgcaccgaagggaatccttcgtactccagataccatccgtcgattccagagtgtcccagctcagccaggtcaaacttcacctctgcttcagtattttggaatccttttggaccaaggccagctgaacaaatacgagtccttagagttatgtagacctgtccttcagcaagggcggaaacaacttttggagaaatggctgaaagaagataagctggaatgttctgaagaactgggtgatctcgtaaaatctgtggacccaacgttagcactgagtgtatacctcagggccaatgtccctaataaagtcatccagtgctttgcagagacaggtcaagtccagaagattgttttatatgctaaaaaagttggctatactccagactggatctttctcctgagaaatgtcatgcggatcagtccagatcaaggacagcagtttgcccaaatgttagttcaggacgaagaacctcttgctgatatcacacagattgtggatgtctttatggaatacaatctaatccaacaatgtactgccttcttacttgatgctttgaagaataatcgcccttctgaaggtcctttgcagacgcgattgcttgagatgaaccttatgcacgcacctcaagttgcagatgccattctagggaatcagatgttcacccactatgaccgggctcacatcgcccagctgtgtgagaaggcgggcctactgcagcgtgcattagaacatttcaccgacttatatgatataaaacgagcagtcgttcatacccatcttctcaaccccgagtggttagtgaattactttgggtccttatcagttgaagattccctagaatgtctcagagccatgctgtctgctaatattcgtcaaaatctacagatctgggttcaggtcgcttctaaatatcatgaacagctgtcaactcagtccctgattgaactcttcgagtcattcaagagttttgaaggcctcttttattttctggggtccattgttaacttcagtcaagacccagatgtgcactttaaatatattcaggcggcttgcaagactggacaaatcaaagaggtggaaagaatctgcagagagagcaactgctatgatccagagcgcgtcaagaatttcctcaaggaggcgaaactcacagatcagttgccactcatcatcgtctgtgaccgctttgacttcgtccatgacctggtgctgtatttatacagaaacagtcttcagaagtacatagagatatatgtccagaaagtaaatccaagtcgacttcctgtggttattggaggattgctggatgttgactgctctgaagatgtcattaaaaatttgattcttgttgtgagaggtcaattctctactgatgagcttgttgctgaagttgagaaaagaaacagattgaagctgcttcttccttggcttgaggctagaattcatgagggctgtgaggagcctgctacacacaatgcgttagccaaaatatacatcgacagcaataacaacccagagagattccttcgtgaaaacccctactatgacagtcgtgtcgtgggaaagtactgtgagaagagagacccacatctggcctgtgttgcttatgaacgtggccagtgtgatctggaactaatcaacgtttgcaatgagaattccctcttcaaaagtctttctcgctacctggtccgtcgaaaggatccagagttgtggggtagtgtgctactggaaagcaatccatacagaagaccattaattgaccaggtcgtacagacagccttgtctgaaactcaggacccagaagaagtgtcagtaactgtcaaggcttttatgacagcagatcttcctaatgaactcattgagctgctggagaaaattgtccttgataactctgtattcagtgaacacaggaatctgcaaaacctcctcatcctcactgcaattaaggctgaccgaacccgagttatggagtatattaaccgcctggacaattatgatgcgccagatattgccaacattgccatcagcaatgagctcttcgaagaagcatttgctattttccggaagtttgatgtcaatacttcagcagtgcaggtgttaattgaacatattggaaacctggatcgtgcatatgagtttgctgaacgctgcaatgagcctgctgtttggagtcaactcgcaaaagctcagttgcagaaagggatggtgaaggaagccattgattcttacatcaaagcagatgatccttcgtcttacatggaagttgttcaggccgccaatactagtggaaactgggaagaattggtgaagtatttgcagatggcacgcaagaaggcccgagagtcctacgtggagacagaattgatatttgcactggctaaaacaaaccgtcttgcagaattagaagagttcatcaatgggccaaataatgctcatattcagcaagttggtgaccgttgttatgatgagaaaatgtatgatgctgctaagttgttgtacaataatgtttctaactttggacgtttggcgtctaccctagttcaccttggcgagtatcaggcagcagttgatggtgctagaaaagctaatagtactcgaacatggaaagaggtctgctttgcctgtgtagatgggaaagagtttcgccttgctcagatgtgtggactccatattgttgtgcatgcagatgaattagaggagcttatcaactactatcaggatcgtggatattttgaagaactcatcaccatgttggaggcagccttgggactagagcgagctcacatgggaatgttcacagagctagcaattttgtattctaaattcaagccacagaaaatgagggaacacctagagttgttttggtcaagagtgaatattcctaaggtgctgagagccgcagagcaagcccatctttgggcagagctggtgtttctgtatgacaagtatgaagagtatgataatgccatcatcactatgatgaatcaccccaccgacgcatggaaggaagggcagttcaaagacatcatcaccaaggtggctaatgtggaactgtactacaaagcaatccagttctacttagaattcaagcccttgttgttaaatgacttgctcatggtgctgtctccacggttggctcatactcgtgcagtcaattatttcagcaaggttaaacagctaccactggtgaaaccatatttacgctcagttcagaaccacaacaacaagtccgtgaacgaatccctgaacaacctctttatcacagaggaggattaccaggctctgcgaacatcaatagatgcttatgacaactttgacaacatctcacttgctcaacgtttggaaaaacatgaactcattgaattcagaagaattgctgcttatctcttcaaaggaaacaatcgctggaaacagagtgtggagctgtgcaagaaagacagcctttacaaggatgcaatgcagtatgcctctgaatcgaaagacacagaattggctgaagaactcctgcagtggtttctgcaggaagagaagagagaatgctttggagcttgtctcttcacctgctacgatcttttaaggccagatgttgtcctggaaactgcatggagacataatatcatggattttgccatgccctatttcatccaggtcatgaaggagtatttgaccaaggtggataaattagatgcttcggagtcactgagaaaagaagaagaacaagctacagagacacagcccattgtttatggtcagccccagctgatgctaacagccggacccagtgtggcagtccctccccaggcaccttttggttatggttatactgcaccaccatatgggcagccacagcctggctttgggtacagcatgtgagacggaagctgatcccgtagtctcctattttcatactgaagcatcgtccacccacttctcagtttataaacgggaaacaggcaacgtgttcttgtaacctttacttcatgaaggactacctttttgttctaactatagactcggatcgcctaggttaaaactttattttcacattccgcatcattagaccttcttttcaaaggggaatagtactcacgtgggctttttctccccctcattctttgaagaactgattactattcaatctattgtgaagaacctgatttgcactctgtagtgtttaaagaaacaaagaaactctaatattgaatctcttaaatttagtgtatgtaaacagctttcactatgtattctgtaaatgcaccccattctcttttattcaaagaaaagctaacgtgaaaatactgctatgtgaccatgcaagactgtcagagccaacaaagacaacactaatcagcatatcttacattggaatcacagcgctctccaaattatttgaaaatgcatacagacaacttgcctgattttttttttttttaaaacgagtatcacaggccctgtaacctatgcaggtttccccattatgcatatagaaaatgctagtgtgttgctcacttcatgtgtaacaggtgccctcatgttgtgctgtatcctgtgctttttctgtgggaccattccattcaggaacaaagagcaccatgactgcacacgtgtgtatttactaacccttccctgaggtgtgtgtatgttggatattgtggtgttttagatcactgagtgtacagaagagagaattcaaacaagatattgctgttcttcagttttgttcgtggaatttgaaattactccaatttaaaataaattactggactgtggaaataacatgtagaattgcagttttaattaaatacatctcaaaaccag

SEQ ID NO: 3392 - DNA, 1811 bp, Rattus norvegicus
  Genbank Accession No. NM_019301
gcacgaggaccgctgtgaggggaatggaggcttcttcgcctctggaccccgtggggcgccttgtagccttctgccgcggaggagtgcatctggccgtcctgctgctgttcttgtcgccatctactttgggccagtgcccagccccaccactgtttccttatgccaaacctataaatccaactgatgaatccacgtttcccgttggaacatctttgaagtatgaatgtcgtccaggatatatcaagaggcagttctctatcacctgcgaagtaaactcagtgtggacaagtcctcaagacgtgtgtatacgtaaacaatgtgaaactcctttagatcctcagaatggcatagtacatgtaaacacagacatccggtttggatcctctatcacttatacctgtaatgaaggataccgcctcattggttcctcctctgctatgtgcataatctctgatcagagcgttgcctgggatgccgaggcacctatttgtgaatcaattccttgtgagatacccccaagcattcccaatggagatttcttcagtcctaacagagaagattttcattatggaatggtagttacctaccagtgcaacactgatgcgagagggaagaagctctttaacctggtgggtgagccctccatacactgtaccagcatcgatggtcaagttggagtctggagtggccctcctcctcagtgcattgaactcaacaaatgtactcctccccatgttgaaaatgcagtcatagtgtctaaaaacaaaagcttgttttccttaagggatatggtggagtttagatgtcaggatggctttatgatgaaaggagacagcagtgtgtattgtcgatccctaaacagatgggagcctcagttaccaagctgcttcaaggtgaaatcctgtggtgctttcctgggtgagcttcctaatgggcatgtattcgttccacaaaatcttcaactcggggccaaagtgacctttgtttgtaatacagggtatcaattaaaaggcaattcttctagtcattgtgttcttgatggagtggaaagcatttggaatagcagcgttcctgtgtgtgaacaagtgatatgtaaactccctcaggatatgagtggattccagaaagggttgcaaatgaaaaaagattattactatggagataatgtagccttggaatgtgaggatgggtatactctagaaggcagttctcagagccagtgccagtccgatgccagctgggatcctcctctgcccaaatgtgtctctcaagtgatatgtaaactccctcaggatatgagtggattccagaaagggttgcaaatgaaaaaagattattactatggagataatgtagccttggaatgtgaggatgggtatactctagaaggcagttctcagagccagtgccagtccgatgccagctgggatcctcctctgcccaaatgtgtctctcgctcaaacagtggtctaatagctggaattttcattgggataatcgtccttattttattcatcattttttcctactggatgattatgaagtttaaaaaacgcaattccaccaatgaaaagtgtaaagaagtgggtatctatttaaattctaaagaagacagctgtgttcagcctcagtctctgctcacaagtcaggagaacaacagtaccagtagcccagcacggaattcactcactcaagaagtctaatagccgccatgtacagtgatgtctctgaaacgcaaaacatttcctgtctgtatcacttttaaaataaactattttcttttaaaatctagatgtgttgttcctcgtgcc

SEQ ID NO: 3393 - DNA, 1768 bp, Rattus norvegicus
  Genbank Accession No. NM_019303
  misc_feature (1)..(1768): n = a or c or g or t
gctgccttcactatggatggtgtgagcacagccatcttgcttctcctcctggctgtcatctctctgtccctgaccttcacctcatggggcaagggccagctccctccaggacccaagcctctcccaatcctaggaaacctgctgcagcttcgctcccaagacttgctgacctcactcaccaagcttagcaaggactatgggtcagtgttcacggtgtacctggggcccaggcgtgtgattgtcctcagcggatatcaaactgtgaaggaggctcttgtggacaaaggggaggagttcagtggccgaggctcataccccatctttttcaacttcaccaagggcaacggcatcgccttctccgatggagaacgctggaagatcctccgaaggttctctgtccaaatcctgaggaactttggcatgggaaaaagaagcatcgaggagcggatcctggaagaaggcagcttcctgctggacgtgctgcggaaaacggaaggcaagccctttgaccccgtgtttatcctgagccgctcggtctccaacattatttgctctgtcatcttcggcagtcgtttcgattatgacgatgaacggctgctcaccattatccactttatcaatgacaacttccagattatgagcagcccctggggcgagatgtacaacatcttcccgagtctcctggactgggtgcctgggccgcacagacgcgtgttccggaactttgggggcatgaaagatctcatcgcccgcagcgtccgcgagcaccaggactccctggaccccaactctccccgggacttcatcgactgcttcctcacaaaaatggtacaggagaagcaagacccactgagccacttcaatatggacaccctnctgatgaccacacacaacctgctctttggtggaacggagactgtgggcaccactttacgccatgccttcctcattcttatgaagtaccccaaagtgcaagcccgtgtgcaggaagagattgattgtgtggtgggacgttcgcggatgcccacgctggaggaccgtgcatccatgccttacacagacgcggtgatccacgaagtgcagcgctttgcagacgtcatccccatgaacctgccccaccgcgtcattcgggacacacctttcaggggcttcctgatacccaagggcacagatgtcatcacgctccttaacaccgtgcactatgactccgaccaattcaagacccctcaggagttcaatcctgagcattttctggatgccaatcaatccttcaagaagagccccgccttcatgccattttcggcgggacgccgactgtgtctgggagagccactggcacgcatggagctgttcatatacctcacctccattctccagaacttcacgttgcatccgctggtggagcctgaggacatcgacctgaccccgctcagctcagggctgggcaatttgccaaggcctttccagttgtgtatgcgcattcgctgagtactgcaccaggggactgctctggccctcttccaggggtttcactgttgtgggcctccattgacgtctctctcacgttcccttccctaaacccggggcctgccacgtgtcggtactttacccttcctatcttaagcgcatcttcatggaaaaaatgacgtgacaaaggggaaatacccatcttatacgcacagaccctgttctgcgatgcacccttttcctggctgtttgtatcatttcctagtaaataccttactagtaaaaaaaaaaaaaaaaaaaa

SEQ ID NO: 3394 - DNA, 1279 bp, Rattus norvegicus
  Genbank Accession No. NM_019317
gacagagaaaggcatggagcccatcctggccctcctgctggccctgggacccttccagctcagcagaggccagtccttccaggtgaatcctcctgagcctgaggtagctgtagccatgggcacatccctccagatcaactgcagcatgtcctgtgacaaggatatagcccgggtgcactggcatggcctggacaccaacctgggcaatgtgcagaccctcccaggcagcagggtcctctccgtacgaggcatgctgtcagacacgggcactcgtgtatgcgtgggttcctgtgggagtcgaagctttcagcactctgtgaagatccttgtgtatgcctttccagaccagctggaggtaaccccggagttccttgtacctggacgggaccaggtagtgtcctgcacagcccacaacatctggcctgcaggcccggacagtctttcctttgccttgctccgaggagagcagagcctggagggtgctcaggccctggaaacagagcaagaggaggagatgcaagagactgagggcactccactcttccaagtgacacaacgctggttgctgccctccctggggacccccgcccttcccgccctttattgccaggtcaccatgcagctgcccaaactggtgctgacacatagaaggaagattccagtcctacagagccagacctcaccagagccccccagcaccacctctgctaagccatacatcctgacctcatcacatactactaaggcagtctccactgggctcagcagtgtagccctgccttctacgcctctgagctccgaggggccctgctaccccgaaatccaccagaacccagaggcagactgggaacttctctgcgaagcctcctgtgggtctggagtgacggtgcattggaccctggctcctggtgacctggcagcctaccacaagagagaagctggggcccaggcatggctaagcgtgctgcccctgggccccattcctgagggctggttccagtgtcgcatggaccctggcgggcaggtgaccagtctgtatgttactggccaggtgatcccaaacccctcctccatggtcgccctgtggattggcagcttggtgctggggctgcttgcactcgccttccttgcctactgcctgtggaaacgctaccggccgggtcctctcccagactccagctcgtgtacgctcctatgaagttccattatgccagactaagggaggcaaaggattaccagatgtaggtttggggcatcaagatgatagtgtggccccttt

SEQ ID NO: 3395 - DNA, 4259 bp, Rattus norvegicus
  Genbank Accession No. NM_019331
aaaaaagaggattccgtggcttaaaaaaaaagtttgaaagcctctgacttaatagtttccaccaccaaggaaactgaggcccagagagaggaaatgacctgggtaagatctccgagggaccagtagttgaacagggactaggagttaaaatttcatgggaggtgcctgtaacaggacctgccttggggtctctgctggaaagagagacctgattgggtttcccagcagtcttcagtggcttgctccgtggctgcctcagccaggtctccagcagccacacctggggatctggcccccgtcctgtcctccagccccacccacctcggctccatgccccccccagtcagcttcgggaccctggcagtgagcaggcacgtggcagccaaggccctgtgaccaggccagggagacggagctctggggtcccagtcacctgcccccccatggagctgagaccctggttgctatgggtggtagcagcagcaggagccttggtcctgctagcagctgaagctcgcggccagaagatcttcaccaacacgtgggctgtgcacatttctggaggcccagctgtggctgatagtgtggcacggaagcatgggttccacaacctgggccagatcttcggtgactattaccacttctggcacagagcagtgacaaagcggtccctgtcgcctcaccgcccgcggcacagccggctacagagggtgcctcaagtgaagtggctggagcagcaggtagccaagcaaagggccaagagggacgtgtatcaggagcccacagaccccaagttccctcagcagtggtacctgtctggggtcactcagcgagacctgaatgtgaaggaagcctgggcccagggcttcacagggcgtggcattgtggtctccatcctggatgacggcattgaaaagaaccatcctgacttggcaggcaattatgacccgggagccagctttgatgtcaatgaccaggaccctgacccacagcctcggtacacgcagatgaatgacaacaggcacggcactcggtgtgccggggaagtggcagcggtggccaacaatggtgtctgtggtgtaggtgtagcttacaatgcccggattggaggggtgcgtatgttggatggcgaggtgactgacgcggtagaggcacgttcgctgggcctgaatcccaaccacatccacatctacagcgccagctggggccccgaggacgacggcaagaccgtggatgggccagcccggctcgccgaggaggccttctttcggggagttagccagggccgcggagggctgggctccatctttgtctgggcctcagggaatgggggccgggaacatgacagctgtaactgtgacggctacaccaacagtatctacacgctgtccatcagcagtgccacacaattcggcaacgtgccctggtacagtgaggcctgctcctccacactggccaccacctacagcagtggcaaccagaatgagaagcagattgtgacaactgacttgaggcagaagtgcactgagtctcacacaggcacctcagcctccgcccctttggcagctggtatcattgctctcaccctggaggccaacaagaacctcacctggcgggacatgcagcacctggtggtgcagacctcaaagccagcacatctcaacgctaacgattgggccaccaatggcgtgggccggaaagtgagccattcctatggctacgggctgttggatgcaggtgccatggtggccctggcccagaactggacaacagtggccccccagcggaagtgcatcattgaaatcctggcagagcccaaggacattggcaaacggctagaggtgcgcaagaccgtgacagcgtgcctgggtgagcccaaccacatctccagactggaacacgttcaggcacggctcaccctgtcttacaatcgccgtggtgacctggctatccacctcatcagccccatgggcacccgttccaccctattagctgccagaccacatgactactctgctgatggatttaatgactgggctttcatgacaactcattcctgggatgaggacccctctggcgagtgggtcctagagattgaaaataccagcgaggccaacaactatgggacgctgaccaagttcactctcgtcctatatggcacagcctctgagggtctctctgcacctccagagagcagcggctgcaagaccctcacatccagccaggcctgcgtggtgtgtgaggaaggtttctcactgcaccagaaaagctgtgtccagcgttgcccaccaggcttcacaccccaagtccttgatacacactacagcactgagaatgatgtggagatcatccgtgccagcgtctgcaccccctgccacgcctcatgtgccacttgccagggcccagctcccacagactgcctcagctgccccagccatgcctccctggaccctgtggagcaaacctgctcccggcaaagccagagcagccgagagtcccgacctcagcagccacctcccgcactgcgcccagaggtggaagtggagccccggttgcgggctgggctggcctctcacctgccggaggtcctggccggcctcagctgccttatcatcgctctcatctttggcatcgtcttcctcttcctgcatcggtgttcaggcttcagcttccggggagtgaaagtgtacaccatggaccgtggcctcatctcctacaaggggctgcctcctgaggcctggcaggaggagtgcccatctgactcagaagaggatgagggccggggcgagaggaccgcctttatcaaagaccagagcgccctttgatgagcccactgcccaccctatcaaatcgatcccttcctcggcactttttaattcaccaaagtatttttttatcttgggactgggtttggaccctagctgggaggtgagaggggcagagacccttgggcctacctgtttgcctgaggtggggtcccgggagcctcaccccccaccaaccctccatgtggaggaaggagtaaatctttagggcagcttcctgcagagtgaagaggggcagcctttctgactccctggccagctgcagccttgcccctcccctgcccctcagaaagcaataatggtccccatccaggcaacagggaggctggccaggaggtacttgaagaaggtggccacctctccaagggcttttgcatcccctgaccctctctggctcaggatgagcctctgaagaagcttgcagtcacaggaagggaccaaagcaaacgaggcactctccagtgtgcctgcactcttgctctcagcctgcctctgcactccaggtctccacctcagctggtagccaggctgagctagacctgcacaggtcaggctctggggccttatgctggtgtcctgaccatcctctatggcaccccccccccaagccagggccttgttttctgagcccggggctgcctgggcagttggcgctcacagtccaggagcccctgggtgggtggtggggagggacggtggctcctcccacctcccacccgatgctgctttcccctgtggggatctcaggagctgtttgaggatatattttcactttgtgattattcactttagatgctgatttttttttttttgtatttttaatgggggtagcagctggaccattcaccttctcctacccatgtccaccctgcctttcccatggctgcccagctctgaggcagagggaatcactaagccccaagtcctgaagaggcaggccagccagctgggctccaggaaagggggtcatggtgggaggggtaggctgacatcatctgtttcaaatggggttgtgccacaggcttttgggttgctggctctccaagtgccaggggtgggcaggtggcaccaccaagcccaaactaacactgtgccctggtggagaaagcattggcctatgatgccccccaaaccccctgttctgatgtgcctttcgcacccctcccattaggacaatcagtcccctcccacttgggcctcctcttttctttttcctagcccttctcggtacccaacctacctgtccagggtgccccttgctctcctgcccacccctagcggccatccaggctggttttgtaagatgctgggttggtgcacagtcatttttttttccttgtaatttaaacaggcctggcattgttggttctatttaatggacacgagataatgttagaggttttaaagtgattaaacgtgcagactatgcaaacc

SEQ ID NO: 3396 - DNA, 3722 bp, Rattus norvegicus
  Genbank Accession No. NM_019340
gggagagctgggctttcatggggaggcagctgaggcaggatctgcagccatgaaccgcttcaatgggctctgcaaagtgtgctcagaacgccgctacaggcagatcaccatccggaggggaaaagacggctttggcttcaccatctgctgtgactctccggtccgagtccaggctgtggattctgggggcccagcagagagggcggggctgcagcagctggacacagtactacagctgaatgagaggcccgtggaacactggaaatgtgtggagctggcacacgagatccggagctgtcccagcgagatcatcctgctcgtgtggcgtgtggtcccccagatcaagccagggccagatggcggagtcttgaggcgggcctcctgcaagtccacacatgatctcctgtcaccccctaacaagagggagaagaactgtactcacggggctccaacacgtcccgagcagcgccacagctgccacctggtgtgcgacagctctgatgggctactgctcggaggctgggagcgctacactgaggtgggcaagcgcagcggccagcataccctgcctgcactgtcccgggccaccacccctactgaccccaactacatcatcctggccccactgaatcctggaagccagttgctgcggcctgtgtaccaggaggatgccatccctgaagaaccagggactactactaaagggaaatcgtacactggcctgggcaagaagtctcggttgatgaagacagtgcagaccatgaagggccacagcaactaccaagattgctcagccctgagaccacacatcccacattcaagttacggcacctatgtcaccctggcccccaaagtcctggtattccctgtctttgtgcagcccctagatctctgtaaccctgcccggactctcctgctgtcagaggagctgctgctctatgaggggaggaacaagacttcccaggtgacactgtttgcctactcggacctgctgctgttcactaaggaggaggaaccaggccgctgtgacgtcctgagaaaccccctctacctccagagtgtgaagctacaggagggttcttcagaagacttgaaattctgtgtgctgtacctggcagagaaggcagagtgcttattcactttggaggctcactcgcaggagcagaagaagagagtgtgctggtgcctgtcggagaacatcgccaagcagcaacagctggctgcaacacctacggagaggaagatgtttgagacagaggcagatgagaaggagatgcccctggtcgaggggaaggggccaggtgctgaggaacgcacacccagcaaagacccctctcccagccaggagctgcctccaggacaagaactcccacccagcaaagacccctctcccagccaggagctgcctccaggacaagaactcccacccagcaaagacccctctcccagccaggagctgcctccaggacaagaactcccatccagcaaaaacccctctcccagccaggagcttcctgcaggacaagacctcccacccaggaaggaatccttttcaggccaagaagcagctcctggcccagagtcaccatccagtgaagacatagcaacctgccaaaacccccctcaaagcccagaaacctcaacaagcaaggactccccaccaggccagggatcctctccaaccacagaagtcccatcttgccagggacttcctgctggtcaagaatctacaagccaggaccctctgctcagtcaagagccccctgctatcccagaatcctctgcctccgatcagaatgttctaccctctcaggagtcacctcccagccagggctccctatcagagaaggcccttgctgagcagaccatcagccccggggagctaccagcggccactgcaggtgaaccttcagcctccagacctaattttgtgatccccgaggtccgcctggatagtgcctacagccagcaggatggagcccatggaggcagctctggtgaggatgaggatgcagaagagggagaggagggggaagaaggggaggaagatgaggaggacgacaccaacgacgacaactacggggatcgtaatgaggccaagcgcagcagcctgattgagactggccagggcgccgagggtggcctctcgttgcgtgtgcagaactcgctgcggcgccggacgcacagcgagggcagcctgctgcaggaggcccgtgggccctgctttgcctctgacaccaccctacactgctctgatggtgagggcaccacatccacctgggccatcccttctccccgcaccctcaaaaaagaactgggtcgtaatggaggctccatgcaccacctttccctgttcttcactgggcacaggaagatgagtgggactgacctcgcagatgacgttgaagcctcccggaagagaaagagcaaaaacatagccaaggatatgaagaataagctggccatcttcaggcggcggaatgaatctcctggggcccagccagccggcaaggcagacaagacaaccaagtccttcaagcctacctccgaggaagccctcaagtggagcgagtccctggaaaagctgctgcttcataaatatggcttagaagtgttccaggccttccttcgcacagagttcagtgaggagaacctggagttttggctggcttgtgaggatttcaagaaggtcaaatcgcagtccaagatggcagccaaagccaagaagatctttgctgagttcatcgcgatccaggcttgcaaggaggtaaacctggactcgtacacacgagaacacactaaggagaacctgcagagcatcacccgaggctgctttgacctggcacaaaaacgtatcttcgggctcatggaaaaggactcttaccctcgcttcctccgctctgacctctacctggacctcattaaccagaagaagatgagtcccccactctagggaccaccagtatccagctcagcgttcacaccaagcggagcgggctccctgcccacccgcctcccttccctgtgacggaggggacaagtaagcccccagaggctgtgtctccggacagacagatggacatttgaattcgaggcctgggccgagagagacccaggccactacaggaagtaggaggaccagccgcatcgggtccttaacgtcctggtacgaggggaccaagggccctggcaggtcagggccctggaggagccagatcgggagctgtggctccctgctttggagataatggagtctttacgctgaccaagttcctttgagaactggctggggttgggacaggaggcccaggcctgggctcagggtccaacctggggggctgttgggcctcacagctcagacctttccccattgagttttatttatttaaacagtagttggatgcttggcacatgaacggtaataggagagccctcaccctgtcagttttcttaacttacaagtgcaatgtcttacccaaggccttgtgaaggccacctggaggtgtgatcaccgtcttacagtttcagggcatttgctggtcccaggaaccagtggcggcagctgggccttctagactgacatgaccttggaggggatgctgcagaaatctggcacccaccctgggtgcccaagagatctgggaaagcatagtgccctccggccacacagaaacaagtgctgggggcaaataaaaggcctgtgttattctcaaaaaaaaaaa

SEQ ID NO: 3397 - DNA, 1412 bp, Rattus norvegicus
  Genbank Accession No. NM_019346
ggtgcctcttctgcaccactctccagggcactgcacctcttaagagagcctggctgccctttatcagacactgccttctgccaccgggaagcccgctggagggagccagaggaagaaatggccatggaagatattcccactatggttaaagtagaccgaggtgaaagccagattttatcctgccgggggagaaggtgtggcctcaaagtacttggctatgtcacgggagatatgaaggaattcgccaactggcttaaagacaagcctgtggtgctccagttcatggactggatacttcgtggcatatcccaggtggtgtttgtcagcaaccccatcagtggaatcctgattctggcgggacttctggtccagaacccctggtgggcgctctgtggctgtgtaggaaccgtggtctccactctgaccgccctcttgcttagccaagacagatcagcgataacggccgggctccagggttacaatgccaccctggtgggaatactcatggctgtcttctcagacaagggcgactacttctggtggttgatattccctgtatctgctatgtctatgacttgcccggttttctcgagcgcgttgagctccctgttcagcaagtgggacctgcccgtcttcactcttcctttcaacatggctttgtcgctgtaccttccagccacaggacactacaatacgtttttcccaagtaaactcttcatgcctgtcagctccgtgcccaacatcacgtggtccgagctcagcgccctggagctgttgaagtctcttccggtgggagtcggtcagatatatggctgtgataacccgtggacaggggccattttcctgtgtgccatcctgctttcctccccactcatgtgcctgcacgctgctatcggatcgttgctgggagtcatcgcaggtctcagtcttgcagctccgtttaaagatatcttctctgggctctggggtttcaacagttccctggcttgcattgcgatcggagggatgttcatggcactcacctggcagacccatctcctggcccttgcctgtgccctgttcactgcctactttggagcctgtatgacacacctgatggctgcggttcacctgccagcttgtacctggtccttctgcttggccacactactctttctcctgctgaccacggaaaatcccaatatctacaggatgcccctcagcaaagttacctactccgaggagaaccgcatcttctacctacaaaacaagaaaagggtggtcgactctgtgtgtgtacatgtctgtgtgtgtggctgtatgtgtatcttgcctgtgtgtgtgcttctgcatgtgtatctatgtgtctctgtgtcttcgtgagtttgtgtgtatatgtgtctctgtatttctgtgggtgtgtgtgtgtgccg

SEQ ID NO: 3398 - DNA, 3974 bp, Rattus norvegicus
  Genbank Accession No. NM_019347
aaaaagaggaaagacagagccggcctagacagcagacatcaggacacccttctaggccagctctgttttctgccttaatgctcaaggaagactgcaagatcatctgaggtgggctctgtaacagcgtcagctccacaaagtcatcgctgcaaagttcaggagatgggagatctttcctgttttcttactgagtgtttccgggtgtgagtgcatcgcattgacatcttcctacctctgtggacaaacaaggacaaggctcgaatcccctcagtctacttcatcagccggacctgcatgactggctattttgaccacttgaagtcatctaaatagaagttctcaagaccaccaagaccaaggacacttcacatgacagatgagcgaccatcccctgaaggagatgtctgacaacaaccgcagcccccccttgccagagcctctttccagcagatacaagttgtatgagtcagagctaagcagccctacctggccttcaagctcccaggatacacacccagcccttcccctgctggaaatgcctgaagaaaaggatctccgatcatcggatgaagacagccacatagtgaagattgaaaagcccaacgagcggagtaaacggagagaaagcgagttgccccgcagggcttctgcaggccggggagcgttcagcctcttccaagctgtgagctacctcactggtgacatgaaggaatgcaagaactggctgaaagataagcccctggtccttcagttcctagactgggtcctgcggggagcagctcaggtgatgtttgtcaacaacccccttagtgggctcatcatcttcatagggctcctgatccagaatccctggtggacgattgctggggcactggggacagtggtctcaaccttggctgcccttgccttgagccaggacaggtcagccatcgcctctggactccatgggtacaacgggatgctggtgggactcctggtggctgtcttctcagagaagttagactactactggtggcttctgtttcctgtgaccttcgcatccatggcctgcccagttatttctagtgccttgagcaccgtcttcgccaagtgggacctgccagtcttcacactgcccttcaacatcgccttaacactgtacctggcagctacgggccactacaaccttttcttccccacgacgcttgtgaagcctgcgtcttcagcgcccaacatcacctggtcagagattgagatgcctttgctgttacaaaccatccccgttggggtgggccaggtctacggctgtgacaacccctggacaggcggcgtgatcctggtggctctgtttatctcctctcccctcatctgtttgcacgcagccataggatccattgtggggctgctggcagcactgacggtggccactcccttcgagacgatctacacgggcctttggagctacaactgtgtcctctcctgtgtcgccattggaggcatgttctacgtactcacctggcagacacacctgttggcacttgtctgtgccctgttctgtgcgtacacgggagcggccctctccaatatgatggcagtggttggtgtgccaccgggcacctgggccttctgtctctccaccctcaccttccttctcctcacaagcaacaaccctggcatccacaagctcccactcagcaaagtcacctacccagaggccaaccgcatctacttcctgacagcgaaacgcagtgacgagcagaagccccccaatggtggcggtggagaacagtcacacggaggaggccagcggaaggcagaggagggctccgagaccgtgttccccaggcgtaagagcgtgttccatatcgagtggtcatccatccggaggaggagcaaagtgtttggaaaaagtgaacaccaagagagacaaaccaaagagccactcccctacctgtatcggaagcccacagtggaactcttggacctgaacaccatggaggagagctctgagataaaggtagaaaccaacacaaccaggactacctggatccagagctccatgatcgctggggggaagagagtcagcaaagccctcagctacatcacaggagagatgaaggagtgcggcgagggacttaaagacaaatctccagtgttccagtttcttgactgggtgctccgaggcacgtctcaggtgatgtttgtgaacaaccctctcagtggcatcctcatcgttcttggcctcttcgtgcagaatccctggtgggccatctccggttgcttgggcaccatcatgtccaccttgactgccctcatcctgagccaggacaagtcggccattgcagcaggactccatggctacaatggggtgcttgtggggctcctgatggccgtgttctcagacaagggcaattactactggtggctgctgctcccggtcatcgtcatgtccatgacttgccccatcctctccagtgctctgagcaccgtcttcagcaaatgggacctcccagtcttcacactgcccttcaacatcgccgtgaccctgtacctggcagccacgggccactacaatctcttcttccccacgaagctgctgcagcctgcagttaccacacccaacatcacctggtcagatgtccaagtgcctttgcttctgagagccatccccgttggaatcggccaagtgtatggctgtgacaatccctggactggaggcatcttcctcgttgctctgttcgtctcttcacctctcatctgcttgcacgctgccatcggatccacgatagggatgttagcagcactcagcattgccacaccatttgactccatctactttggcctgtgtggcttcaatagcactctggcctgtatcgctattggtggcatgttctacgtcatcacctggcagacgcacctgctcgccattgcctgtgccctgtttgcagcctacctgggtgctgccctggccaacatgctgtctgtgtttggattaccaccctgcacctggcccttctgcctctcagcgctcaccttcctcctcctcacaaccaacaaccctggcatctacaagctcccgctcagcaaagtcacctacccagaggccaaccgcatctacttcctgtcccaggagaaaaacagaagggcatcgatgataacaaagtaccaggcctacgacgtctcctaagctgccctttctaagctcgtctggtaaatgcagcctccagaacccaccctgcaccccaggctaaatctaagtcactcaaccacccttcttcctaatatgcgagtggctgctatttggagccctcaatgagatgtgcagcgctcatcaaagccacgctagtttaaactaaatacccaccgatggctctttgggaactctctgtggggggaacttgctagtcacctctttcagttatttagtggcgcaaatcatgattccaggaaatgttcattagcctgccatgcaagagggctgggttcactaatgagttccaactgtctcaggccagtcttctccctaccccatccccacccctatccacacccaccccacccctcatctcagcctgggtgttttgttgccaaggatttctttaccatgacaaggaaggactccaaagtccttccacctcagaagcatttattcttttccatatcctgtaaactaaccaactcagcatggccagcaagtaattattctgacttgagttacttatggaatggctctcagaggagagaggaaaatgttagtgccctgtggaagtttattcttagatatctgggagatgctctaaggcttgggaccggacacctgaattcattgaaaatgccaatgtatcttctttgcaccatagaaatatttccagaaacatcatctggtaaggagtgaccttttccaacatccaatcatagtgtaagcaaacgtctttgcttgtgtaatattcaaaatcagtagtcattaaacttgaaatttgcaaaaaaaaaaaaaa

SEQ ID NO: 3399 - DNA, 1575 bp, Rattus norvegicus
  Genbank Accession No. NM_019354
atcgcttgcttcttgggcagccaccgccgccgtcggacctagccgtctgcactcctgtgttctcctgtgtattctcctgcggtccggacacaatagtatgatctttaagtgtttcgtctcccagacattttctatgggaaatcaaggggatcaggccatgatagccactggcagctttgaagaacgggacacctttagagaagcttgatcttggaggcctcagcgtgagacctcaaagcaccctcccgactccggcagagttcctctgtctcgtcttgacgattgaaggtccccactgcttcagtttttctccatcttctgggaggtagcaggaagtcagaatcatggttggtttcaaggccaccgatgtgccccccacagccaccgtgaagttcctgggggctgggacagcagcctgtattgcagatctcatcactttccctctagacaccgccaaagtccggctgcagatccaaggagagagtcaagggctagcgcgcaccgccgccagcgcccagtaccgcggcgtgctgggcaccatcctaaccatggtgcgcactgagggtccgcgcagcctctacaatgggctggtcgccggcctacagcgccagatgagctttgcctccgtccgcattggcctctacgactctgtaaagcagttctacaccaagggctcagagcatgcaggcattgggagccgcctcctggcaggtagcaccacaggtgccctggctgtggctgtggcccaacctacagatgtggtaaaggtccgcttccaggcccaggcccgggctggcggtggtcggagataccagagcactgtcgaagcctacaagaccattgcacgagaggaagggatccggggcctctggaaagggacctctcccaatgttgcccgaaatgccattgtcaactgtactgagctggtgacctatgacctcatcaaagatactctcctgaaagccaacctcatgacagacgacctcccttgccacttcacttctgccttcggggcgggcttctgcaccaccgtcattgcctcccccgttgatgtggtcaagacgagatatatgaactctgccttgggccagtaccacagcgccggccactgtgccctgaccatgctccggaaggaggggccccgaaccttctacaaggggttcatgccttccttcctccgcttgggatcctggaacgtagtaatgtttgtcacctatgagcagctcaaaagggccctgatggctgcctatgaatcccgggaggcacccttttgagcctctccagctgatgacctggaccctgctccccattcctgccctgtcttttccttcatcctctgcccagccccaacctcttcccatttcccacactccaactcccttcccagctcatctccctatacctcctcagcaaggaggccttaccctagcacatctcactatgcctcctcagcgaggaggcctgaccccggaccctgcaccctcagtcctgctaacagttaagcccaaatcttttgtcctcattcccagcccagcttagccagccttcgcccataaagcaagctccaatgtaaaa

SEQ ID NO: 3400 - DNA, 1377 bp, Rattus norvegicus
  Genbank Accession No. NM_019356
gttcgggattcacacatacacttcagaatgccgggtctaagttgtagattttatcaacacaaatttcctgaggtcgaagatgtagtgatggtgaatgtaagatccattgctgaaatgggggcctatgtcagcttgttggaatataataacattgaaggcatgattcttcttagtgaattatccagacgacgtatccgttctataaacaaactgatccgaattggcagaaatgaatgtgtagttgtcattagagtggataaagaaaaaggatatatagatttgtcaaaaagaagagtttctccagaggaagcaatcaaatgtgaagacaaattcacaaaatccaaaactgtttatagcattcttcgccatgttgctgaggtattagagtataccaaggatgagcagctggaaagcctattccagaggactgcctgggtctttgatgacaagtacaagagacctggatatggtgcctatgatgcctttaagcatgcagtctcagacccatctatcttggatagtttagatttgaatgaagatgaaagagaagtactcattaacaatatcaataggcgtttgaccccacaagctgtcaagattcgagcagatattgaggtagcttgctatggttacgaaggcattgatgctgtaaaagaagccctgagagcaggtttgaattgttctacagaaaccatgcccatcaagattaatctaatagctccacccaggtatgtgatgacaacaacgaccctagagaggacagaaggactctctgttctcaatcaggctatggcagtcatcaaagaaaagattgaggagaagaggggagtgttcaatgttcagatggagcccaaagtggttacagatacagatgagactgaacttgcaaggcagctggaacggcttgagagagaaaatgcagaagtggatggagatgatgatgcagaagaaatggaagccaaagctgaagattaaccttttggaaaacagtccaatttaaggagtacgaagcagccctttctggctgtaaaccctagacttgaaagttttccagtattgaaaacttcaaagctgaatatttttatttccaagtatttaagtattcgacaagccagaatctaaatgccctccttcatgtcagctgttttcacatagtggctctaacacctcaagcgtttttaagggagtggcttgatttgaccagagacaaatgttaaaccgcagtcctaaaattgggcttgcggttttcatttctgatgtctctggattggcacccttatggtttagagaattaccaggggctccagacaccaacaatcccaacctttctatataaaatgtactcaagcaaacatcaaataaatttctgggatattt

SEQ ID NO: 3401 - DNA, 1932 bp, Rattus norvegicus
  Genbank Accession No. NM_019359
agcagagcagtcggtcccactccagtgcgacccggagcctctgcgggactcgagtccgagcgaacctcgaagcatcatccgcgtccgtctgccgcgttccggcttctgcgccgcgcagagtagcgagcttgtgcatcacccgcgcggccacagctgggggctaagagcagggacaccgagggtgactgaccccgactccgagcgcagccccttcctgtggtccgaacagccatgacccacttcaacaagggcccttcctacgggctctccgccgaggtcaagaacaagatcgcatccaagtatgaccagcaggccgaggaggatctgcgcaactggatagaagaggtgacaggcatgggcattgggaccaacttccagctgggcctgaaggacggtatcatcctctgcgaactcataaacaagctacagccaggctctgtgaagaaagtcaacgagtcctcactaaactggccgcagttggagaacatcggcaactttattaaagccatccaggcttacggtatgaagccccatgacatatttgaggcaaacgacctttttgagaatggcaacatgacccaggttcagactacgctggtggctctagcaggtctggcgaaaacaaaaggattccatacaaccattgacatcggcgttaagtacgcagaaaaacagacacgacgcttcgatgaaggcaagctaaaggctggccaaagtgtaatcggtttacagatggggaccaacaaatgtgccagccaggcgggtatgacagcctatgggactcggaggcatctttatgatcccaaaatgcagactgacaaaccctttgaccagaccaccatcagtctgcagatgggcaccaacaaaggagccagccaggctggcatgtcggcaccgggtaccagaagagacatctatgaccagaagctaacattacagccggtggacaactcgaccatttctctacagatgggcaccaacaaagttgcttcccagaaaggaatgagcgtgtatgggcttgggcggcaagtgtatgaccccaagtactgtgccgcacccacagaacctgtcattcacaacggaagccagggcacgggaacaaatgggtcagaaatcagtgatagcgattaccaggcagaataccccgatgagtatcatggcgagtacccagatgagtaccctcgagagtaccagtatggtgacgaccagggcatcgattactagagtcacacacaggagtgcagtattttagtccattgtttatccagtgagacccaagctagccttgagtaattcttatctcgtcttcctaaacactattacgcttcctgtacctttaaagaatgccttacgtacattcctttctccctttcctgcctcctccctaaattgccttctagtgctgtagcgagggaagcctacagcctaaccagtaactcgcgttggaagaagtgagaaggaacgctgtgcgagggcagccagctctttcgctggagatctataaaattttttacacttacacgtaaactggtattttcaaacaataggaaactatttttttcttttttacagtttagtatgtatctggcttgtacacggtagactaagaagttgatttgctaagtgtggtctttgccaagtaatctaacatgcagctttagaacctgacacgtggatgcttctgcacagtgttgtctgctaagttttaaataaagtcgtgatcagtgtgattcgtgattacatgtgtactcattctttcccgaagctgacaaggtctctcccgagtggcgctctaaaggcgcgtctacagaaatggccgcagacatgtaggtgtgggtggcgtgcctgcagacttcatttgtgccaatgtattactgtagagtcgctgttcccttcaactgtatttattgctgcatttctcagcataaactt

SEQ ID NO: 3402 - DNA, 418 bp, Rattus norvegicus
  Genbank Accession No. NM_019360
  misc_feature (1)..(418): n = a or c or g or t
gccatggnccttcaccttagggttacccatgatagcagaggcagaggacattggctaccatcagttccggtgctctgttgccgaaaccacagatgcgtggtcttctggccaagcgtctgcgggttcatattgttggcgcattcgctgtggccctaggagttgctgctgcctataagtttggcgtggctgaaccaagaaagaaggcttatgcagatttctacaggaattatgactccatgaaagattttgaagagatgaggcaggctggtgtctttcagagtgcgaagtgatttcagaatgcaaagaattctttggattgtgctccatagaagttcactgctgacctgtgttcctgaactatgaaacgtgaatatgtgggctaaggagtagtttctctcaataaacattaattatatgg

SEQ ID NO: 3403 - DNA, 1660 bp, Rattus norvegicus
  Genbank Accession No. NM_019367
cccgtggattcccgactaggtacaagtaaacagctggcggaacgaagcctccagacacaggccaggtgggagcatgccggggctatggaggcagaggcttccttcggcttgggctttgcttctcctgcctttcctgccgctgctgttgcccgcagcccccgcaccccaccgcgggtcctacaagccagtgatcgtggtgcatgggctctttgacagttcatacagcttccgccacctgctggactacatcaatgagacacaccccgggactgtggtgacagtgcttgatctcttcgatggcagagagagcttgcgacccctgtgggaacaggttcaagggttccgagaggctgtggtccccatcatggaaaaggcccctgagggggtacacctcatctgctactcccagggaggcctggtgtgccgcgcattgctgtctgtcatggatgagcacaatgtggattccttcatctccctttcttctccacagatgggacagtatggagacacggactatttgaagtggctgttccctacgtccatgcggtctaacctctatcggatctgctatagcccctggggccaggaattttccatttgcaactactggcacgaccctcaccacgatgacttgtacctcaacgccagcagctttctggccctcatcaatggggagagagaccatccgaatgccactgcatggcggaagaacttccttcgtgtgggccgtctggtgctgattgggggtccggacgatggagtcatcactccctggcaatctagcttctttggtttctatgatgccaacgagacggtcttggagatggaggaacagccggtgtatcttcgagactcttttgggttgaagactctcttggcccggggggccatagtgagatgccccatggctggggtctctcacaccacctggcactccaatcgcacgctctatgacgcttgcattgagccctggctctcctgaagacgtcctcagggctctccaggaattccccagcccagagatcaagtggtggccttctggcgtgcctgtgaccacctcgtcgctcccacactgccccacctccccaccagggctcccaaaccctcccctctgctcctctgtgaatgacaagtcctggtcccctacctcatgtcctcacttggggacgtctccatgctctccctttctgccatggctgaggttgggaagcaagcaccaggtttttaactgtggcttcaccgctgctgctgttgcttctccgggtctggctgtaccggaggagaacccagcccctgcccacctcaggggtcttccaggccactcaggacatttttagcttgttattcccatgcccctcttttctgtccctgtggccagcctccccaccgagaggggcgcccgtacaagggggttctgaggctcccctatggggacagttccacttttgaagtgtcagtgttggggaatatctgtggcctgcaaggcccatctcaggtttggggatcccccagtccctatgatcagtgttggggtatcccctgggagcctaggttctttgaggccccagcccctcttttaaccacccttgagtgggtggtccccgtatttatagaaataaaagttccatttccacagaaaaaaaaaaaaaaaaaaaaaaaa

SEQ ID NO: 3404 - DNA, 2777 bp, Rattus norvegicus
  Genbank Accession No. NM_019370
gaaagaaagagccttattttctggctaaacaggtttacacagctacaggaacaatggattccaggctagctttagccacggaggagcccattaagaaagacagcctgaagagatataagatcctttgtgcggttcttcttgctttgctggtgatcgtgtcgcttggattgggcctgggcctgggactcaggaaacctgaagagcatataggcagctgcaggaaaaaatgctttgattcgtcacacagaggactggagggttgccgctgtgactccggatgcacagaccggggagactgctgctgggactttgaagatacctgtgtgaaatcaactcaaatctggacgtgtaattcgttccgctgtggggagaccagactagaggcagccctctgttcctgtgcggatgactgtctgcagagggaggactgctgcactgactacaaggctgtgtgccaaggagaagtcccatgggtgacagaagcctgtgcctcatcccaggagccccagtgtccagaagggtttgaccagccgccggttatcttgttctccatggacggctttagagctgagtacttacaaacatggagcaccctgctgccaaacattaacaaactgaaaacatgtggactccattccaaatatatgagagcagtgtatcccaccaaaacctttccaaatcattataccattgtcacgggtttgtatccagagtcgcacggcatcattgacaataacatgtatgatgtgtacctcaacaagaatttttcactttcttcagtggagaaaagtaaccctgcctggtggagtgggcagccgatttggttaacagcaatgtatcaaggcttaaaagctgcttcctactactggccaggatcagatgtggctgtcaatggctccttccctaacatctacaggaattacagcaattccgtcccatatgaaagtaggattgctacactgttgcaatggctggacctgcccaaagctgaacgacccagtttttacaccatatatgtggaagagcccgattctgcggggcacaagagtggaccagtcagtgctggagtcattaaagccttacagttagttgatgatgcctttgggatgttgatggagggtttgaaacagaggaatttacacaactgtgtcaacataatcgttctggctgatcatggaatggaccagacctcttgtgacagagtggaatacatgacagattattttcctgaaataaacttctacatgtaccaaggacctgcccctcgaatcaggactcgtaatatacctcaggacttctttacctttaattccgaagagattgtcagagacctcagctgtcgaaaatccgatcaacacttcaaaccctacttgactccggatttgccgaaacgactgcactatgccaagaacgtcaggattgacaaagttcatctaatggtggatcggcaatggctggcttacaggaacaaagggagttccaactgcgaaggcgggacacacggttacaacaatgaatttaaaagtatggaggcaatctttttggcacatggacccagctttaaagagaagactgttatcgaaccatttgaaaacatcgaagtctataatctactgtgtgatcttctgcacatccaaccggcaccaaacaacggttctcacggtagcctgaatcatcttctgaaggcaccattttaccagccgtcgcatgcagaagaattgtcaaagtctgctggctgtggttttactactccattgcctaaggactcactaaactgctcctgcctcgcactgcagacttctggtcaagaagagcaagtcaaccaaagactaaatctcaatagaggagaggtctcggcaacagagaagacaaatttgccatttgggaggcccagggtgatacagaagaacaaagaccactgtctgctttaccacagggaatacgtcagtgggtttgggaaagctatgaagatgcccatgtggagttcatacactgttcccaagccgggagacacatcatctcttcctcccacagttccagactgtctgcgggctgatgtcagggttgatccttcggagagccaaaaatgttccttctatttagcagaccagaatatcgaccatggcttcctctatcctcctgcaatcaaaggaaataatgagagtcaatatgatgctttaattacaagtaatttggtcccaatgtataaagaattcaaaaaaatgtgggactacttccataaagttctccttataaaatacgctatagaaagaaatggagtgaatgtggttagtggacccatatttgattacaattatgatggccattttgatgcccccgatgaaatcacaaactatgtagctggcaccgatgttcctgtcccgacacactactttgtggtactgacaagctgtaaaaacaaaacccacacacccgacagctgccctgggtggctggatgtcctgccctttgtcgtccctcaccggcccaccaacgtggaaagctgtcctgaaaacaaagcagaagacctttgggttgaagagagatttaaagcacacatcgcccgggtccgtgatgtggagctcctcactggccttgacttttatcaggaaaaaacacagcccgtctctgaaattttgcagctgaagacatatttgcccacattcgaaaccattatttgaatagatgtgtaaagccatttgacaaaatggaaacattttctgtcaagaaattataaaataaaattttctatttttctttaaaaaaaaaaaaaaaaa

SEQ ID NO: 3405 - DNA, 757 bp, Rattus norvegicus
  Genbank Accession No. NM_019373
agaacagttaaggtagaggtccccagaaccgcacagcgccaggtctcctcccaagatgttccaccaagtctgggcagcgctgctctatctctacggccttctctttaactccatgaatcagtgccctgagcacagtcaactaatgacgctgggaatggacgacaaagagaccccagagccccacctgggcctgtggtactttattgctggagcggctcccaccatggaagagttggcaacttttgaccaggtggacaatattgtcttcaacatggccgccggctctgccccaaggcagctccagcttcgcgctaccattcgcacgaaaaacggggtctgcgtgccccggaaatggacgtaccacttgactgaagggaaaggaaacacggaactcagaactgaagggcgcccagacatgaaaacagacctcttctccatctcatgcccaggaggaatcatgctgaaagagacggggcaggggtaccagcgtttcctcctctacaaccgatcgccacaccctccagaggagtgtgtggaggaattccagtctctgacgtcctgcttggacttcaaagcctttttagtgactcccaggaatcaagaggcctgcccactgtccagcaagtgacccgtgactccacttgtgtcctggacaggcacgataggagctgagctctgaggggagaagccggcggctcccgctccttctcatggataataaagatgaattgtcaatccaaaaaaaaaaaaaaaaaaa

SEQ ID NO: 3406 - DNA, 747 bp, Rattus norvegicus
  Genbank Accession No. NM_019374
atggcgtggtccaggctgatgctggcagcttgcctccttgtgatcccctctgaggttgcagcggactgcctgtccttgtgttccctgtgtgcagtgaggacgcaggatgggccccatcccatcaaccccctgatttgctccctggagtgccaggacctggtgccgccctcggaggagtgggagacatgccggggcttttggtcttttctcaccctgactgcctctgggctccatggcaaggatgacttggagaatgaggttgctttggaagaaggctacacggcactgaccaagctcttggagcccctcctgaaggagctggagaaaggccaactccttaccagcgtctcagaggaaaagctcaggggtctctccagcaggtttggcaacggaagagaatctgagctactgggcactgacctgatgaatgatgaagccgcacaggctggcacgctccatttcaacgaggaggacttgagaaaacaggccaaacgctatggcggctttttgcgcaaataccccaagaggagctccgagatgactggggacgaggacaggggccaggatggggatcaggtagggcatgaggacctgtacaaacgctatgggggcttcctgcggcgcattcgccccaagcttaagtgggacaaccagaaacgctatggtggttttctgcggcgtcagttcaaggtggtgactcggtcccaggagaaccccaatacctattccgaagatttagatgtttga

SEQ ID NO: 3407 - DNA, 3410 bp, Rattus norvegicus
  Genbank Accession No. NM_019376
cggtccttccgacacacgagctccaagccgctcctctcttttcctaaagcccttcaaggcagtcttcggtttccttctttccagccgaccctcttcagccccgcgaagatggtggaccgcgagcaactagtgcagaaagcccggctggccgagcaggcggagcgctacgacgatatggccgcggccatgaagaacgtgacagagctgaatgaaccactgtccaacgaggaacggaacctcctgtcggtggcctacaagaacgtggttggggctcgccgctcctcctggagggtcatcagcagcatcgagcagaagacgtctgcggatggcaacgagaagaagatagagatggtccgagcctaccgggaaaagattgagaaggagctggaggccgtgtgccaggacgtgctgagcctgctggacaactacctgatcaagaactgcagcgagacccagtacgagagcaaggtgttctacctgaagatgaaaggggactattaccgctacctggctgaagtggccactggggagaaaagggcgaccgtggtggagtcgtccgagaaggcctacagcgaagcccacgagatcagcaaggagcacatgcagcccacccaccccatccggctgggcctggcgctcaactactccgttttctactacgagatccagaacgccccagagcaagcctgccacctggccaagaccgccttcgatgacgccatcgccgagctcgacactctgaacgaggactcctacaaggactccactctgatcatgcagctgctccgagacaacctaacgctctggacgagcgaccagcaagacgacgacggcggcgaaggcaacaactaaggccccaggtggactggcagcgcacgctgatgctactactgcagtctttattttttcccatgagttgggggtcgggtgggggagggaaagggagggctgaccttcccagggagaaacccacgactgtcctgtctttgattgcctctttgacatttttgccaaaataccactagtggaaagtcaggctagctatgctggtatcggagtagcagcctcacaggcgccgggactgttgtgcaggtcgtgcaagtggagctgtctgcctttagtttaacttattgctagacggtagggttctaagcagaaagaccggatggatggccctctcgttcagtgcgttctgtggttccagtaaggattcttctgtccacacgccctcgtcttcagttccgtggctgttttctctctgtggctctgctgttttctttttctcttttctcctttctttccccggggtgtataccagagaagttagagtctaaattacccaagtggacaggcttagagtggaaggcacaacctttattgacgagtcagacgtggccctgtacttagaagtctctgatgggttgacagtattaacactaaattgtagtttacagtatttctacacgacagccatacatgacaccaagccattggttctgagttttcctttgtcagtcggctttacgtctgtgtccaggtcggtctggctgtccatcagctctcgtcatggggagagtcagcttcccggagttttggttgatgggcgcttggcaggtggctgttggggaatacttttttttttttttcttctcggttcttctttactctctaaggcaagcccatcacaaaaatagaaaccgttaagtaccacacacacacagagaaaacagagaaaattcaggtctgtatgtcattatcagagactcctgctctcagcagccagggctccatcctcagtgtcactgccgcttgaatgtttctctgcacttgagtctgcccgtaccccgtgctagcagcacgcaggtatctaggtgtcgggcaagattgcagaggtgggaggttaacgagacttggaacatccggtgccagcagctgagccaacaggaaaccactgggaagaggcagttctggtcctaaaccagttgtccctgccacccctccaacccccagcactccttccccaagtgctcagtggagggtaccgaggttcagcaggaggcgctgctcacccctgtctgacctaagctttcctggttttcctttctgaatgaaatcgtagttgatggagattggcttctcacgagatcactgcacacgtgacattgaaggaagctgtgctgctatgccctacatggtccgtctcagcccttggtccctcattctcactgtggataaatcttcccataaacgtgccctgttgcatgcagagtgtgcagtttgtctcctggagaacccatgctctcatggcttcccaagatggcagcaccctagacttgctttacttgtcttcagaggcccagcagccactttatcttatactgaaaccaagctcccacttaagttgagtcacgcttaacaggatgctggtgacgtggctgtagaagaagtacgcccctctgcacagtcctagcatgccctccctcagaggcccctcctcatgctggtgtgcaaacacccactaaccgaggcccacggaagaccgcagcggaggaagcttggccaccagagccatggacagaggggttgggcttcacccggttggtttgtctccatgtcggcagtgagcatgtctgtcccgcttgtactgtttggaaatgacctactggaattgcaaaacctagtttctctttaaatttcagccttgacctttgctgtgttctagaaaagtcatgtgagggtagaactgaagagggagagcgggagacctgacgtgagcgtggatggttccttctccttcccttactgttgagaagcgcacctgcctctgatgctgtctccgttgccgcggttgccccacctattgatacagtattgtgcatgctggtgttgtatttctatacggtagctgacatttattaccttacactgtaggcgttatgtattcctatgacaacaaaacttaagacttcaaaatctttttaaactttttttttttaatttaattttttcctttcaggggtaaagtttgctttaccaaaaatagtggttgtaacaaattgatctgttttggatgttgctatagtgacatgcagttctctattttgttttcggggggaggggacaaaagaaacaccagtgttagcttactcttaatgtctggtgtttgtcatggtgaaattataactattacagtgttggagaacgccgcggagcttctctgaacgacctctgtgctttcttgtcatgttatgcagtgaaactatttttaaggtctaatcaagtgattttttcccccccaactccgtgtttcgctaaggaattatttcgcacacggaccattcttagcagtttcctcagtgatggaatattcatgaatgtgagtcattatgtagccgtcgtacattgagcaa

SEQ ID NO: 3408 - DNA, 940 bp, Rattus norvegicus
  Genbank Accession No. NM_019381
ccgaggtgagaagccccgagcttggcctggctcccccgccccacggagcagccccactctgatctgattggttacctgtggacagcggaggctgcgctgaacagacttggagccatgaatatatttgatcggaagatcaactttgatgccctcttaaaattttcccacataactccctccacacagcagcacctaaagaaggtctatgccagttttgcactgtgcatgtttgtggcagcagcaggggcctatgtccatgtggtcacacgtttcatccaggctggcctgctctctgccctgggcgccctggccttgatgatttgcctgatggccacacctcacagccatgagacggagcagaagaggctgggactgctcgccgtcgccttccttacaggagttggcctgggacctgccctggagctgtgcattgccatcaaccccagcatcctccccacggccttcatgggcacggccatgatcttcacctgcttcagcctgagtgccctctacgccaggcgccggagttacctctttttgggaggtatcttgatgtcagccatgagcctcatgttcgtgtcctctctggggaaccttttctttggatccatttggctgttccaggcaaacctgtacatggggctgctggtcatgtgcggctttgtcctcttcgacactcagctcattattgaaaaggctgaacacggagacaaggattacatctggcactgcattgacctcttcttggacttcgttacactcttcaggaagctcatgctgatcttggccttcaatgagaaggacaaaaagaaagagaagaagtgacgtggtgatcgatcggcctctcccagctcgccttctctccctcagccccgtttctttgcacacatcacaggtgtcgtgtcccatgaaatgaaaagcatcagaaaaaaaaaaaaaa

SEQ ID NO: 3409 - DNA, 581 bp, Rattus norvegicus
  Genbank Accession No. NM_019383
ttctgctggagacaggctccgccgggggtcggtgaagtatccaagatggctgggcgcaaacttgctctaaaaaccatcgattgggtatcttttgtggagatcatgccccaaaaccagaaggcaattggaaacgctctgaagtcctggaatgagaccttccacaccaggttggctagtctgtctgagaaaccaccagcgattgactgggcttactacagggccaatgtggacaagcctggcttggtggatgattttaaaaacaagtataatgctctgaagatccctgtgcctgaggataaatacacagccctagtggacgccgaggagaaggaggatgtgaagaactgtgcccagttcgtgactggatctcaggctagggtccgggaatatgagaagcagctggagaaaataaagaacatgattccctttgaccagatgacgattgatgacttgaatgaggtcttccctgaaaccaagctggacaagaggaagtacccatactggccccatcagcccatcgagaacctgtgaagcagcccaggagggagccctggctgacttgaataaacatttacatagtc

SEQ ID NO: 3410 - DNA, 3851 bp, Rattus norvegicus
  Genbank Accession No. NM_019384
cctaatgataaagatggctctcggtgttgtggcctacaatggaggcgctgctgtcggagtcctcggtcagagcctcgttcacaggagtcagggggtgctgacatggccactgtactggacacagctgcagatagtttccttgtggaggtggtgagcatcctggatccccccgacacctgggttcccagccacctggaccttcagcctggcgaaagtgaggacgtgctagagctggtagctgaggtccgtatcggtgacagggaccccatgcctctacctgtgcccagcctgttgccccgcctcagggcctggaggacaggaaagacggtttctccacagtcccatgcatctcgacctgcctgttcccgtcacctcctcaccttgggcacaggggatggagggcctgccccaccacctgcaccctcctctggctcatcctcgccttccccttccccatcttcgtcttctccttctcctccccctcctcctccacccccaccccctccagctctgcctgccccacgatttgacatctatgatcccttccaccccaccgacgaggcctactccccaccgccagccccagagcaaaaatatgatccctttgaggccacgggctccaaccccagctcatcaggtgggaccccctcgccagaggaggaggaggaagaagaggaggaagaggaagaggagggtctatcacagagcatcagacgaatctcagagaccctggctggcatctatgatgacaacagcttgagccaggacttcccaggtgatgatagcccccaccgggaacccccacccccgcagacgctgggagccccagggacaccaccacaggctgactccactcgggccgaaggggccccacgccgcagggtctttgtggtgggaccggaggctgaggcatgtcttgagggcaaggtttcggtggaagtcgtgacgacggctggtggaccagcgctgccgctgccaccacttcccccgactgatccagagatagaggaaggcgagattgtgcagcctgaggaggagcccagggtggcagtgtcactgttccgtgctgcacgacctcgtcagcctcctgcctctgtagccaccttggcttcagtggccgcccctgctgcgcccccagcctctgctccacgtgcccctgagggtgatgacttcctgtcactacatgctgactctgatggtgagggcgcacttcaagtggacctaggtgagccacctgcaccaccggctgctgatgcccgctggggcggcctggacctgcgccgcaagatcctaacccagcgacgtgagcgctaccgccagcgctctgcctcgccaggcccaccgcctgctcggaagaaggctcgaagagagcggcagcgcagtggcgaccctgcgccaccggattcgcccacctgggaagctaagaagcaccgttcacgtgagcgcaagcttggctcccactccactgcccggcgtcgatcacgctcccgttcccgccgccgttcacgctcccgcagcgccgaccgaagacgtgggagccaccgctcacgttcccgggagaagcgcaggcgccgacggcgttccgcctctccacctccagcggcatcttcgtcatcttcctcgagacgtgagcggcacaggggcaagaggcgtgagggtggcaagaagaagaagaagcgctcgcgctcccgggcagagaagcgctctggggacttagagaagctgcccgcacctgtgcctccctcgggctctgaccgtgacagccgacgccgcggagccgtgccaccttctatccaggacctcacggaccacgacttgtttgccatcaaacgaaccatcacagtgggtcgcccagacaagacggagccacgcgcaccttcgccagcacctgctgtgtccccaaagggggaggtcctgtatgactctgagggtctgagtgcagatgagcgaggtgccaagggtgacaaagatcgcaggcgttcaggggctgcgtcctcatcctcgtcctcaagggagaaagcgtctcgacggaaggccctggatggggaccgggggcgagacagggacaggtcatccaagaagccacggacacctaaggactctgctcctggctcaggggcgctgcccaaagcacccccaagaagtggctcctcgtcctcgtcgtcctcctgctcctctcgaaaagtaaaactgcagtccaaggtggctgtgctcatccgagagggcgtcagcagcaccacccctgccaaggattcctcgtcttcgggcctgggttccattggggtcaagttcagccgagaccgtgagagccgttcaccattcctcaagccggatgagcggtctcctgcagagggggtcaaggtggccccaggcagcaccaagcctaaaaagaccaaggccaaagccaaggctggggccaagaaagccaaggggaccaagggaaagacgaagccgtcgaagactaggaagaaggttcgcagtggaggcagcagcacggccagtggtgggcctggttcactgaagaaatccaaggccgatagctgcagccaggcagccagcgccaaggggacagaggaaacatcatggtctggggaggaacggaccaccaaggcccccagtacccctccacctaaggtagccccacctccacccgcactcaccccggactcccagactgtggatagcagctgcaagacccctgatgtctccttcctagcagaggaagccagtgaggacactggggtccgagtaggggcagaggaggaggaggaagaggaagaagaggaagaggaggaagaggagcagcagcctgccactaccacagccaccagcaccgctgcagctgccccaagcactgcccccagtgcggggtctacagctggagactccggcgcagaggacgggccagctgctagggcctcccagctgccaacgctacccccacccatgccctggaacctacctgctggtgtggactgtactaccagtggtgttctggccttgactgcactcctgttcaagatggaagaagccaacctggccagccgcgcaaaggcccaggagctgatccaggacaccaaccagatcctcaggcaccggaagccaccctctactctgggggtgaccccagctcccgtgcccacttcctttggtctgcccccagccccctccagctacctgcttcctggcagcctccccatagggggctgtggctctacccctcctacccctacagggctagtccctgcatctgacaagagagagggcagcagcagctcagagggacgtggggacactgacaagtatctgaagaagctgcacacacaggagcgggcggtagaggaggtgaagctgtccatcaagccatactaccagaagaaagacatcaccaaggaggagtataaggacatcctgaggaaggctgtccacaagatctgccacagcaaaagcggggagatcaaccctgtcaaggtgagcaacctggtaagggcctacgtccagcgctaccgctacttccgcaagcacggtcgcaagccgggggaccccccaggacctcctcggccacccaaggagccaggccccccagacaagggtggcccaggcctgcccctgccccctctctaagactccttaccctgtccctgtgcctctgagattctggacatatttatggctccacttccccactatgcccccccacagtgggatgatggggaaggttgctgtgaggaagaggagagcccaccctagccctatccctacccgttgacctagcctgcccccacagtcccagcccttctgtcatgccccctccagtttcattaaagatttcataaaaaaaaaaaaaaaaa

SEQ ID NO: 3411 - DNA, 1977 bp, Rattus norvegicus
  Genbank Accession No. NM_019623
gtcctcctctgggacagggaaggatgtcacagctgagcctctcctggctgggactggggcctgaggtggccttcccatggcagaccctgctactgtttggagcctcctggatcctggcccaaattctgacccagatctacgctgcctataggaactttcgtcgcctccgtggcttccctcagccccccaaacggaactggcttatgggtcatgtgggcatggtcactcctacagagcagggcttgaaggaattgactcggttggtgggtacctacccccaaggctttttgatgtggattgggccaatggtccccgttattactctgtgccactctgacatcgtccgatctatcctcaatgcctcagctgccgttgcgctcaaggatgtgatattctacaccatcctcaagccttggctgggggatgggctcctggtgagtgctggtgacaagtggagccgccaccgccgcatgctgacacctgccttccacttcaacatcctgaaaccctatgtgaagattttcaacgacagcaccaacatcatgcacgccaagtggaaacggttgatttcagaaggcagttcccgtctggacatgtttgagcacgtcagcctcatgactctggacagtctgcagaaatgtgtcttcagctttgacagcaactgccaggagaagtccagtgaatatattgctgccatcctggagctcagtgccctagtggccaaaaggcaccagcagcctttgctgttcatggacctgctgtacaatctcacccctgatgggatgcgcttccataaggcctgcaacctggtgcatgaattcactgatgccgtcatccgggagcggcgccgcaccctcccagatcagggtttggatgagtttctcaagtctaaggccaagtccaagactttggatttcattgatgtgctgctcctgaccaaggatgaagatggaaaggagctgtcggatgaggacatcagagcagaggccgacaccttcatgtttgagggccatgacaccacagccagtgggctctcctggattctatacaacctggcgaacgacccagagtaccaggagcgctgccggcaggaagttcaggagcttctgagggaccgagatcctgaggagattgaatgggacgacctggcccagctgcccttcctgaccatgtgcatcaaggagagtctgcggctgcaccccccagtcacggtcatctcccgatgctgcacccaggacattctgctcccagatggcaggaccattcccaaaggtatcatctgccttatcagtatctttggaattcatcacaacccgtctgtgtggccggaccctgaggtctacaaccccttccgctttgaccctgaaaacatcaaagacagctcacctctggcatttattcccttctcggcggggcccaggaactgcataggtcagactttcgccatgagcgagatgaaggtggcgctggcactaacactgctgcgcttccgactcctaccggacgacaaggaaccgcgcaggcagccagagctgatcctgcgtgccgagggcggactgtggctgcgggtggagccgctgacggcgggcgcgcagtgacctcacagttggtctggagcacccccaccatcctacctctgaggatcccagaatgaacagaactgtcacccataccagaatcttacggagggccagcagggggcgctgtgaatccagtgagtgggtgagagaggccagttagtgtctgagccaaagacctttgacttcgtctaactgatcgccagcctttatcataaggtgcattcttctccaaccaacctggactattctctggacaataggaagccaaagaaacgtctgagcaagagaccagaatgaaacgcaaatttgagctcttattctcgcagcaaatcccttattcagctccatttccattattttgacctacattcaaatcatctaataaatacattctctc

SEQ ID NO: 3412 - DNA, 1395 bp, Rattus norvegicus
  Genbank Accession No. NM_019905
aggctctctgcaataggtgcccggcccagcttttttttcaaaatgtctactgtccacgaaatcctgtgcaagctcagcttggagggtgatcattctacacccccaagtgcctatgggtcggtcaaaccctacaccaacttcgacgctgagagggatgctttgaacattgaaacagcaatcaagaccaaaggcgtggacgaggtcaccattgtcaacattctgactaaccgcagcaatgcacagaggcaggacattgccttcgcctaccagaggaggaccaaaaaggaactgccatcggcgatgaagtcggccttgtctggtcacctggagaccgtgatgttaggcctgttgaagacacctgctcagtacgatgcctctgagctcaaagcctccatgaagggcctggggactgatgaggactccctcatcgagatcatctgctcaagaaccaaccaggagctgcaggagattaaccgagtgtataaggaaatgtacaagaccgatctggagaaggacatcatctctgacacatctggagaattccgaaagctgttggtcgcccttgcaaagggtaaacgggcagaggatggttctgttattgactacgagctgattgaccaggatgcccgggagctctatgatgctggggtgaagaggaaaggaaccgatgtccccaagtggatcagcatcatgactgagcgcagtgtgtgccacctccagaaagtgttcgaaaggtacaagagctacagtccttatgacatgctggagagcatcaggaaagaggtcaaaggagacctggagaacgccttcctgaacctggttcagtgcattcagaacaagcccctgtactttgctgaccggctgtatgactccatgaagggcaaggggactcgagacaaggtcctgattagaatcatggtctctcgcagtgaagtggacatgttgaaaatcagatctgaattcaagaggaaatatggcaaatccctgtactacttcatccagcaagacactaagggtgactaccagaaggcgctgctgtacctgtgtggtggggacgactgaagggcttggcatggtggattgcccagaagtggccctacctgtgccccaacctaatgttctagagaatcagcctgccactaatggacccctgaactcctccctgtgaagatgacgacagagctgccgacccatcccccatcttagctgcctttgcctggctttcccctcattctctcctttatgccaaagaaatgaacattccagggagttggacgtaccgtctgtgacatgagacacttcctcatatgtgtcgtgaataaaccatttttactttaaaaaaaaaaaaaaaaaaaaaaaaaaaaaaaaaaaaaaaaaaaaaaaaaaaaaaaaaaa

SEQ ID NO: 3413 - DNA, 1435 bp, Rattus norvegicus
  Genbank Accession No. NM_019907
tgatgtattttggcagctgctcctgctttgcgggttgagggggacaggacgacccgtggaaggatggtgtgtgaaaagtgtgaaaagaaactcggcagggttatcactccagacacatggaaggacggggcccggaacaccacagaaagtggtggaaggaagctgaacgaaaacaaagctctgacttcgaagaaagcaaggtttgatccatatggaaaaaataagttctccacttgcagaatttgtaaaagttctgtacaccagccaggttctcattactgtcaaggctgtgcctacaagaaaggcatctgtgcgatgtgtggcaaaaaggttttggatactaaaaactacaagcagacttccgtctagtctgttgaagattccaactctacggttgtatttgtgcttcagcttttcaagcgtaacacggatgtccatctcacaaaatgacctgtttgaggatgaatgattcagtctgaagcagggacgttgatcagtattgatctgtctgctctcatgaagttgtgaatgaagtttctgccttaggtggttattttccttgtgagcattttactgaactagataagtgacaaaattaatgaacgaggtttcccaacttgtgtacgcactgtctactcgacattatctaattaatgagtacgcactgtctactcgacattatctgtataattaatgagtaaggtgttccctacttctgtacgcactgtctactagacattatccatataattcctatctgacccacgcgttttatttatagatattgcaaatgtgaaatcactgattctttgctctgaacttgacatccagacttgagatttctcactttctcacaaacattgcagttcttagaacaaacagggccttagttactgcattttcatgagctataatgtctgagaccatttttgcagagtggttccttggtgaccagtcctgccacaagtctaagataagttgcatttttatttaaagttgctgttgctgctaaagtgagtttcttttacgtgtgactgagtgccatggggcccgatgtccaggcagacactgaagttcagagacgtgcgttctgtcagcattatcttaaattcaaatgagaatacatttattctgtttgggaatgttctttgaagaaggatacatagctttccttaacaccccccaacccccgctgccacttcctcagaaataaagcaggcctctggcctctgacattgctgcagcctgccagggggctgctgtgaatgaaggtttttcttgttgccttctttgggttgggccttccacctttaaaaccctcagcctacccagagaccaaaagcatattctctgtttttatctgcaggatcttaaatgcatatcactgtgtaatgtgagacctactataaacaatgaaaaaataaaaaaaaaaaaa

SEQ ID NO: 3414 - DNA, 3504 bp, Rattus norvegicus
  Genbank Accession No. NM_020075
ctctgcttttctctttcagagctgttgcgcagccattggtacctgtattggggaaacatagcatacaagcaagaagcttacagcctcagtggcgaaaaatttttcatgtcagagaccgagaactcttgcagtcgtttatgtcatcccttcttctccagacagaagataccaaaaagttgcaatcaaagatctgttcatcttattgataaagtcactaataagccaaaatgtctgtcaacgtcaaccgcagcgtgtcagaccagttctatcgctacaagatgccccgtttgattgctaaggttgagggcaaaggaaatggaatcaagacagttatagtcaacatggttgacgttgcaaaggcgcttaatcggcctccaacgtatcccaccaaatattttggttgtgagctgggagcacagacccagtttgatgttaagaatgaccgttacattgtcaatggatctcatgaggcgaataagctgcaagacatgttggatggattcattaaaaaatttgttctctgtcctgagtgtgagaatcctgaaacagatctgcatgtcaatccaaagaagcaaacaataggtaattcttgtaaagcctgtgggtaccgaggcatgcttgacacacatcataaactctgtacattcattctcaaaaacccacctgagaatagtgacattggtacaggaaagaaagagaaagaaaagaaaaatagaaagggcaaggacaaggaaaatggctctgtatccaccagtgagacaccaccacctccaccaccaaatgaaattagtcctccacatgctgtggaagaagaggaagatgatgattggggggaggatacaactgaggaagctcaaaggcgcagaatggatgaaatcagtgaccatgcaaaaggtctgacacttagcgatgatttggaaagaactgtagaagagcgtgttaacatcctgtttgattttgttaagaaaaagaaagaagagggcattattgattcatctgataaagacattgtggctgaggcagaaagactggatgtaaaagccatgggccctctcgttttgacagaagttctctttgatgagaagataagagagcaaatcaagaaatacaggcgccattttttaagattttgtcataacaacaaaaaggcccagcggtaccttcttcatggtttggaatgtgtggtagcaatgcatcaagctcagttgatctccaagattccacatatcttgaaggagatgtatgatgcagaccttttagaggaagaggtcattatcagctggtcagaaaaggcctctaagaaatatgtctcaaaagaacttgccaaagagattcgtgtcaaagcagagccatttattaaatggttgaaggaagcggaggaggaatcttctggtggtgaggaagaagacgaagatgaaaatattgaggtggtatattcgaagactgccagtgtaccaaaagttgaaactgtgaagtctgacaacaaggatgacgacattgatattgatgccatttaaaaggatggatgcaacttagcttaacagtgtaatgctgcaaatttttctccattatcagccagaagtgcaacatgtatgtgcaagagctaaagtggcttaacatcatgctacacttgatactaaaaagctattactgtgagtggtctataattaagcccaatgagacatctagggagtccatacatatcagtgagcagttgtagtttgcttatttatagcatgtttctttcggaaaaactagtggtggacacatttggatcacatttatacagttataaaaaataaagatttgattttggtcattcttcagactttgggctatgaatggcttatgctgaagtaattggctacttttaggatgttacaccatttaataacttagacttcttaagtttggtagattgttaggtactgaagacttgaagaatgcaaacaattataatgaccttactcagccattaagaaatgaagtattttgaaagttgtgtctccagtccattgagattggcaactgacaattcttgtcattctaaggaaatttgatgatttaatgacagtgtgacatcctcatgagaagtaaaaatgacctgtgtgtcctatggtttaagagcaaattttgaaacttggagttgtggtttttcagtttgtgtacactcaccccaaattgtagtctattgagtcatgtgcattgcacgttggataagccagggaaatgacaaataagtattttgtgtgtatttagtggttgctttgtactgagagaaaagctttgaggtgtgattaaatcgtaaactctgattctatttgggagaaacaggaaaaaggtgcacttaatctaaaacagcataagttttcaacttttacccttaaattataatttcaagatgtttagacatactgtatcttgtgtttgatgtgttccccctccctaatattatggtttattctttaatgccttttaatttggatataatagcttgtactttagattttggttgctatcttgccaaaataagtgttactgtttttcaagcttgatccccttccctgattgtcttatttaaagagaaagttaaactcatacttctgagtcagagcctgtattttggttaagacttgggatattttttacttcacattgaatatagctggatacctgagaagtctggtgatggcactgggtgggtgcagctagctaaggcctgaccagcccattcagagccttggacttcagacacaaaagtgagtttcttacccacttgctggtgtaaactctatctggggtcctgactatatttgaatacttgtcttcaatattaaaaaacatagcacatttttctttctacaaaagtacattctggagttaagaacccatgtggttgatttgtgtgtggcgtgctagctcatacattatttggatcttattctttgtgtcatccatctcacagattataagactttgattaatgtaaaaagtatgcgttaaaatcataccaaacatttggtaaaattaaaaccttgatgggaggctgggcgtggaacaggagccatatacctggaatggtaacaggggaatgtgctatgtcacaccaaagaagtgggacttggaaagtcacttgtctcctgggtttcagactctttgttgcatgggcagcccatccatatgtcattactttttgagattctcaagtagatcagcacatttcggcctcaggttggcaagattttgtcttagagctgttgctttaaagggaaatggtcaggtcttagacacttaggaaggtcttgggcttctgttcattctggtgccaaaccagtgggattcaaatttcacacaatctgggtttttattcatggaggttaacctggtaagagtaatccttcatggctctattgaggtgtcttaaaaagtttcctgtttcaaacagctacattacttgattaaaacaatgttataaaattaaatttccccctcctttcatattaa

SEQ ID NO: 3415 - DNA, 1254 bp, Rattus norvegicus
  Genbank Accession No. NM_020076
cccgacaggagacagagcacattgtagctctccaactgccggattacctggcgaccacgttgtggtcagaagagtcctgcctgccggccatggagcgctgtgtgagagtgaagtcttgggtagaagagaatcgggcctcctttcagcctccggtttgcaacaagcttatgcaccgggagcagctcaaaatcatgttcgtcggaggccccaacaccaggaaggattatcacattgaagagggagaggaggtgttttaccagctggagggagacatggtgctccgagtcctcgagcaaggagaacaccgggatgtggttatacgacagggagagatattcctcctgcctgccagggtgccccactccccgcagaggtttgccaacaccatgggcctggtgattgagagaaggcgaatggagaccgagctggatgggctgaggtactatgtgggcgacactgaggatgtcctcttcgagaaatggttccactgtaaggaccttgggacgcagttagcccccatcatccaagagttcttccactctgagcagtaccgaacaggaaagcccaaccctgaccaactgctcaaggagccgccattcccgctgagtacacggtccgtaatggagcccatgtcactgaaggcctggctggagagccactccagggagcttcaggcaggcacatccctaagcctgtttggggacagctatgagactcaggtcatcgcccacggacaaggcagcagcaaaggcccgagacaggatgtagatgtgtggctgtggcaactggagggctcctctaaggtgacaatgggaggacagtgtgtggccctggccccagatgacagcctgctggtgcccgctgggttctcgtacatgtgggagcgagcgcaaggctctgtggccttgtctgtgacacaagaccctgcctgtaagaagccactggggtgacccttctgtgtgggcccaaagcagccacagggtgcctgagtgctgtcctgacagctgccctttccagacagctctttcagcctcatgacatctccgtggacattgacagggcccctccgtgatcgtgggctgtcactggcatccaccctgctgtcatgcttagctcaggatgcagaggggattcctaggacaccagtagttcccctctctcctaacagccctacactgtcagcgaggtgcataccgtcctcatgcgcctgtcagcctaacactaagaaatctctcaataaaggcctcctgctgg

SEQ ID NO: 3416 - DNA, 721 bp, Rattus norvegicus
  Genbank Accession No. NM_020080
gaattcggcacgagcgccgttgcagctatggccactgctctaggatttcgctgcctttaccgaacgcgacctgcgacgctcggtcggtacgtcgataggctgtggaggagcccgagtcgggggcaccggctttctccggctgacgatgagttataccagcggacgcgtatctctttgctgcaaaacgagttccctcaggccgtatacatcgacagctacaatagcagaggtttcactatcaacggaaaccgcgtgtttggaccttgtgcgctgctcccacagaccgtggtccagtggaacgtgggatctcatcaggatatcactgaagagagcttctcgattttctggatgctggaacctaggatagagattgttgtggtgggcaccggaaacaagactgagcggctgcactctcaagtcctgcaggccatgaggcagcggggaattgcggtggagatacaggacacgcctaacgcctgtgccaccttcaacttcctgtgccacgaaggtcgagtgacaggagctgccctcatccccccacctggagagactgcacttgcctcttctggtcaaaccacagagtgaaccatccagaacagtcaaggagggcactgagcttcgtgatctccccgtgccttccctactccccctcttggcacactagctgtcaatgctcacccaggataataattttatgatcttcttatcaaaaaaaaaaaaa

SEQ ID NO: 3417 - DNA, 546 bp, Rattus norvegicus
  Genbank Accession No. NM_020082
  misc_feature (1)..(546): n = a or c or g or t
ggaattccgctaatagctagactggtnccagtcagacggaggaaacctggccagcttttgcactttctaggtgacgatggacatacagaggacccaatccttgcttctgctcttgttgctgaccctgctggggttagggcttgtacagccctcctatggccaagatagaatgtaccaacggttccttagacagcatgtggaccctgagggtacaggcggcagcgacaactactgcaacgtgatgatgcagagacggaggatgacttctacccagtgcaaacgcttcaacaccttcatccacgaagacatctggaacattcgcagcatctgtgatactgccaatatcccatgcaagaatggcaatatgaactgtcacgaaggcatagtgagggtcactgactgcagagagacagggagctctgtgccccacaactgtaggtacagggcgagagccagcactaggcgagttgtcattgcctgtgagggtaccccagaggtcccagtgcactttgacagatagatgacatctgtagctgctactgctgg

SEQ ID NO: 3418 - DNA, 405 bp, Rattus norvegicus
  Genbank Accession No. NM_020103
atgaacagttcttgcgctatgaagtcctgtatgctcatctttttcctggccctactgtgtgcagaaagagctcagggcctaaagtgctacagttgcatagaagtcccacttaatgctaactgctcaacagctacctgcccctactctgatggagtgtgtgtttctcaggtgttagaagctgtagagggctctgtaagacggacagcaaagagcaatctctgccttccaatctgccccaagtttcctcaaagaaccgagatcctgggtaccgttgtctacacgaaggtttcctgttgcaatacagatctttgcaatgcagcaggtcccactggaggcagcacctggaccgtggcaggggtgcttctgttcagcctgggctcagtcctcctggagaccttgctgtga

SEQ ID NO: 3419 - DNA, 4128 bp, Rattus norvegicus
  Genbank Accession No. NM_020306
ggttccggctgtgggcagcagggtggtccgcgactgcggccggaagcaggctgagcggctctcggcgagcgccgcctgtacttccggggacttcagcctagctcttgagttttccctgtaggcggcgcgggagggaaaagtttgcagggccgtgctgggaagatcacctccgcttcccaatgtgagcagtttctcgaacgctctctctagaaggttgcccagagaggtggtggacgggaacatgaggcagcgtctcctcttcctgaccactttggtgcctttcgtcctggcaccccgacctccggaggaaccaggctctggctcccacctgcgacttgagaagcttgattctttgctctcagactacgatatcctctctttatctaatatccagcagcactccataaggaaaagggatctacagtctgcgacacacttagaaacactactaactttttcagctttgaaaaggcattttaaattatacttgacatcaagtacagaacgcttttcacagaacttgcgagtcgtggtggtggatgggaaagaggaaagcgagtacagtgtgaagtggcaggacttcttcagcggacatgtggttggtgagcctgactctagggttctagcgcacataggagatgatgatgtcacagtaagaatcaacacagatggggcagaatataacatagagccactttggaggtttgttaatgatactaaagataaaaggatgctggtgtataagtctgaagatatcaaggatttttcacgtttgcagtctccaaaagtatgtggttatttaaatgcagatagtgaagagttgcttccaaaagggctcatagacagagagccatctgaagagtttgtccgtcgagtgaagaggcgagctgaacctaacccattgaagaatacttgtaaattactggtggtggcagatcatcgattttataagtacatgggccgaggagaagagagcactactacaaattacttaatagagttaattgaccgagttgatgacatataccggaacacctcgtgggacaatgcaggatttaaaggttatggagtacagatagaacagattcgaattctcaagtctccacaagaggtaaaacctggtgaaagacacttcaatatggcaaaaagttttccaaatgaagaaaaggatgcttgggatgtgaagatgctgctggagcaatttagccttgatatagctgaagaggcctctaaagtctgcctggctcatcttttcacctaccaagattttgatatgggaactcttggattagcttacgttggttctcccagagcaaacagtcatggaggggtttgtccaaaagcttattacaacccaggtgtgaagaagaacatctatttgaatagtggtctgacaagtacaaaaaattatggtaaaaccatccttacaaaggaggctgacctggttacaactcatgaattgggacacaattttggagcagaacatgatcctgatgggctggcagagtgtgccccaaatgaggaccaaggaggaaagtatgttatgtaccccatagctgtgagtggtgaccatgagaataataagatgttttcaaactgcagtaaacagtccatctacaagaccatagaaagcaaggctcaagagtgcttccaggagcgcagcaacaaggtgtgcggcaactccagggtggacgaaggagaagagtgtgacccgggcatcatgtacctgaacaacgacacctgctgcaatagtgactgcacactgaagccaggtgtgcagtgcagtgataggaatagtccttgctgtaaaaattgtcagtttgagacggcccagaagaagtgccaggaggctatcaatgctacttgcaaaggagtgtcttactgcacagggaatagcagtgagtgccccccaccaggagatgctgaagatgacactgtgtgcttggacctgggcaagtgcaaggctgggaaatgcatccctttctgcaagagggagcaggagctggagtcctgcgcatgtgctgacaccgacaactcgtgcaaggtatgctgcaggaacctttctggcccatgtgtgccttacgtcgatgcagagcaaaagaacttatttttgaggaaagggaagccctgtacagtagggttttgtgacatgaatggcaaatgtgagaaacgggtacaggacgtaattgagcggttttgggatttcattgaccagctgagcatcaacacttttgggaagtttctggcagacaacatcgttgggtctgttctggttttctccttgatattttggattcctttcagcattcttgtccactgtgtggataagaaactggacaagcagtatgagtccctgtctctgtttcatcacagtaacattgagatgttgagcagcatggactcagcatctgttcgcattatcaagccgttccctgcaccccagactccaggtcgtctgcaggccctgcagccggctgcaatgatgccgccagtgtctgcggctccaaaactggatcaccagaggatggacaccatccaggaagaccccagcacagattcacatgtggatgatgatggctttgagaaggaccccttccccaacagcagtgcagccgccaagtcctttgaggacctcacagaccacccagtcaccaggagtgagaaggccgcctccttcaagctgcagcgtcagagccgagttgatagcaaagagacagagtgttagtgggagcctgggcctgctctgggggacacagacctacagatgttccacagagctgacctgaatcaaaatagactgtaatgatctgagaaacgggagcagcttagcagatgctggtcatgtgacaggaccttcacatgacatcctgtgtatgtaggccctttgaagaggtgaggtaaatctggcttatttaaggctttcaggttttggggttttcttttgtaatctaaaaatctcctttgacctgtggtgcagaagcagaaaataaggctggatcaagttcctggtgacagcactgattaagccttcagtctgtttttctgtatgctgtaaggtcctctcactacggtgaagcacttagcagtgaggataactggaacacagactttttgggggttttggccttcacatgtgcgttgtctccaaatgccgtctgtcttggcactgaactttgtggatacagtcctttccaagatgaagactagctctggaacagtctatacaaacagccacatgaacttcaagatggcctattaactgcttagccccaggttccctggacagtttttccgttttgcaaaaagtgtcttcacgggtctctaaacattgtttgtcttaaaaaatactgggctggagagttggccccacagttaagagcacttggtttcattcccagtacccacacggtggctcttaactccaatcccaggggagatgacatcttctgaactctagaacacaaggcatgcattggtgcagtcaaacatgcaggcaacacacacaaatttagaaagccaagtgctgtaagaagttgcacatcccccaacctacagtgcttcgcggtctgagctggagtggagctctctcctgaacactctggaaggctggcaggtgctgagctggctagggagacgggtggggcccagccctggaagaaccgtcttcagcctcagcaagcagacactcgcgttacctcaggctttggggcttcaggacccaggatgttttgtacttattgtgtgaggataaataccattagcctgaattctcatttctgtaagttttagttataaaagctttttttcttctaagaattgcaatgtgctcaccagcaaacacgtcttaaccagaataacttgtaactctgaggacagttaaccaaacctgtgccttgtctctcctgagggtgtctgttacactaatacttgaacatgtaccttgtggtattggctccttttactagtcatgacagccttatatgttagttacactttgaggatttgctctaaggtgagtggggtgtgtgggtgtatgtatgaatgaaacagttggcagaatataagaaaaccatttttataaaattgtgactttttaaaacaaaaaaaaaaaaaaaaaaaaaaaaaaaa

SEQ ID NO: 3420 - DNA, 539 bp, Rattus norvegicus
  Genbank Accession No. NM_021261
cctcggcctccgggctgcgggaacgcccggactgggaacgccacgtcgagaggcgttcgcggaaggcgcgggatccaggacgtgctggtcacccccaaaccccaggccacccattatcgccttggttcgcccatcagagttgtaagaaaatggcagacaagccggacatgggggaaatcgccagcttcgataaggccaagctgaagaaaaccgagacgcaggagaagaacaccctgccgaccaaagagaccattgaacaggaaaagaggagtgaaatctcctaaaagcctaggaagatttccccaccccaccccttcatctccaagaaccccctcgtgatgtggaggaagagccacctgcaagatggacgcgagccacaagctgcactgtgaacccggcactccgcgccgatgccaccggcccgtgggtctctgaaggggacccccccactaatcggactgccaaatttcaccggtttgcccagggatattatagaaaattatttgtatgattgatgaaaataaaacacacctcgtggc

SEQ ID NO: 3421 - DNA, 348 bp, Rattus norvegicus
  Genbank Accession No. NM_021264
tatgtctggaaggctgtggtgcaaggccatttttgctggctacaagcgaggcctccggaaccaaagagagcacacggctcttcttaaaattgaaggtgtttatgcccgagatgaaactgagttctacttaggcaagaggtgtgcttatgtgtacaaagcaaaaaacaatacagtgactcctggaggcaaaccaaacaaaaccagagtgatctggggaaaagtaactcgggcccatggaaacagtggcatggttcgtgccaaattccgaagcaaccttcctgcaaaggccattggacacagaatccgtgtgatgctgtacccatcccggatttaaactaatggagagta

SEQ ID NO: 3422 - DNA, 4540 bp, Rattus norvegicus
  Genbank Accession No. NM_021266
gacctgacagagctgacagaaccagctcctggcaccaaccagcgccaacccagcaagaaagcctcaaagggcaagggactccgtgggagcgccaagatttggtccaagtcgaactgaaaggacttgtttcttccctgggaatgtggggtcccagctcccggaattccaggaatccttttttaaaaatatcttgataatatttatataagctattcatatctgtgatcctaaccagggaattccgtgaaaagcctatcgagcttggtgatgctggttgcccaaaaaagaatttcagttcaactttaagcttaccatcagaacaacaaatcaaaatgtaaacttaaaatatagccgacacaaatggtctggcggcggcggcggaggaggaggcggaggcgcaggggggacccggggcggctaggctgcccagagttgcgcgctcctctgcggggctgcggccactagcaaggcgctgccgggcaagagccacagcccgccgcgggccgggaaagagggacgcgaccccggcccgcccagaccactcctgctctcctcgccgcccgcgcttcatgaaccgcaagtttccgcggcggcggcggcggctgcgggacgcggagcagaatcccggggagcgggcagagcgcggctttagcccgacggagggcacgggcgagaaccagatctccccgaacacagtgggaactgccacccgccacgccgctgcctgccctagccgaccggcgccgaggagggagccgaaaaagtatggctgaggaggcggtgcctagcgagtcccgggccgccggccggccgagcttggaactttgtgccgtagcactccccggccggcgggaggaggtggggcaccaggacacggctggccaccgccggccccgggctcactcccggtgctgggctagagggctactgctgcttctttggctgctggaggctcctctgcttttgggggtccgagcgcagccggcgggccaggtatccgggccgggccagcaacgtccgccgccgccccagccacagcagggcgggcagcagtacaacggcgaacggggcatctccatcccggaccacggctactgtcagcccatctccatcccgctgtgcacggacatcgcgtacaatcagaccatcatgcccaacctgctgggccacacgaatcaggaggacgccggcctggaggtgcaccagttctacccgttggtgaaggtgcagtgctcagccgagctcaagttcttcctgtgctccatgtacgcgcctgtgtgcacggtactggagcaggcgctgcctccctgccgctccctgtgcgagcgcgcccagggctgcgaggcactcatgaacaagttcggcttccagtggccagacacgctcaagtgcgagaagttccctgtgcacggcgcaggagagctgtgcgtgggccagaacacttccgacaaaggcaccccgactccctccttgctgccggagttctggaccagcaatccgcagcacggcggcggtggttaccgcggcggctacccgggaggtgccggccccgtggagcggggaaagttctcctgcccgcgcgccctcagggtgccttcctacctcaactatcactttctgggggagaaggactgcggcgcgccctgcgaacccactaaagtatacgggctcatgtacttcgggcctgaggagttgcgcttttcgcgcacctggataggcatctggtcggtgctgtgctgcgcctccacgctcttcacggtgctcacgtacctagtagacatgcggcgcttcagctacccggagcggcccattattttcctgtccggctgttacacagcggtggcggtggcctatatcgccggctttctgttggaggaccgggtggtgtgcaacgacaagtttgcagaggacggggcgcgcacggtggcgcagggcactaagaaggaggggtgcaccatcctctttatgatgctctacttcttcagcatggccagctccatctggtgggtaatcctgtccctcacctggttcctggcagccggcatgaagtggggccacgaagccatcgaggccaactcacaatattttcacctagccgcctgggctgtaccagccattaaaactataaccatcctggcgctgggccaagtggatggcgacgtactgagtggagtgtgttttgtggggctcaataacgtggatgctctgcggggctttgtgctggcgccgctcttcgtctatctgttcatcggcacctctttcctgctggctggtttcgtgtcgctcttccgcatccgcaccatcatgaagcatgacggcaccaagacagagaaactggaaaagctcatggtgcgcatcggagtcttcagtgtgctctacaccgtgccggccaccatcgtcatcgcctgctacttctatgagcaggcctttcgggaccagtgggagcgcagctgggtggcccagagctgcaagagttatgccatcccttgccctcacctccaaggaggtggaggcgtcccaccacacccacccatgagccccgactttacagtcttcatgatcaagtatctcatgacgctaattgtgggcatcacatcaggcttctggatctggtccggcaagacactgaattcctggaggaagttctacacgaggcttaccaacagcaaacaaggggagactaccgtctgaaacccagaatcttacctgcccttttctggccggatcccagctatcgcctgaaagctagctccaaggaattcctgccaagcctagtcactccaggcttcctcgccagacacacacttttgcaggctcctttttcaacaaacagcacaggttctgcaaaagcttccgtccctggggtaaaggaacgagagggcccaactgctagaggggtttgtttgtgtggacagacctctctagccctcgctccgatactaggactgtacccttttatgattgtaaataacctgtgtaagatttttgtacgtatatttgtatttaaatattatcgaatacgcgttttttctttttaaaaatgtttaattatttagggcgatttaagcatctcggagcttttctcacttgctgtttcctgcggactgtagaggaagtaacacagaacacatttgatgagtgctttgccctgtgccctcatccttgttatgggagcatgggcctggctcttgcactgagggctgtgacaggggctgcctctccagggtcaattccttcaggttctttccgcccctcccctttcttgcttgcagtgggaaattttaaggtgcagaactccataaagtttccagatcccgaggtgggccccgctattccagttcctccccctttcagctgtagagtgtggagggctgtccctgagacttcatgatgctgcttttttgagaatcacctttcaacttcattagaggccccagcatgggcacagccagttaacccagcctccctctactctggtgtccctcgcccagtttctttctccttccacctaagttggtcagagggaatgcagtcaccagtaccaaactttggaaagtctgactttttaatggatgagctcatatttactttctagtgtctggaacctgctatgggtctggtccccatcgtggaaagtgcagcaagctttgtgggttgggacagatataaaacgttagttctaattgcattctgatgtctggcaatcaatctcctttcttcccccggtgatgctgcttgcttcttgcttttacccttctatgagatgcagacatcgaggtcacccggcaagtttggtgaaggagttggtttttaccttcctaaacgggatagtagaacatgaccagaacatgaaaactgaaggagatttcagtggagcgcagttcctccaagtgaaacggctgttttctggttttaaccgaactgcaattagacataaatcagtcgtcaacaatctaaaagttctacactatcaacattatgcttacttctcagcagcacattctgagggaggagcagtcacacccccacagaaagcctgggacttccgaagacagaggaggtggactgactgatgggtgagagaaacaaacacaaactgggcatgcatgctgaaggggaagtgtgtccattcctactgcgtcccatctgtgtgctctgtctggattcacggcagtgtgttcaatgtaaatctctcagagccatttaaaaatactcactttagttctccatgaagaagaggaaaaaaagcagtcctcccgattgtagtattcaaacttttaagagtttatcacaaatgccggtacataggacctaaatttatctatgtctgtcatacccttaaatgacattggttttgaatttggtatgcgttattattattattgttattattattattctcaccaccatgagatcatctatatttatagaggaatagaagtttatatatataaaatgccatatttttaatttcgcaaataaaaaaagtgaaagttttggaattccggaattccggaattccggaattccggaattccgg

SEQ ID NO: 3423 - DNA, 3152 bp, Rattus norvegicus
  Genbank Accession No. NM_021576
cacagagcaacacaagccgctatacgctcctagagaaatcggtgccatcgagagtgaagatcagcgacgcggcccctgcagttgtcaccgccgccagggactgaggcacccagcctctccgacgttctcgctcaccacgcgaacaaccttctctctgttccctgcgagccgcgtgtgctaggccagtggctcctgggtgcctcgggtgccagggtcatatcgggtgactctgggagtgcgtctgcgggcgggaggacctggggctaaaggaggcgggtctggccccgccccgccctagtccacccctccgcctagaagaggcccctgtggccgatgctcaccaggctccgggccagttcacccgctcaacgcgctcctgccagccatgcgtcccgcggctgctacggcacccaagtggctgcttctcgcgctaagcgctctactaccactgtggcccacagccaaatcctgggagctcacgatcatgcacacaaacgacgtgcacagccggctagagcaaaccagcgatgactccaccaagtgcctcaacgcaagcctgtgtgtgggcggcgtggcccggctcttcaccaaggtgcagcagatccgcaaggaagaacccaacgtactgcttttggatgctggcgatcagtaccagggcaccatctggttcactgtttacaaaggcctggaagtggcacacttcatgaacctcctgggctacgatgccatggcactgggaaatcatgaatttgataacggtgtggaaggactgattgatcccctcctcagaaatgtcaaatttccaattctgagtgcaaatattaaggcccgggggccactagcacctcagatatccggactttatttgccatataaagttctctctgtcggtggtgaggttgtggggattgttggatatacttcaaaggaaacccccttcctctcaaatccagggacaaatttagtcttcgaagatgaagtcactgcgttgcagcctgaagtggataaactaaaaactctaaacgtgaacaagatcattgccctgggacactctggtttcgagatggataaactcattgcccagaaggtgagaggcgtggacgtcgtggtgggaggacacaccaacacctttctctacacaggaaatccaccttccaaagaagtgcctgctgggaagtacccattcatagtcacctctgacgatgggcgaaaggttcccgtggtccaggcctatgcctttggcaaatacctgggctatctgaaggttgagtttgatgataaaggaaatgttgtcacttcctatggaaatcccattcttctgaacagcaccattcgtgaagatgcagccatcaaagcagacattaaccagtggaggataaaattagataattattctacacaggaactcgggagaaccatcgtctacctgaatggctccgctcaggagtgccgcttcagagagtgcaacatgggaaacctgatctgtgatgccatgattaacaacaacctcagacacccagatgaaatgttttggaaccacgtgtccatgtgcattgtaaatggaggtggcatccggtcccccattgatgagaggaacaatggtaccatcacctgggagaacctggctgctgtgctgccctttggagggacatttgaccttgtccaattgaaagggtccaccctgaagaaggcttttgagcacagtgtgcatcgatatggccagtccacaggggagttcctgcaagtgggtggaatccatgtggtgtatgatatttcccgaaagccctgggacagagtggtccaattaaaagttctctgcaccaagtgtcgagtgcccatctatgagcctctcgaaatggataaagtgtataaagtggtcctcccaagctatctggtcaacggtggggatggattccaaatgataaaagatgaattattaaaacatgactctggtgaccaagatatcagtgtggtttctgaatacatctcaaaaatgaaagtaatttacccagcagttgaaggacggatcaagttctctgcagcaagtcattaccaaggaagctttcctttaataattctttccttttgggcagtgatccttgttttgtaccaataacaggaagtcttgtccttggtgtcaaactgcatttttcttccagtgatattcaaatctgcctctggaaagctggctttgtgatggtgctcatcatcctcaaggctccaggcagatgctcttcacaaggaagagactgtaatatcatttgttgggaccagcaactcaatgagcagagagtcaaagtgaaccaacagggtccttctggaaggtagtgggtaggggaaacatctgggtgtagtttgcacatccacataacacatctggctaccactgagcctcaaaaataatttttccctttctattcatttctaatccatcaaacaactgatgtttacatagaactttatcattgccagttctggtggcacatgcccgtggtcacagaacttgggagggaggagaggatggctgcaagttctaggccagcctgacctatgtagagtttcaagccagttagctagacatcaagactcacacaaacaaacaaaaccattataatttacaagtagatttctgtagacaagtattgtgatgttaatcagaaagggttgacttgttcaaggccataaatctctaaacaatacatctaggacctgaacccaagtctttttacctcaagtccaatactctctcctacagtcaagtctcctctcttcctgccaatggccccagatgacaaatctctgtttcagccctccatactatcctttcttttgggctcctattgtctctcaagtttgagagagtaactactggacaggacatgtgcctttgatgagtcacagacaaactgtataaagcagataatgggttagtccagggaatgcaaaaggcagtcagggacagtggagaaagggaaaggagaatgtgaccaggactgatacattatagaagagagaatgggtatttagatgtgttacacaaacactagttaagaagcagggcataggggctggggatttgactcagtggtagagcgcttacctaggaagcgcaaggccctgggttcggtccccagctccgaaaaaaaagaacc

SEQ ID NO: 3424 - DNA, 1574 bp, Rattus norvegicus
  Genbank Accession No. NM_021577
tgagtggcgcgcttgctgagtgctgccacatcccgcaagctgagcaggtatcccaactctgttcctgcccggtagaccacccgaggtgtgagtgtggtcttgtcttccagattcgtaggacagaagctccaggaggaggacccgcccaacatggcatcggagagcgggaagctatggggtggccgatttgcaggctcggtcgaccccaccatggacaagttcaactcatctatcgcctatgaccggcatctgtggaatgtggacctgcagggaagcaaggcctacagcaggggcctggagaaggcagggcttctcaccaaagctgagatgcagcagatactgcaaggcctggacaaggtggctgaagagtgggcccaaggcatcttcaaattgtaccctaatgatgaagacatccacacggccaacgagcggcgcctgaaggaactcattggtgaagctgcagggaagttacacacaggcagaagtcgcaatgaccaggtggtcacggacctcaggctgtggatgaggcaaacctactcaaaactctccaccttcctcaaggtgctcattgaagccatggtagaccgggcagaggcggagtgtgaagtcctcttccctgggtacacacacttacagagagctcagcccatccgctggagccactggatcctgagtcacgccgttgcgctgacacgagatttagagagactgaaggaggtgcagaagcggatcaatgtcctgccactgggcagtggggccattgcaggcaaccctctgggtgtggaccgggagttcctctgtgcagaactgaactttggagccattacgctcaacagtatggatgccaccagcgagagagacttcgtggctgagttcctgttttgggcttctctgtgcatgacccatctcagcaggatggcagaagacctgattctctacggtaccaaggaattcaactttgtgcagctctccgatgcctacagcaccggaagcagcttgatgccccagaagaaaaacccagacagcttggagctgatccggagcaaggcgcgccgagtgtttggacggtgcgcaggactcctgatgaccctcaagggacttccaagcacctacaacaaggacttacaggaagacaaggaggctgtgtttgaagtgtctgacaccatgacagctgtcctccaagtagccactggagtcatctctacactgcagattcatcgtgagaacatggcacaggcactcagccctgacatgctggctaccgaccttgcctactacctggtccgcaaagggatgccattccgccaggcccacgaggcctcagggaaagctgtggtcgtggcagagatgaaaggggtggctctcaaccagctgtcacttcaggagctgcagaccgtcagtcccctgttctcgagtgacgtgaatctcgtgtgggactacagccacagcgtggagcagtacacagccttgggtggcacagcacagtccagtgttgagtggcagatcagccaggtgcgggccctgctgcagatgtagcagccctagattccacccagtcaaactgcgccccaata

SEQ ID NO: 3425 - DNA, 1659 bp, Rattus norvegicus
  Genbank Accession No. NM_021585
ctaaatcctctcatttcctgcatgtggttgggaagaggaatcttagaagacgagccccactctgtagcagctcaactaaccatgggcgatgatgacacccctgtgtgcctctctgtcgcctcatgcaagggagtgagttgctggctggacaaactcttactctgggctcttactctgtctatcacacttcgaaacaccgccgtggattgtaggagggtggacagaaatggattgctttctccaaatctgaactcaagtatgagtgtggtcaggatgggccaaaatgtatctctgtcttgttccagcaagaacacatccatagacatcacctattcgctctttttgggtaagagatacctagaaagcaagaggagaagagggggagctgtggatttccacctgaggatctccaatgccaacgagtcaggcccctacaagtgcaaagtcaatgattccaactcgtcgaaatacagtcagaatttcaacttcacaatcatccaggatgagagctgctcttcttgtctactgtcgctgttgctcccaggggtgttattggggctaatactcccaggcctggcctttttgatttatttgaaatacaaaaaagggtgcacaggaaagactctgaaagagaatgagtccaagggttctggagatgcgcccacgcaaggggagctgtatgcgaatatctgtgaaactcaaaaagggtcagaacaactccaggagatacactatactactccagtcttcaaagaggtggcacccacagaacaagaaggccttgaggatagaaaagatgactacatctactctgaactcacctactaaagtgcgaagaaactgactgtatcctaatataagagactttccagtaagctgatgcttacgaagaaacaggaaattcacctggcacttcagagtttcatcctaggctggggcagaaggatcctgagttcaaggccagctggcactacatagcaagaccctgtcttaaaacacaaagatcaaaaaagatttaacctggtcaccgaaagtgaatgtatttttcacatctggacactattattcctttggctaacttgggcatctaatcttgtcaccaaagtagccaggcttgataagggttaaaaaatacttcggttttgtggccttcagccgttctcactttccaacccaattttaaatggaattatcctggggctgcagaagtggctcagcagctaagagcagacactgctctcccaaaggatgggagtttgagcccagagtctacatcccataactcacagttgccaataacattgtttccgaaggatccatcgccctcttctggcacctgcaggcactacactcatgtgcacagacacacctaaacgcataattaagtaagttggggctggagagatggctcagtggttaagagcactgactgctcttccagaggtcctgagttcaatacccagcaaccacatggtggctcacaaacatctataatgggatccgatgccctcttctgctgtgtctgaagacagctatagtgtacttatgtacataaaataaataaatctttaaaataaataaataagtctatgggcataccaccctgtacatgcccaagctcatctagaagtaaataataaaataaaaaagttaatctta

SEQ ID NO: 3426 - DNA, 1733 bp, Rattus norvegicus
  Genbank Accession No. NM_021593
ccacgcgtccgagctcctacctgagcagaggtattctggcagcaatggcatcgtcggacactgaaggaaaaagagtggttgttatcggtggtggtttggttggagcattgaacgcgtgctttctcgcaaagaggaatttccaagttgatgtgtacgaagctagggaagatattcgagtggctaactttatgcgtggaagaagcattaatttggccctttcttatagaggacggcaggccttgaaggccgttggtctggaagatcagatcgtgtccaaaggtgtgcccatgaaagccagaatgatccactctctctcgggaaagaagtctgcaattccctatgggaacaagtcacagtatatcctttcaataagcagagaaaagttaaacaaggatctgctgactgccgtggagtcctaccccaatgcaaaggtgcactttggccacaagctgtcaaaatgctgtccggaggaagggatactcacgatgcttggacccaacaaagttcccagagacatcacgtgtgacctcattgtaggatgtgatggggcctactcaactgtcagagctcacctcatgaagaagccccgttttgattacagtcagcaatatatccctcatggctatatggagctgacaattccacctaagaacggggagtatgccatggaacctaactgtcttcacatttggcctagaaatgcctttatgatgatcgccctaccgaacatggacaaatctttcacatgcaccttgttcatgtcctttgaggagtttgaaaagcttccaacgcatagtgatgtgctggacttcttccagaagaactttccagatgccatccctctgatgggcgagcaagccctcatgagagatttctttctgttgcctgcccagcccatgatatcagtaaagtgctctcccttccacctgaagtcacgctgtgtgctgatgggagatgcagctcatgccatcgtcccattttttgggcaaggaatgaatgcgggctttgaagactgcttggtatttgatgagttaatggacaaattcaataatgatcttagtgtgtgccttcctgaattctcaagatttaggattcctgatgaccatgcaatttcagacctgtctatgtacaattacatagagatgcgagcgcatgtcaactctaggtggttcctgtttcaaaggctcctggataaatttcttcatgcactaatgccatccactttcatccctctctataccatggtcgccttcaccagaataagataccacgaggcagtgctgcgctggcattggcaaaaaaaggtgataaacagaggactctttgtccttgggtccctggtagccattggaagtgcctacatactcgtgcaccacctgtccccgagacctctggaactcctgagatctgcctggacgggaacctctggccactggaataggagtgcagacatttctccacgagttccatggagtcactaggacaaatgccccagttcactatccatagtgtcaacgttccgggtagcaaatgcttgattcctcttcaatatcaagggagaaactcatgttcccattgccgtcttcagttcactatgggaaaatcattgtcagcatataattaagttcggagtggagggctgtttttacagtgtctcattattttgcatgcttggactgggttcaatttttaaatttaaaaacacaataaccaaaaaaaaaaaaaaaaaaaaa

SEQ ID NO: 3427 - DNA, 1492 bp, Rattus norvegicus
  Genbank Accession No. NM_021594
cggctcggagagaaaggtcgtgagtccgcagcctccgacgggaccggttctgagccttcgcagagcaagatgagcgcggacgcagcggccggggagcctctgccccggctctgctgcctcgagaagggtccgaacggctacggcttccacctgcacggggagaaaggcaaggtgggccagtttattcggctagtggagcctggctcgccggccgagaagtcggggttgctggccggggaccgattggtggaggtgaacggtgagaatgtggagaaggagacgcatcagcaggtggtgagccgcatccgcgcggcgctgaacgccgtgcgcctgctggtggtcgaccctgagaccgacgagcaactcaagaagctgggcgtcccgatccgggaagagctgctgcgcgcccaggagaagtccgagcacaccgagccgccagcggccgccgacactaagaaggctggggaccagaatgaggccgaaaagagccacttggagcggtgtgagctccgaccccggctctgcaccatgaagaaaggccccaatggttatggcttcaacctgcacagtgacaaatccaagccaggccagttcatccgagcagtggacccggactcaccagcagaggcgtctggcctccgggcccaggaccggattgtggaggtcaatggcgtctgcatggagggcaaacagcacggggacgtcgtgtctgccatcaaggctggaggtgatgaagccaagctgctggtggtagacaaggaaacagatgagttctttaagaagtgcagagtgaccccgtcccaggagcacctggatggccccttgcctgaacccttcagcaatggagagatacagaaggagaacagccgtgaagccctggtagagccagcttcagaaagccccaggccagccctggcaagatctgcctccagcgataccagtgaggagctaaatgcccaagatagtcccaagagacacgattccacagagccctcatctacctcctcctcctctgaccccatcttggacttcaacatctccctggctgtggctaaagagagggcccaccagaagcgcagtagcaagcgggccccgcagatggactggagcaagaaaaatgaactcttcagcaacctctgagcattccgcctccgctgttttgtgctggagggtggggctgcccacccgacctagctccccttttcttctcccaggtgcccaccaatcaacattcaaatcagcatcagcacccaccccacttcccgacaaatctgattttcctacaattctgtccttccctcatcctagggaaggagaatgtcctgactccctgctcttcccctaagggcttcttcctaccaaagtgtcccttcaccagtccgccaaggacaccactgggaccctcactaagcaaggacctttggaccagacaagaagtctcccctcggcaatgtgtgataaccaagtccaaggtttaccaagggctgtctat

SEQ ID NO: 3428 - DNA, 2106 bp, Rattus norvegicus
  Genbank Accession No. NM_021653
gctgagatggggctgtcccagctatggctgtggctgaagcggcttgtgatattcctgcaggtagccttggaggtggctacgggcaaggtgctaatgacactgttcccagagagagtcaagcagaacatcctggccatgggccaaaagaccggaatgaccaggaatccccgattcgcccctgacaactgggtccccaccttcttcagcatccagtacttctggttcgtcctgaaggtccgctggcagagactggaagacagggctgagtatggggggctggcccccaactgcaccgtggtccgcctctcaggacagaagtgcaacgtctgggatttcattcaaggcagcagacccctggtgttgaacttcggcagctgcacctgaccttcatttcttctcaaatttgaccagttcaagagactcgtagacgactttgcctccacagctgacttcctcatcatttacattgaagaagctcacgccacagatggatgggcttttaagaacaacgtggacatcaggcagcaccgaagcctccaggaccgcctgcgggcagcacatctgctgctggccaggagcccccagtgtcctgtggtggtggacacaatgcagaaccagagcagccagctctatgcagctctgcctgagaggctctatgtgatacaggaaggcaggatctgctacaagggtaaacctggcccttggaactacaatcctgaggaagtccgagctgttctggaaaagctttgcatcccacctggacacatgcctcagttctagggggccagcaggaaggtcccccaagcttggtactcctccccaccagtacagatgtcctttagctttgaccttcgttcccagatcaattactagctcagatttttctgatctgaacaaataactacccgggaggcaattcagttcacagcacccaaccagcacaaattgttacaaccagagataaagcaataccgagctgttagcaaaagtaagtgtgcagctttgcaccactcccacaggcggagaccaatccagtgtgtgccccttctggtggaagggtactcatgcttggttggctgacttctgaagtgtagtgactcatgatgatgacgtcaaaagctcaatccatttgcccaagtttgccactcatagaatcagttgtttagtaccaagcgacaggcaggcgtatttctacttgtaggaaccaaagacattggaaacacttttctggccctaagattgaaatccgttaatattgttggtgataggtgtttccatggcaacctataatctaattctgctccctctaccatctttgaatagattgcagagaaatctggctctctggtactgacacaaaagctttataactttaactaaaccaaatcacaggcgccagcaaaagctgccattcccctgctgtaactctgttccactggcgcccagtctcttactggtctttcatgttagatggctttggactgacgggtagccatgggttcatctgtcatgtctgcttctttttatatttgtttatgatggtcacagtgtaaagttcacacagctgtgacttgatttttaaaaatgtcgggaagatgcagcaagctaacgattaaaatccgtcaggctatttttgaatggctccggtgtgatccttacaatttcctttctgacttgtgtatgtgggcctgctctgccgtcttttccgatagcccacgtgtaatgtaatcagctaaggcatcgtttgcctggagggaccccgtcctggaggaagaagctcgtatgtggcacgcatccaacatgttgtcctgtgaagtgttgtggaagggacgtggctgttcacgtcacagcaaagcacctttaggggtgatgcgtgaatggacctggggagcattctccaggcatccaaacagttcctccttgctctgccttagggctacacccaatactgtaacattgcatttatgtatggatttaggtgagtcaggatctagctataaagtcgagagtggctgtgaacttacaatcttcagactcagagtagctgggattccaggtctgtccccctatataaaaaatgcttttgacctcttgaaaaaaaaaaaa

SEQ ID NO: 3429 - DNA, 1265 bp, Rattus norvegicus
  Genbank Accession No. NM_021680
cgtcgccctcagccgggcgccccttgccctgtgcccagaccggcccgccccgggacccgccctgccggacccgcttggccgcccgggaagatgcggctgctcccggaatggctcctcttgctctttggtccttggctccttaggaaggttatcagtggccagatcgtggaatccgggaggccacagtacctggacctgcgtcccgccatggccggagggggcgcccgcggccagcagctcccggtgcccgcttcttccgagggcctgaaccccgtgcgctcctggagctgggcttggccagctaaccacaccggggcgctggccaggccgggggcagccggtggcccgcccgtgccgcgcaccaagagaaagccatccattaaagcggcccgcgccaagaagattttcggctggggggacttttactttcgtgtacataccctcaagttctcgctgctggtgaccggcaagattgtggaccatgtgaacggtaccttcagtgtgtacttccgtcacaattcgtccagcctgggtaacctaagtgtcagtatcgtgccgccttccaagcgtgtggagttcgggggcgtctggctgcctgggcctgccccccaccctctacagtctacgctggcattagaaggggtgcttcccggactggggccccctctggggatggcggggcaggggctggggggtaaccttgggggtgcacttgccggcccactcggaggcgcgctgggagttcctggggccaaagagtcgcgcgcttttaattgccacgtagaatatgagaagacaaaccgcgctcgcaagcaccgcccgtgcctgtacgacccgtcgcaggtgtgcttcaccgagcacacgcagagtcaggccgcttggctctgcgccaagcccttcaaagtcatctgtatcttcgtctccttcctcagttttgactacaaactggtgcagaaggtgtgcccagactataacttccagagtgagcacccctactttggataacgcccccgtcctgggcccagagtttcccaccagatctcagtctcactaggtgggaccctccctgtataccccatgctcctgtgactgcccccacgtcttccactatgggtgaggtggagaacaacagccttcccccgggactatcagccagtgtggccctccatttccttgtggtactgagtgtccctaagactcaaatgtcttcgtggcaggaggagagctcctggctagactcctgcacctgaacatgactggttgtc

SEQ ID NO: 3430 - DNA, 1840 bp, Rattus norvegicus
  Genbank Accession No. NM_021739
ggagccggagtcgccgccgcccgagcgcagccgagcgcacgccgagcccaatcgccaccgccatggccaccacggtgacctgcacccgtttcacggacgagtaccagctatacgaggatattggcaagggggctttctctgtggtccgacgctgtgtcaagctctgcaccggccatgagtatgcagctaagatcattaacaccaagaagctgtcagctagagatcaccagaagctggagagggaggctcggatctgccgcctgctgaagcattccaacattgtacgcctccatgacagcatctctgaagagggcttccactacctggtcttcgacctggtcactggtggggagctctttgaagacattgtggcgagagagtactacagtgaggctgacgccagtcactgtatccagcagatcctggaggctgttctccattgtcaccaaatgggggtcgtccacagagacctcaagcctgaaaacctgctcctggccagcaaatgcaaaggggccgcagtgaaactggcagacttcggcctggccatcgaggttcagggagaccagcaggcatggtttggatttgcgggaacaccaggctacctgtctcccgaagttcttcggaaggaggcctatggcaaaccagtggatatctgggcatgtggggtgatcctgtatatcctgctggtgggatacccacctttctgggatgaggaccagcacaagctgtaccagcagatcaaggctggggcctatgacttcccatcccccgagtgggacaccgttacccctgaagccaaaaacctcatcaaccagatgttgaccatcaaccccgccaagcgcatcacggcccacgaggccctgaagcacccatgggtctgccaacgatccacggtggcctccatgatgcacagacaggagactgtggaatgtctgaagaagttcaatgcaaggaggaagctcaagggagccatcctcaccactatgctggccacacggaatttctcagtgggcagacagaccaccgctccggccacaatgtccaccgcggcctccggcaccaccatggggctggtggaacaagccaagagtttactcaacaagaaagcagacggagtcaagccccagacaaacagcaccaaaaacagctcggccatcaccagccccaaaggatccctccctcctgccgccctggagcctcaaaccaccgttatccataacccagtggacggcattaaggaatcttccgacagcaccaacacaaccatagaggacgaagatgccaaagcccggaagcaggaaatcatcaagaccacagagcagctcatcgaggccgtcaacaacggcgactttgaggcctatgcgaaaatctgtgacccaggcctgacctcatttgagcctgaagctctgggcaacctggtcgaagggatggatttccacagattctactttgagaacctgctggccaagaacagcaagccgatccacaccactatcctgaacccgcacgtgcacgtcatcggcgaggatgcagcctgcatcgcttacatccgcctcacacagtacatcgacggccagggcagaccccgcaccagccagtccgaagagacccgtgtgtggcaccgccccgacggcaagtggcagaatgtccatttccactgctcgggcgctccagtggccccactgcagtgagagctgcgcctggtttcaccggacagagttggtgtttggagcccagccgccctcgggcgcacggcctgcctgtcgcatgtttgtgtctgcctcgtcccctcccctggtgcctgtgtctgcagaaaaacaagaccagatgtgatttgttt

SEQ ID NO: 3431 - DNA, 1182 bp, Rattus norvegicus
  Genbank Accession No. NM_021740
gttcccgggtcgtgctccgcgctcactgcagccaccttcgccgcccaccgtctcctccaacgcggactccggcagctttctcgccagagtcctcgaaactcgactaattccttacgcgtacgaccagaccaccggcgtgccccaccatgtcagacgcggcagtggacaccagctccgagatcaccaccaaggacttgaaggagaagaaggaagttgtggaggaggcagagaatggaagagacgcacctgccaatgggaacgctcaaaatgaggaaaatggggagcaggaggctgacaatgaggtagatgaagaagaggaagaaggtggggaggaagaggaggaggaggaagaaggtgatggtgaggaagaagatggagatgaagatgaggaagctgaggctcctacgggcaagcgggtagctgaggatgatgaggatgatgatgttgagaccaagaagcagaagaagactgatgaggatgactagacagcaaaaggaaaagctaaccttacgcaccgtgacctattcaccctccacttcccgtctcagaatttaaacgtggtcaccttcgagtagagaagcaggcccccgcccgcccactgcgcgagtgccacccaccaatgacatgcgctcttcaccaccccaccaaaaccacaacatgaattggcaacatgggaggagaaaagaaccagaacttcccaggccctgctttttttcttaaaaatactttaaaaggaaaatttgtttgtattttttatttacattttatatttttgtacatattgttaggggtcagccatttttaatgataacgggtgaccaaaccagccttcagagcgttttctgtcctacttcagactttacttgtggtgtgaccatgttcattatactctcaaaggagaaaaaaaaccttgtaaaaaaaacaaaaacaacaacaaaaaaacaatcttattctgagcattccagtaactttttttgtgtatgtacctagctgtactataagtagttggtttgtatgagatggttaaaaaggccaaagataaaaagattttttttcctttttttttgtctatgaagttgctgtttatttttttggcctgtttgatgtatgtgtgaaacaatgtccaacaataaaccggaattttattttgctgagttgttccaaaaaaaaaaaaaggaatcc

SEQ ID NO: 3432 - DNA, 1591 bp, Rattus norvegicus
  Genbank Accession No. NM_021744
ggaaagaaactgaagcctttctcggagcctgtctgggctgctcccactctcagaatctaccgaccatgaagcttatgctcggcttgttgctgttgcctttgacactggtgcatgcctctcccgccacaccagaaccctgtgagctggaccaggacgaggaaagtgtccgctgctactgcaacttctcagatccgcagcccaattggtccagcgcttttctatgcgcgggggcggaagacgtggagttctacggcggcggtcgcagcctggagtaccttctaaagcgtgtggacacggaagcaaatctggggcagtacactgatattatcaggtctctgcccttgaagaggcttactgtgcggtccgcgcgggttcctactcagattctattcggaaccctgcgtgtgctcggatattctggcctccgggaactgactcttgaaaacctcgaggtaaccggcaccgcgctttcgccgcttctggatgccaccggacccgatctcaacaccttgagcctccgcaacgtgtcgtgggcaacaacggatacctggctcgcagaactgcagcagtggctaaagcctggactcaaggtactaagtattgcccaagcacactcactcaacttttcttgcaaacaggtcggcgtcttccctgcccttgccaccttagatctgtctgacaaccctgagttgggcgagaaaggactgatctcggccctctgtccgcacaaattcccgaccctccaagttttagcgctgcgcaacgcggggatggagacgaccagcggcgtgtgctctgcgctggccgcagcaagagtgccactgcaggcactggatctcagtcacaattcactgcgggatactgctggcactccgagctgtgactggcccagtcagctaaactcgctcaatctatctttcactgggctggagcacgtacctaaagggctgccagccaagcttagcgtgcttgatctcagttacaacaggctggataggaaacctaggccagaggagctgcctgaagtggggagcctgtcacttacaggaaatccctttttgcactctgaatcccagtcggaggcgtataactctggcgtagtcatagccacagctctttcacccggatcagcgggcttgtcaggaactttggctttgctcctaggacatcgcctctttgtttaaggaacgtttgcatcttcctggtttctgagggtcctggtcaacaaatcctctgctttaaatttattaaaatcttaatccacaatgtaaggaaggacaatcaagatggctcaatgggtaaaagccaccaagcttgactcctgattttgatcctcgggatccacaccaaaggaaagaactctctcctgaaagttgtccatcggtgctcacaaataaatatatttttttttccggagctgaggaccgaacccagggccttgcgctcactaggcaagcgctctaccactgagctaaatccccaaccccacaaataaatatttttaaaaaaaaaaaaaaaaaaaaaaaaaaaaaaaaaaaaaaaaaaaaaaaaaaaaaaaaaaaaaaaaaaaaaaaaaaaaaaaaaaaaaaaa

SEQ ID NO: 3433 - DNA, 2070 bp, Rattus norvegicus
  Genbank Accession No. NM_021745
ctgagttctgagcgtctacagcgaaagtgctgggctttggaaaggagacctgggctccgaatcctctcagggccttggacgtctctgacccaaaacaatccaaggttcttatttgaagaccaccatcccagaagcacattctcgagttgaaaagttggagtggtgttcgaaatgaatctgattgggccctcccatttacaagccacggacgagtttgctctttctgaaaacttatttggagtgctaacagagcacgcggcaggtcctctggggcagaatctggacttggaatcgtactccccatacaacaatgtgcagtttcctcaagttcagccacagatctcctcctcgtcctattattccaacctgggtttctacccgcaacaaccggaagactggtactctcctggactctatgaactcaggcgaatgcccactgagagtgtgtaccagggagagactgaggtatccgagatgcctgtgacaaagaagccgcgaatggccgcctcatcggcgggaagaataaaaggggatgagctgtgtgtggtctgcggagacagggcctctgggtaccattacaacgcgctcacctgcgagggctgcaaaggtttcttccgaagaagcatcaccaaaaacgccgtgtacaagtgtaagaacgggggcaactgcgtgatggatatgtacatgcgtcggaagtgccaggattgccggctaaggaagtgcagagagatgggaatgttggctgaatgtttgttaactgaaattcagtgtaaatctaaacggctaaggaaaaatgtgaagcagcatgcggatcagacagtgaatgaggacagcgaagggcgtgacttgcggcaagtgacctccacgaccaagctatgcagggagaaaactgaactcactgtagaccagcagaccctcctggattatattatggactcatacagcaaacagagaatgccacaggagatcacaaataaaatcttaaaagaagaatttagtgcagaagaaaattttctcatattaacagaaatggctaccagtcacgtacagattctcgtagaattcacaaaaagacttccagggtttcagacactggaccacgaagaccagattgctttgctcaaagggtccgcagtcgaggccatgttccttcgttcagcggagattttcaataagaaacttcctgccggacacgcagacctgttggaagaaagaattcgaaagagcggcatctccgatgagtacataaccccgatgtttagtttctataaaagtgtcggggagctgaaaatgacccaggaagagtacgctctgctcacagcaattgtcatcctctctccagacagacaatacataaaggatagagaggcagtggagaagcttcaggagcctctgctcgatgtcctacaaaaactctgcaagatctaccagcccgagaaccctcagcatttcgcctgcctcctgggtcgcctgacagaactccggacattcaaccatcaccacgctgagatgctgatgtcttggagggtgaatgaccacaagttcaccccgctcctctgtgagatctgggatgtgcagtgaaggacacggggagaggctagctccttgtcctcctcagagcagcaacctggtattggacttcccttcttttcatttgtaccaggtctcactcaagaatctcaatgaatatttatgtggcaattatacaattcccacaactgtaaatacaggctccatagaattgcttcccctacactgtattttacaaggcttcgggaaaccccactgacacgccctttttgcctcattaaatcaattgttacttcaattttgtcaactgagctagggaccgcctcgttttatcctccatgcggcaacattatatatatatatattttatcaaatagctgttttctcttccttttttttttttttttttttcggagctggggactgaacccagggccttgcgcttgctaggcaagcgctctaccactgagctaaatccccaacccctattaaatagctgttttcaactgagacaataaactgaacgtaatgccaagagaa

SEQ ID NO: 3434 - DNA, 2413 bp, Rattus norvegicus
  Genbank Accession No. NM_021750
cttccgggctcgggagccgcgacaggagggggcctctgaaaagggtcctgttctgagaagtccattgtgtaccttgtcaccagcgcgtctgaaccctctctgaaccttcctgaagctggaagatttcaccctgatggctgactcaaaaccactcagaaccctggatggggaccctgtggctgtggaggctttgctccgggacgtgtttgggattgtcgtagatgaggccattcggaaggggaccaatgcctctgagaaggtctgcgaatggaaggagcctgaagagctcaagcagctgctggacttggagctgcagagccagggcgagtctagggagcggatcctggagcgctgccgggctgtgattcattacagtgtcaagactggtcacccccggttcttcaaccagctcttctcaggattagatccccatgctctggccgggcgcatcattacggagagcctcaataccagccagtacacatatgagattgcccccgtgtttgtgctcatggaagaggaggtgctgaagaaactccgtgcccttgtgggctggaacactggggatggggtcttctgtcctggtggttccatctctaacatgtacgccataaacctggcccgctttcagcgctacccagactgcaagcagaggggcctccgggccctgccacccttggccctcttcacttcaaaggagtgccactactccatcaccaagggagctgcttttctgggacttggcaccgacagtgtccgagtggtcaaggctgatgagagagggaagatgatccctgaggatctggagaggcagatcagtctggcagaggctgagggctcggtgccatttctggtcagtgccacctctggtaccaccgtgctaggggcctttgaccccctggatgcaattgccgatgtttgccagcgtcacgggctgtggttacacgtggatgccgcctggggtgggagcgtcctgctgtcccggacacacaggcatctcctggatgggatccagagggctgactccgtggcctggaaccctcacaagcttctcgccgcggggctgcagtgctctgctcttcttctccgggacacctcgaacctgctcaagcgctgccacgggtcccaggccagctacctcttccagcaagacaagttctacaacgtggctctggacaccggagacaaggtggtgcagtgtggccgccgcgtggactgtctgaagctgtggctcatgtggaaggcgcagggtgggcaagggctggagtggcgcatcgaccaggcctttgctctcactcggtacttggtggaggagataaaaaagcgggaaggatttgagttggtcatggagcccgagttcgtcaacgtgtgcttctggtttgtgcctcccagcctgcgggggaagaaggagagcccagattacagccagaggctgtctcaggtggcccctgtgctcaaggagcgcatggtgaagaagggaaccatgatgatcggctaccagccccatgggacccgggccaacttcttccgaatggtggtggccaaccccatactggtccaggccgatatagacttccttctgggcgagctggagcgtctgggccaggacctgtgagctgcttcctctctctgccccacccaagctctgcataagctcctgggttcccaaaagcgacctttctaggaaacagtggccttgactgtgtgagcccccacacactaactctcctagctaagtattggctgccaggacggtgtctaagcacactacagtctgttcttacgaaatgtgcttcttttaagtcggtcatagtggtacacaccgttaataccagcactggggaggcagaggcagacacaagcagatctcttgagtttgacgccagcccggtctacagagctggcctacacagaaaaaaaacctgtcccaaaaaaaaagaaaggaaggaagtaagaaaggaaaagaaagaaatatttttcattaagattatgtctataaaaaattgttattaatatgagagatatggtacgatgtattaagaaagctagatatgggggttggggatttagctcagtggtagagcccttgcctaggaagcgcaaggccctgggttcagtccccagctccgaaaaaaagaaccacaaaaaaaaaaaaaaaaaaaaaaaaaagaaagctagatatgagtttatatatcatggtatctgagttagactaaaaaaaaaaaatacataggaaaaggcggtgagtggaactgtgccaaaggtcagcagttttccctggaggaggataacaggctgttcctaagtcagcctctcagaccttccctgcttccccactttattatgtaaccacatcacctacttctgagatataacaataaagctttgtcactataaaaaaaaaaaaaaaaaa

SEQ ID NO: 3435 - DNA, 1545 bp, Rattus norvegicus
  Genbank Accession No. NM_021757
atggtggaggaggtacagaagcattctgtgcacacactagtgttcaggtcattgaagaggacccatgacatgtttgtggctgataatggaaaacctgtgcctttggatgaagagagtcacaagcggaaaatggcaatcaagcttcgtaatgagtatggccctgtgctgcatatgcctacttcaaaagagaatcttaaggagaagggacctcaaaacgcaccagattcatatcctcataagcagtatcctgccaatcaaggacaagatgttgaatatttggtgacaggtacacatccatatccaccaggacctggtgttgccttgactgctgatactaagatccaaagaatgccaagcgagtcagccgcacagtccttagctgtggcgttaccgtctcagaccagagttgatgcaaatcggactgcgcctgctggaagtgaataccgacacccaggggcttctgaccgttcccagcccacagcaatgaattctatgattatggagaccagcaataccaagaactctgcattaatggctaaaaaagcccctacaatgcccaaaccccagtggcacccaccgtggaaactctacagggttatcagtgggcatcttggctgggttcggtgtattgctgtggaacctggaaatcagtggttcgttactggatctgctgacagaactataaagatttgggacttggccagtggcaaattaaagctgtcattgactggccacatcagcacagtacgcggtgtgattgtgagcacgaggagcccttacttgttctcttgtggagaagacaaacaagtgaagtgttgggatcttgaatataacaaggttatacggcactatcatggccatctaagtgcagtgtatggtctggatttgcatccaacaatcgatgtcctggtcacttgtagtcgagattctactgctcggatctgggatgtgagaactaaagccagtgtgcacactttgtctggacacacaaatgcagttgctaccgtgagatgccaagctgcagagccacaaattattactggaagtcacgataccacaatacgattatgggatctggtggctggaaagacacgagtcacattgacgaatcataagaagtcagtcagggctgtggtcttacatccgctacattacacatttgcatctggttctccagataacataaagcagtggaaattccctgacggaggcttcattcagaatctctctgggcacaatgcaattattaacacgctggcagtcaatacggatggagtacttgtatctggagctgacaatggcactatgcacctttgggactggagaactggctataattttcagcgcgttcatgctgctgtacagcctgggtctttggacagtgaatcaggaatattcgcttgtgcttttgatcggtcagaaagtcggttactaacagctgaagctgataaaaccattaaagtttacagagaggatgagactgcgacagaagaaactcacccagtcagctggaaaccagaaattatcaagagaaagagattttag

SEQ ID NO: 3436 - DNA, 3025 bp, Rattus norvegicus
  Genbank Accession No. NM_021765
aggttccactgctccgtgggtctgtgtgttcttgagtaccagtgtcgctcggagcctgtgagaggctggggctcggacaatcggagccatgcctcttcgacttgacatcaagagaaagctaactgctatgtctgatcgggttaagagtgtggatttgcatccgactgagccatggatgctggctagtctttacaatggcagtgtgtgtgtttggaatcatgaaactcagacgctggtgaagacctttgaagtgtgtgatctccctgttcgagctgcgaagtttgtcgcaaggaagaactgggtggtgacaggagcagatgatatgcagattagagtgttcaattataacaccctggagagggtgcacatgtttgaagcacactcggattacatccgttgcattgctgttcatcccacccagccgttcattctcacaagcagtgatgacatgcttattaagctctgggactgggacaaaaaatggtcttgttcacaagtgtttgaaggacacacgcattatgttatgcagattgtgataaaccccaaagataacaatcagtttgccagtgcatctctcgacaggaccatcaaggtgtggcagctgggctcttcatcaccaaactttacgctggagggacatgaaaaaggcgtgaattgcattgattactacagtggtggtgataagccatacctcatttcaggtgcagatgaccggctcgttaaaatatgggattatcagaataaaacttgtgtgcagaccccggagggacatgcccagaatgtgtcatgcgcaacgttccatcctgagctgcccatcatcatcacagggtcggaagacggaacggtgcgaatttggcactccagcacctaccggctggagagcacactgaattacggaatggagcgagtgtggtgtgtggccagtctgagaggctccaacaatgtcgctctgggctacgatgaagggagcatcattgttaagcttggtcgggaggaacctgccatgtccatggatgccaatggaaagataatctgggccaagcattcagaggtccagcaggccaacctgaaagcaatgggtgacaccgaaattaaagatggagaaagactgccactagcagtaaaggatatgggcagctgtgaaatatatccacagaccattcagcacaatcctaatgggaggtttgtcgtggtgtgtggtgatggagaatatatcatctacacagcaatggccttgagaaacaagagctttggatctgcccaggagtttgcatgggcccacgattcttcagagtatgcaataagagaaagcaacagtgttgtaaagatatttaagaactttaaggaaaagaaatcatttaaacctgattttggagctgaaagtatctatgggggcttcttgctgggagtcaggtctgtaaatggcttagcattctatgactgggagaataccgaactcatccgcagaattgaaattcagcccaagcacatcttctggtctgactctggagagctggtctgtattgccaccgaggagtcattttttattcttaaatatctgtcagaaaaagtcttggctgcacaggaaacccacgagggagttactgaggatggcattgaggacgcctttgaggttcttggtgaaattcaggaaattgtgaaaactgggctgtgggtaggtgactgcttcatctacacaagttctgtgaacagattaaactattatgtgggaggcgagattgtcaccattgcccacttggacaggacaatgtaccttctgggctatattccaaaagacaataggctttatctgggagataaagaattgaacatagttagctactccctgttagtttcagtcctggaataccagactgctgtcatgcggagggatttcagcatggctgataaggtgctccctactatcccaaaagaacagaggaccagagttgcacactttttggaaaagcagggcttcaagcagcaagcactcacagtatccacagatcctgaacatcgttttgagcttgctcttcaacttggggagctgaaaattgcttaccagttagcagtggaggcagagtcggagcagaagtggaaacaacttgccgaacttgccattagtaaatgtcagttcagcctagcccaggagtgtttgcaccatgcccaggactacggtggtctgctgctcttggccactgcctctggaaacgctagtatggtgaacaagctggcagaaggtgcggagagagatggcaaaaataacgtggcattcatgagctattttttacagggcaagcttgatgcttgcctagagctcttgatcagaacaggaagactcccagaagccgccttcctggcccgaacttacttacccagccaggtctcaagggtagtgaagttgtggagggagaatctctcaaaagtcaaccagaaagcagcagaatccctcgctgaccccacagagtatgaaaaccttttccctggattaaaagaagcctttgttgttgaagaatgggtgaaggagacacatgcggatctgtggccagccaagcagtaccctcttgtcacgccaaatgaagagagaaatgttatggaagaggcaaaacggtttcagccctcaagagccacagctcagcaggaacctgatgggaaaccagcttctagcccagttatcatggcctcccaaaccactcacaaagaagaaaagagtttccaggaactagaagatgatttagataccatggaattagaggatattgatacaacagacatcaatctggatgaagatattctggatgactaaagtttgccatttactccagtaagagattatgatggcacatacaaatcagtcaccaccctgaccagaactgtggcaatccttgctctgcacacgtaaacaaggaggaacatagccccttcatcttcagggcagagttttaactgaaacagacacttgtgcttttttcatattgtcattaaaccacccctcataaaaaaaaaaaaaaaaaaaaaaaaaaaa

SEQ ID NO: 3437 - DNA, 1885 bp, Rattus norvegicus
  Genbank Accession No. NM_021766
gcaaaattaatttattggccactgttcgcttagagggcggaggaagccgactgtttcggtctctgcataacaggcccaaacctttgctccagagatcatggctgccgaggatgtggtggcgactggcgccgaccccagcgagctggagggcggcgggctgcttcaagagattttcacgtcgcctctcaacctgctgctccttggcctctgcatcttcctgctctacaagatcgttcgcggggaccagcccggtgccagtggggacaacgacgacgacgagccgcccccgctgcctcgcctcaagccgcgtgacttcacccctgccgaactaaggcgatacgatggagtccaggacccgcgcattcttatggccatcaacggcaaggtgttcgacgtgaccaaaggccgcaagttctatgggccggagggaccatacggggtctttgctggaagagatgcatccaggggccttgccacattttgcctggacaaagaagcactgaaggatgagtatgatgacctttctgacctcactcctgcccagcaggagaccctgaatgactgggactctcagttcagttcaccttcaagtaccatcacgtggggaaaactgcttgaaggagcggaggagccgattgtgtactcggatgatgaagaacaaaagatgaggctgctcggaagagtgactgaagcagtcagtggagcatatctatttttgtattttgcaaaatcatttgtaacattccagtctgtctttacaacatggtgatttcaatatttagagaagttttgaacttgtaagttttttaagtaacatcactagtgacaccgataaaatcaactcgtcttagaatgcatgatgtgtttgtacgtcacaaatccagaaagtgaactttagttctctagatccaaatggtaaagctgtttctcttctatctgtagttaaaactgaattacaattttattttcctgagagggaaaacttgggttatttccacaaactggccttttttcaagtgcacacacacacagtggccccaaatggtcaatgtactaagaatgaagagagaaggtcttagccatgctatagtctgaaaacaagcccattttacccaacagacttaactgcatgatttttgttttatctacctctaaagcaaaactgcagtgttccaaagtctgtggtattgattcaaaacagaagtccagtaacaaaatgaaaactcaataatgggtttagttggggcaaacacattgcctgtgttcatggactgatttatcatccctgtccccacgtggacactcccacacacagtaactctcacacacctggtaattggcagttggaactacaacagaaatctgaaaattcaaggtagaactttgcaaaagaaaaatctgttgcttgtagcagggcaatggttatgtggttattggccaaatgtaaaatttgagagcaatatacaggacaggaacaggtgtgcgcttttcaaaagcttccactgacatctctgaagaatgagaaaacactacatggcactagctgggtgattttgaaaggaaaatacattcctaaggtaacagttaatcctctgttgttacaaaactcgtagtcgcttcaaaaatagtagtcaggtgtctaggtcttggataatactcttggttaatactaaacctagcttaagtagactctgcagttgtatacatttgttaaaagtattatctgaacaactagtgaggtttcagactcttgtaattgtagttaaatagtcattgtattttcttgtgagctgtgtttaatggttttacctcaaatcagaaaaaaatgaagtgcttgggtcagttaataaaacggttttgcccagtaaaaaaaaaaaaaaaaaaa

SEQ ID NO: 3438 - DNA, 2573 bp, Rattus norvegicus
  Genbank Accession No. NM_021835
gacgactggtctgcgccgccggagaacctctgtcgctggggctggtccgcgggctccgaggaaccgctgcttcctgagagcgctccgtgagtgaccgcgacttttcaaagctccggatcgcgcgggaccaaccaacgtgagtgcaagcggtgtcttaaccctgcgctccctggagcgaactggggaggagggcgcaggggggagcactgcggtctggagcgcacgctcctaaacaaactttgttactgaagcggggacgcgcgggtatcccccgcttcccggcgcgctgttgcggccccgaaacttctgcgcacagcccaggctaaccccgcgtgaagtgaccgactgttctatgactgcaaagatggaaacgaccttctacgacgatgccctcaacgcctcgttcctccagtccgagagtggcgcctacggctacagtaaccctaagattctgaagcagagcatgaccttgaacctggccgacccggtgggcaatctgaagccgcacctccgagccaagaactcggaccttctcacgtcgcccgacgtcgggctgctcaagctggcgtcgccggagctggagcgcctgatcatccagtccagcaatgggcacatcaccactacaccgacccccactcagttcttgtgccccaagaacgtgaccgacgagcaggagggcttcgccgaaggcttcgtgcgcgccctagctgaactgcatagccagaatacgctgcccagtgtcacctccgcggcacaacctgtcagtggggcgggcatggtcgctcccgctgtggcctcagtagctggcgctggcggcggcggcggctacagcgccagcctgcacagtgagcctccggtctacgccaacctcagcaacttcaacccgggtgcgctgagcagcggcggtggggcgccctcctatggcgcgaccgggctggcctttccatcgcagccccagcagcagcagcagccgcctcagccgccgcaccacttgccccaacagatcccggtgcagcacccgcggctgcaggcgctgaaggaagagccgcagacggtgccggagatgccgggagagacgccgcccttgtcccccatcgacatggagtctcaggagcggatcaaggcggagaggaagcgcatgagaaaccgcatcgctgcctccaagtgccggaaaaggaagctggagcggatcgcccggctagaggaaaaagtgaaaaccttgaaagcgcaaaactccgagctggcgtccacggccaacatgctcagggaacaggtggcacagcttaaacagaaagtcatgaaccacgttaacagtgggtgccaactcatgctaacgcagcagttgcaaacgttttgaggacagactgtcagggctgaggggcagtggaagaaaaaaataacagagataaacttgagaacttgactggttgcgacagagaaaaaaaagtgtccgagtactgaagccaagggtacacaagatggactgggttgcgacctgacggcgcccccaatgtgctggagtgggaaggacgtggcgcgcctggctttggcgaggagccagagagcagcggcctgttcgcgacgctttgcgaacgggctgtgccgcgaccagaacgatggacttttcgttaacattgaccaagaactgcatggacctaacattcgatctcattcagtattaaggggggtgggtgggggcttacaaactgcaatagagactgtagattgcttctctagtgctccgtaagaacacaaagcagggagggctgggaaggggagggaggcttgtgagtaccaggctagattgcggatgaactcccctggcctgcctctctcaactgtgtatgtacatatatttttttttaatttgatgaaagctgattactgtctataataaacagcttcctgcctttgtaagttatttcatgtttgtttgtttgggtgtcctacccagtgtttgtaaataagagatttgaagcattctgagtttaccatttgtaataaagtatataatttttttatgttttgtttctgaaaatttccagaaaggatatttaagaaaacacaataaaccattgagaagtagcccccaacctctctgctgcattatcgatagataatgagagctaggtgaaatgacagctgagtgtctgtatgctggggtgagagcctgtagtccctcccgtctggttgtaggaatagacaccctgcatgctatcattgactcatactctctccccagcaacccacaagtccagactgttgaccagaagatggtgcagtgtttcttaaggctggaagaagagggtgttgcaaggggagagggacagcccactgggaaagcagatgcttgagttgagagccatatcaagtagcatgcgctgtgatcgtttataataataataaagacttcagcaattagatgtttatctcaaagcagggacccatggaaggttttacaaaaggtgtctccttccaacttggattctgacgactcctagaaaaagatgacctttgcttgtgcatatttataatagttcgtatcacaataaatgtattcaaataatggtttt

SEQ ID NO: 3439 - DNA, 1035 bp, Rattus norvegicus
  Genbank Accession No. NM_021836
atgtgcacgaaaatggaacaggctttctatcacgacgactcttacgcagcggcaggatacggtcggagccctggcagtctttctcttcacgactacaaactcctgaaacccaccttagcgctcaacctggcagatccttatcggggtctcaagggtcctggggcgcggggtccaggcccagagggcagtggggcaggcagctacttttcgggtcagggatcagacacaggcgcatctctgaagctagcctccacggaactggagcgcttgatcgtccccaacagcaacggcgtgatcacgacgacgcccacgcctccgggacagtacttttacccccgtgggggcggcagcggcggaggtacagggggcggcgtcaccgaggagcaggagggctttgcggacggttttgtcaaagccctggacgacctgcagaagatgaaccacgtgacgccccccaacgtgtctctgggcgccagcgggggtccccaggccgggccagggggcgtctatgctggtccggagccgcctccggtctacaccaacctcagcagttactccccagcctctgcaccctctggaggttccgggaccgccgtcgggactgggagctcatacccgacggccaccatcagctacctcccacatgcaccaccctttgcgggcggccacccggcacagctgggcttgagccgtggcgcttccgcctttaaagaggaaccgcagaccgtaccggaggcacgcagccgcgacgccacgccgcctgtgtcccccatcaacatggaagaccaggagcgcatcaaagtggagcgaaagcggctgcggaacaggctggcggccaccaaatgccggaagcggaagctggagcgcatcgcgcgcctggaggacaaggtgaagacactcaaggctgagaacgcggggctgtcaagtgctgccggcctcctacgggagcaagtggcgcagctcaagcagaaggtcatgacccacgtcagcaacggctgccagttgctgctaggggtcaagggacacgccttctga

SEQ ID NO: 3440 - DNA, 393 bp, Rattus norvegicus
  Genbank Accession No. NM_021840
atgtctggtcgcggcaagcagggaggcaaggctcgcgccaaggccaagacccgctcctcccgggccggcctgcagttccccgtgggccgcgtgcaccgtctgttgcgcaagggaaactactcggagcgcgtgggcgcgggcgccccggtgtacctggcggccgtactggagtacctgacggccgaaatcctggagcttgcggctaatgcggcgagggacaacaagaagacgcggatcatcccgcgccacctgcagctggccatccgcaacgatgaggagctcaacaagctgctgggccgcgtgaccatcgcgcagggcggcgttctgcccaacatccaggctgtgctgctgcccaagaagaccgagagccaccacaagcctaagggaaagtaa

SEQ ID NO: 3441 - DNA, 366 bp, Rattus norvegicus
  Genbank Accession No. NM_021842
atgtcccagaaacaagaagaagaaaaccctgcggaggaaaccggcgaggagaagcaggatacacaggagaaagaaggtattcttcctgagaaagctgaggaagcaaagctaaaggccaaatatccaagcctaggacaaaagcctggaggctccgacttcctcatgaagagactccagaaagggcaaaagtactttgactcaggagactacaacatggccaaagccaagatgaagaacaagcagctaccgagtgcaggagcagacaagaacctggtgactggtgatcacatccccaccccacaggatctgccccagagaaagtcctcgctcgtcaccagcaagcttgcgggtggccaagttgaatga

SEQ ID NO: 3442 - DNA, 786 bp, Rattus norvegicus
  Genbank Accession No. NM_021869
atgtcttacactccggggattggtggggaccctgcccagctggcgcaacgcatctcctctaacatccaaaagatcacacagtgctccgcggaaatacaaaggactctgaatcaactgggaacacctcaggatacaccggagttgaggcaacagctgcagcaggagcagcagtatactaaccaacttgcgaaagaaacagataagtacattaaggagtttggctttctgcccaccacccccagtgaacagcgtcaaaggaagatacagaaagaccgattggtggcagaattcaccacagcgctaacaaactttcagaaagtgcagaggcaagctgctgagagagagaaagagttcgtggcccgagtgcgagccagttccagagtatcgggtggctttcctgaagacagctcaaaagcgaagaattttgtatcttgggaaagccaaacacagcctcaagtgcaagtccaagatgaagaaatcacagaggatgacctccggctcattcatgagagagagtcttcaatcagacagctggaagctgacattatggacattaacgaaatattcaaagacttggggatgatgattcatgaacaaggagatgttattgacagcatagaagccaatgtagaaagtgcggaagttcacgtacagcaggcaaaccagcagctgtcaagagcggcaaattatcagcgcaaatccagaaaaaccctctgcatcatcattttaatcctggtggtcggaatcgtgatcatcttcttcatcgtatggggtctgaaaggctga

SEQ ID NO: 3443 - DNA, 1009 bp, Rattus norvegicus
  Genbank Accession No. NM_021989
gaattccggtagaaggcagcggaggagccgagccgggctgcgctcgctcgccgccccctagcctctttcttctccgccgggtgcactgccctgcgctgtcccctcgcctcttcgcccccttgacaaagaggacagaaagtttgcgcgggggagcgggccaggtgaggaggggcgtgccggcgccagcccgcgccccagcagccggacccaggcccctagcgcgcccgccatgggcgccgcggcccgcagcctccggctggcgctcggcctcctgctgctggccacgctgctgcgcccggccgacgcctgcagctgctccccggtgcacccgcaacaggcgttttgcaatgcagacgtagtgatcagggccaaagcagtgagcgagaaggaggtggattccgggaatgacatctatggcaaccccatcaagaggattcaatatgagatcaagcagataaagatgttcaaaggacctgacaaggacatcgaatttatctacacggccccctcctcagcagtgtgcggggtctcgctggacgttggaggaaagaaggaatatctaattgcagggaaggcggaaggagatggcaagatgcacattaccctctgtgactttattgtgccctgggacacgcttagcatcacccagaagaagagcctaaaccacaggtaccagatgggctgcgagtgcaagatcacacgctgccctatgatcccatgctacatctcctccccggatgagtgcctctggatggactgggtcacagagaagagcatcaatgggcaccaggccaagttctttgcctgcatcaagagaagtgatggttcttgcgcgtggtaccgcggggcggcacccccgaagcaggagtttcttgacatcgaggacccgtaagcaggctgacagagccccctgtggccaattgaaaagcctctgagggttcagactggtccagctttgacatcccttcctggaaacagcatgaataaaacatcaatcatcccggaattc

SEQ ID NO: 3444 - DNA, 1830 bp, Rattus norvegicus
  Genbank Accession No. NM_022177
ggcacgagccggcgcgccctcccgcccacgccatggacgccaaggtcgtcgctgtgctggccctggtgctggccgcgctctgcatcagtgacggtaagccagtcagcctgagctacagatgcccctgccgattctttgagagccatgtcgccagagccaacgtcaaacatctgaaaatcctcaacactccaaactgtgcccttcagattgttgcaaggctgaaaagcaacaacagacaagtgtgcattgacccgaaattaaagtggatccaagagtacctggacaaagccttaaacaagtaagcacaacagcccaaaggactttccagtagacccctgaggaaggctgacctccgtgggagaggaaagggcagtggtggggaggagggcctgaaccctggccaggttggccaatgggacggcactgactggggtcatgctgagatttgccagcacaaagacactccaccaatagcatatggtacgatattgctacttatattcatccgtgccctcgcccgtgcacaatggagcttttataactggggtttttctaagaaattgtattaccctaaccagttagcttcatcctcatcttcctcatcctcatcctcatcctcattttttaaaagcagtgattacttcaaggtctgtattcggtttgctttggagcttctcgcttccctggggcctctgggcacagttacaggtggtggctttgctgggagccctggggagtagcaaccttccaccagagcaggtccgaggaatgctgcagggcttgtcctgcagggggcgctcccggacagattccttgccgagagtcactcagctcaaggttgggcagaggctcctttttccagttcagtgtcaggggtagggaagcttcctttagaaggtacccctggggcctgtgctcagagaccctttcctagccgttcctgatctctgcttgcctccaaaagcatgcttcaactggcttccgcttctcacctctgtagcctgacctgccaatgctgcagtggaaggaaggagaatgttttggggggcgcttcctccctctcttccctttgctttcctctcacttgggccctttgtgagatttctctttggcctcctgtagaatggagccagcccctcctggataatgtgagaacatgcctagaattaaccacagaacacaagtctgagaattatccgaaacgcaattttaaatttgaaaactttgaggaattggacttttgcaattgcccctgagtcctatatatttcaacagtggctccgtgggctctgagttttcgaatatcagagatgaaaaaaatgaataagccagaatcttgccgtgaagccacagtggggattctgggttccaatcagaaatgggaacaagataaaattggatacgtcctaatgatcacagacggccctggtggttttgataactatttgcaaggcattttttacatatatttttgtgcactttttatgtttctttggaagacaaatgtatttcagaatatatttgtagtcaattcctatatttgaagagaagccatagtagtgtcagtagataacctctacggtcttgaactactggcgatttgtaaagaaatatatatgacatatagatgtattgtagcttgccaatgtcagccagtgtatttttccacttgtaatgaaattgtatcaactgtgacactatatgcactagcaataaaatgccaactgtttcgtgctgtaagcctcctactgtatgtgggaatttatttacctgaaataaaatctactagttgttaaaaaaaaaaaaaaaaaaaaaaaaaaaaaaaaaaaa

SEQ ID NO: 3445 - DNA, 3692 bp, Rattus norvegicus
  Genbank Accession No. NM_022179
gtcgtcttatttgggagctgagacttgaggaaggtgataacttctgaatccccccaggtagtcaataccattgtggaaacatggccgccattgagccttctggtctgcacccgggagaaagagactcaagctgcccccaggagggcattccaaggccctcaggtagcttagaactggcacaggaatacttgcaacaattcaaggtgaccatgacacagctgcagcagatccaagccagtcttctgtgttccatggagcaggcgctgaagggacaggacagtcccgctccttctgtccggatgttgcccacatacgtgaggtccacaccacatggcaccgagcaaggagacttcctggtgctggagctgggggccacaggagcctcactacgtgtgttgtgggtaacactgacgggcaccaaggaacacagcgtggagaccaggagccaggagtttgtgatccctcaagaggtgatcctaggtgctggccagcagctctttgactttgctgcccgctgcctctctgaattcctggatgcataccccgtggagaatcagggtctgaagcttgggtttaatttctcttttccttgtcaccagacaggcttggacaagagcaccctcatttcctggacaaaaggttttaggtgcagtggtgtggaaggccaggatgtggtccagttgctaagggatgccattcagaggcaggggacctacaatattgatgtggtagccatggtgaatgacacagtgggtaccatgatgggctgtgagctgggcaccaggccatgtgaagtcgggcttattgtagacactggtaccaatgcctgttatatggaggaagcgaggcacgtggcagctctggatgaggaccgcggccgtacctgtgtcagcatcgagtggggctccttctatgacgaagaggccctagggccagtactgaccaccttcgacgatgccctggaccacgagtccctggttcctggtgctcagaggtttgagaagatgattggtggcctttacttgggtgagctggtaaggctggtgctggtccacttgtcccagcatggggtcctctttggtggctgcgcctctcctgcgttgctgagtcaaaacagcatcctcctggaacatgtggccaaaatggaggaccctgccactgggatagcccacgtccacacagtcctgcagggcttgggtctgagccctcaggcctcagatgctgagctcgtgcagcgcgtgtgcatggctgtgtgcacgcgagctgcccagctctgtgcctctgccctggctgcagtcctatcccgcctccagcacagcagggagcagcagacactgcacgtggccgtggccactggagggcgagtgttcgaatggcaccccaggttcctctgcatcctaaaggagacggtaatgctcttggccccagagtgtgatgtctccttcatcccctctgtggatggtggtggccggggtgtggcaatggtgactgctgtggcagcccgcctggctacccacaggcgcatcctggaagagaccctggcaccatttcagctgagcttggagcagctgacagcggtgcaggcacaaatgcgggaagccatgatcagggggcttcaaggagagagctcctccctccgcatgctgcccacttacgtccgagcaacgcccgatggcagcgaacgaggtgacttcctggctttggacctagggggcaccaacttccgtgtcctgttggtacgcgtggccgagggcagtgttcagatcaccaaccaggtctactctattcctgagtatgtagcccagggctctggacagaagctctttgatcatattgtggactgcatcgtggacttccagaagaggcaaggccttagcggacagagcctacccctgggtttcaccttctcttttccttgcaagcagcttggcctggaccagggcatcctcctcaactggactaaggggttcaatgcatcaggctgcgagggccaagatgttgtgtatttattacgggaagccattaggcgcagacaggcagtggagctgaatgtggttgccattgtcaatgacacggtggggaccatgatgtcctgtggctatgatgatccctgttgtgagatgggcctcattgtcggaaccggtaccaacgcctgctatatggaagaactccggaatgtggcgagtgtgcccggggactcaggccacatgtgtatcaacatggagtggggtgcctttggggatgacggctcactgagcatgctcggcacctgctttgatgctagcgtggaccaggcatccatcaacccaggcaaacagaggtttgagaaaatgatcagcggaatgtacctgggggagatcgtccgccatatcctcctgcacttaaccagtcttggagttctcttccggggccagaagacgcaatgccttcagaccagggacatctttaagaccaagtttctctccgagattgagagcgacagcctggccctgcgtcaggtccgagccatcctggaggacctggggctgactctgacgtctgatgatgccttgatggtcctagaggtgtgccaggctgtgtcccgcagggccgcccaactctgcggggcaggtgtggctgcagtggtggaaaagatacgggagaaccggggcctgcaggagctgacagtgtctgtgggagtggatgggacgctctacaagctacatccccacttctccaggctggtgtcagtgacagttcggaagctagcccctcagtgcacagtcacctttttgcaatcggaggatgggtctgggaaaggggcagcgttggtcactcgtgtcgcttgccgcctgacccagatggcctgcgtttgaggaaaatctccaaagagcaattgggatctccctggactaaggattcagcccacacggaccctctggcgggcccagccacccacaactcccaaagaaacccacgggtggtgccctcataactgtccgcccacacccaatggctttctgagagaagcaccactctggttagcaaggaattccccgaagatggcggaggggcaggttctagtattggatggccggggccatcttctgggccgcctggccgattgtggccaactgctgggcaggtagccgaaaggtggtggttgtacgctgtgagggcatcaacatttctggaaatttctacagaaacaagttaaagtatctggccttctccgaaagcggatgaacaccaacccgtctcgaggcccctaccacttccgagccccaagccgcattttttggcgcactgtgcgaggcatgctgccgcacaagaccaaaagaggccaggctgccctggaacgcctcaaggtgttggatgggatccctccaccctatgacaagaaaaagcggatggtggtccctgctgccctcaaggttgtgcggctgaagctaccagaaagtttgcttacctggggcgtctggctcatgaggtcgggtggaagtaccaggcagtgacagctactctggaggagaaacggaaggaaaaggcaaagatccattaccggaagaagaagcagctcttgaggctaaggaaacaggcagaaaagaatgtggagaagaaaatctgcaagttcacagaggtcctcaagaccaatggactcttggtgtgaaccaataaagactgtttgtgcctcaaaaaaaaaaaaaaaaaaa

SEQ ID NO: 3446 - DNA, 6052 bp, Rattus norvegicus
  Genbank Accession No. NM_022183
aaatgaaactagggaagctctcctaaccgacgcacgtctgtggagaagcgtccaagtcgccggtcgcctagcgtttctcactgattttgtcgcttttaggattctcgagccccttcaggacggtcaccatggagttgtcaccgctgcagcctgtaaatgaaaatatgctactcaacaaaaagaagaatgaagatggcaagaaaagactgtccgttgaaagaatctatcagaaaaaaacccaactggaacatatactgctccgcccagatacctacatcggctctgtggagttagtgacccagcaaatgtgggtttacgatgaagatgttggtattaactacagggaagtcacttttgttcctggtttgtataaaatctttgatgaaattctagttaatgctgctgataacaaacaaagggacccaaaaatgtcttgcattagagtcacaatgatgcgaaataatttaattagtatatggaataatggaaagggaattcctgttgttgaacacaaagtggagaaaatgtatgtcccagctctcatatttggacagctcctgacctccagtaactacgatgatgatgagaagaaagtgacaggtggtcgaaatggctatggagctaaactgtgtaacatattcagcaccaaatttactgtggaaacagccagtagggaatacaagaaaatgttcaaacagacatggatggataacatggggagagctggtgacatggagctcaagccctttagcggagaggattacacgtgtattaccttccagcctgacttatctaagtttaaaatgcaaagcctggacaaagatattgtcgcactgatggtcagaagagcatacgatattgctggttccaccaaagatgtaaaagtctttcttaatggaaacaggctgccagtcaaagggttccgtagttacgtggatatgtatttgaaggataaggttgatgaaactgggaacgctctgaaggtggtgcatgaacaagtaaatccccggtgggaagtgtgcttaacaatgagcgagaaaggctttcagcagattagcttcgtcaacagcatcgctacttctaagggtggcagacatgtcgattatgtagccgatcagattgtgagtaaactcgttgatgtggtgaaaaagaagaacaagggaggtgttgcagtgaaggccgatcaggtgaagaatcacatgtggatttttggaaatgcggtaattgaaaacccaacctttgattctcaaacaaaagaaaacatgactttacaagccaagagctttggatcaacttgtcaattaagtgaaaaattcatcaaagctgcaattggttgtggtattgtcgaaagcatactaaactgggtgaagtttaaggcccaaatccaattaaacaagaagtgttcagctgtaaaacataacaggatcaagggaatccccaaacttgacgacgccaatgacgcagggagccgaaactctgctgaatgcacacttatcctgactgaaggggactcagccaaaactctggcagtctcaggacttggagtggttggaagagacaaatatggggtgttccctctcagaggaaaaatactcaatgtgcgagaagcttctcataaacagatcatggaaaatgctgaaattaacaatatcatcaagattgtggggcttcagtacaagaaaaactatgaggatgaagattcattgaaaactcttcgttatgggaagatcatgattatgacagatcaggaccaagatggttcccacatcaaaggcttgctgatcaattttatccatcacaattggccatctcttctgcgacatcgttttctagaagaatttatcactcctattgtaaaggtatctaaaaacaagcaagaaatagcattctacagtcttcccgagtttgaagaatggaagagtacaaatccaaatcacaaaaaatggaaagtcaagtactacaaaggtttgggcacgagcacatcaaaggaagctaaggagtattttgcaaatatgaaacgacatcgtattcagttcaaatactctggccctgaagacgatgctgcgatcagcctggcctttagtaaaaaacaggtcgatgatcgaaaggaatggttaactaatttcatggaagatagaagacagcggaagttacttggccttcctgaggattatttgtatggacaaaccactatgtacctgacctataatgatttcattaacaaggaacttatcctcttttcaaactctgataatgaaagatctatcccatctatggtagatggtttgaaaccaggtcagagaaaggttttgtttacttgtttcaaacggaatgacaagcgagaggtgaaagttgcccagttagctgggtcagtggcagaaatgtcctcttatcaccatggtgagatgtcgctgatgatgaccattatcaatttggctcagaattttgtgggtagcaataatttgaaccttctacagcctattggtcagtttggtaccaggctgcatggtggcaaggactcagccagccctaggtacatctttacaatgctcagccctttggctcggttgttatttccatcaaaagatgatcacacgttacggtttctgtatgacgacaaccagcgtgttgagcctgaatggtacatccctattatacccatggtgctgataaatggtgctgagggaattggtactgggtggtcctgcaaaatccccaactttgatgttcgtgaagtcgtaaataatatcaggcggctgttggatggagaagagcctctgcccatgctcccaagttataagaattacaaaggtactattgaagaactggcttcaaatcagtatgtgattaatggagaagtagctattctgaattccacaaccattgagatcactgagcttcccatcagaacatggacccagacatataaggaacaggttctagaacctatgttgaatggcaccgagaagacaccccctctaataacagactatagggaataccacacagataccactgtgaagtttgtcataaagatgactgaagaaaaattggcagaggcagagagagtgggactacacaaagtcttcaaactccagactagtctcacttgcaactctatggtactttttgaccatgttggttgtttaaagaaatatgacactgtgttggatattctaagagacttctttgagctcaggcttaaatattatggattaagaaaagaatggcttctaggaatgcttggtgcagaatcttctaaactgaataatcaagctcgctttatattagagaaaatagatggcaaaatagtcattgaaaataaacctaagaaagaattaattaaagttctgattcagagaggctatgactccgaccctgtgaaagcctggaaagaagctcagcagaaggtcccagaagaagaggaaaatgaagagaatgaagagagcgagagtgaaagcacgagccctgcagcggagtctggaccgaccttcaactaccttcttgatatgcccctgtggtatctaaccaaggagaagaaggacgagctgtgcaagcaaagggacgagaaggaacaagagctcaacacgttaaagaaaaagactccatcggatttgtggaaggaagacctggctgcttttgtggaagaactggaggttgttgaagccaaggaaaaacaggatgaacaagtaggacttcctggaaagggggtgaaagcgaaggggaagaaagcgcagatatctgaagtcctgccttctcctgtggggaaaagggtcatcccgcaggtgactatggagatgagagctgaggcagagaagaaaatcaggaggaaaattaagagcgagaatgttgagggcacccctgctgaggatggtgctgagccaggactccggcagagactagagaagaggcagaagagagagccaggtaccagggcaaagaagcaaactacattgccatttaagcctatcaaaaaagcccaaaagcaaaacccttggtctgattctgaatcagatatgagcagcaacgaaagcaattttgatgtccctccacgagagaaagagccaagaattgctgcaacaaaagccaaattcacggcggatttagactctgatgacgatttctcaggcttggatgagaaggatgaggatgaagatttcttcccattagatgatactccacctaagaccaaaatgcccccaaaaaatactaaaaaagcactgaagccacagaagagctccacatcagttgatcttgaaagtgatgggaaagacagtgtaccagcttctccaggcgcttctgctgctgacgtcccagctgagactgaaccctccaagccgtcctccaaacagacagtgggagtgaagaggacaataaccaaaggtcagtctttaacctccactgctggcaccaaaaagagagctgtaccaaaggagaccaagtcagattcagccttgaatgctcatgtctccaaaaagcctgctcctgccaaagccaagaacagtcgcaagaggatgccatcttcttctgacagctcggactctgagtttgagaaggcgatttctaaaggtgccacaagcaagaaactcaagggagaggagcgggatttccatgtggacttagatgacactgtggctcctcgagcaaaatccggacgagcaaggaagccgattaagtacctggaggagtcggatgacgacctcttctaaggggtgaggggatttcaggaatggttttactgagccacgttagttttaaagttcttccttaaccactctgaatttaattggcaggaagacttttttttaaataagaatatgcaagtgagcaggcccctgtggccttcacctttgttctcaacatactgtcagtagtggccgtctcgtgggcattgtcgtcttctctgattgtctgttttatgtctgttttctttggtctctgaaacctggcttgaatattttttggattccacataattatatgcttactcagcacagtagcatttatcaatttaaactaaagtggaaatggtttcaaaagcattcctgcctcctttcctatcccactaaatatgaggtaagacagcccttgttttcaattttataggtagaattccggccgggatcccccggcctgcctctgacggcggggactcagcttcggagagtcgggaggcatcaggtggcccgcagctctcgtcctctgcgtccttctcgcggtggctgaccgcgactccgaagaggtggctggccgctgcgcttggcggggtggggcgggatggcggcgtctgatggctggaggcggcctggccgggtactcttctacccgactctgctctacacagtgttcctggggagggtaggcagcccgaccaccgcgattggtaccaccgcatcgaccacacagtgctgctgggcgcagtgccgctgaggagcatgacgcgccggctggtactggacgagacgtgcgacggagtgatcactatgaacgaggagtacgagaccagattcctgtgcaacacctcgaaggaatggaagaatgtgggagttgagcagctacggctcagcacagtcgacatgactggagtccccaccttggccaacctccacagaggagtccagtttgctctcaagtaccagtccctgggccagtgtgtctacgtgcattgtaaggctggtcgatccagaagtgccacaatggtcgaggcctatctgattcaggtacacaactggagcccagaggaggctatagaagctatcgccaaaatccggtcacacatctccatcaggcccagccagttggaaattctcaaagagttccagaaggagattcgtgcaagggcagcaaataactaactactggtctcttgtgctgacatgagtatgaagtctgtggatgacaaagaacttggctctccgagatacagtaacatgttaaaggacaaagcgcttaagctaccaccactgcaaatgtgctgagtataatgtccctcctttgccttccttcctgaaataacacttggatggccacagagaaaaaaaaaaaaaaaaaa

SEQ ID NO: 3447 - DNA, 1050 bp, Rattus norvegicus
  Genbank Accession No. NM_022205
atggaaatatacacttcggataactactccgaagaagtagggtctggagactatgactccaacaaggaaccctgcttccgggatgaaaacgaaaacttcaacaggatcttcctgcccaccatctattttatcatcttcttgactggcatagtgggcaatgggttggtaatcctggtcatgggttaccagaagaagctgaggagcatgacagacaagtaccggctgcacctgtccgtggctgacctcctctttgtcatcacactccccttctgggcagtggacgccatggctgactggtactttgggaaatttttatgtaaggctgtgcatatcatctacaccgtcaacctttacagcagtgttctcatcctggccttcatcagcctggaccgctaccttgccattgtccacgccaccaacagccagagcgcgaggaagctgctggctgaaaaggccgtctatgtgggtgtctggatccccgccctcctcctgactatccctgacatcatcttcgccgatgtcagccagggggacggcaggtacatctgtgaccgcctttaccccgacagcctgtggatggtggtgttccagttccagcacatcatggtgggtctcatcctgccgggcatcgtcatcctgtcctgttactgcatcatcatctccaagctgtcacactccaagggccaccagaagcgcaaggccctcaagactacggtcatccttatcctggctttctttgcctgctggctaccgtattacgtggggatcagcatcgattccttcatccttttggaggtcatcaagcaaggatgtgagttcgagagcgtcgtgcacaagtggatctccatcacggaggccctcgccttcttccactgttgcctgaaccccatcctctacgccttcctcggggccaaattcaagagctccgcgcagcatgcactcaattccatgagcagaggctccagcctcaagatcctttccaaagggaaacggggtggacactcttccgtctccacagagtcagaatcctcaagttttcactccagctaa

SEQ ID NO: 3448 - DNA, 1410 bp, Rattus norvegicus
  Genbank Accession No. NM_022212
atggcagtgcctgctctgtggccctggggagtatacttgcttatgagcctgctgtccttgggatcttgcctggacacactggaggtgtgccccagtcttgacatccgctcggaggtgacagagctccgtcggctggagaactgcagtgtggtggagggtcacctacagatcctcctcatgtttgccgccacgggagaggacttccgaggcctcagctttcctcgcctcacccaggtgactgactacctgctgctgttccgagtctatggcctagagagccttcgagacctcttccccaaccttgctgtgatccgaggtgcgcgcctcttcctgggctatgcacttataatcttcgagatgccccacttgagggacattgggctgccgtcacttggggccgtgctgcgtggggccgttcgtgtggagaagaaccaggaactttgccatctctccaccattgactggggcctgctgcagcctgcacctggtgccaaccacattgttgggaacaagctgggtgaggagtgtgctgacgtgtgccctggtgtgctgggggctgctggtgagccctgtgtgagaaccaccttcggtgggcacaccgactacaggtgttggacctccagccactgtcagagagtgtgtccctgcccccgtgggctggcctgcacagtaggtggcgagtgctgccacagtgaatgtctcgggggctgcagtcagcctgaagaccctcgagcctgcgtagcttgccgccacctctacttccaaggagtctgcctccccgcctgccctccgggcacctaccagtatgagtcttggcggtgtgtcactgcggagctctgtggccatctgcgagaggttcctggacatgccaccgcctttggcatctacgagggcagctgcctagctcagtgccctccaggcttcacccgtaatggcagcagcattttctgccataagtgtgagggcctgtgccccaaagagtgcaaggttgggacaaagaccatcgactctgtccaagccacacaggacctagtgggctgcacccatgtggaggggagcctcatcctcaaccttcgacaaggctgtcagtattcttcctggtcacgcccttggccacgccctccgtggtcacaccctccctcccttgcatggttccccctcatccctccgttcctacctcctcgtttgtccctccagctcccttccctgtggacccatcaccttccctgggctgctccactcctatctttctcatccccagacaatctggagccagagcttcaacgcaacctggggctggtggagaccatcaccggcttcctcaaaatcaagcactcttttgcactcgtgaccctgggatttttcaagaacctcaaactaatccggggagattccatggtggatgggtaa

SEQ ID NO: 3449 - DNA, 1062 bp, Rattus norvegicus
  Genbank Accession No. NM_022216
atggccatgccctctgcgttgtcttcgaggccctgggatgctgtgttccccaataccactacagcagcatggaccaatggaagtgtgccagagactcccctgttctacctattcgcccggctggatgaggaacttcatgccaccttccccagcctgtggctggcactaatggtcgtgcatggcaccatcttccttgccgggctgttcctcaatggactggcgctgtacgtcttctgctgccgcacgcgggccaagacaccttcagtcaccatatccatcaacctggtggtgactgacctgctggtgggcctgtccctgcccacacgctttgcagtcttctacggtgcccgcggctgcctacactgtgccttccctcacgtcctgggctacttcctcaacatgcactgttctatcctcttcctcacctgcatctgtgtggaccgctacctggccattgtgcaacctgagggctcccatcgctggcgccagccggcctgcgccaaggctgtgtgcgtctttgtgtggctggcagcgggagtcgtgaccctgtctgtattgggtgtgaagactggtggacggtcatgctgccgggtctttgctctgaccgttctggagttcctgctgccgctactggtcatcagcgtgttcacaggccgtatcatgtgtgcactgtcgaggccaggcctcgtacgccagggtcgtcagcggcgcatgagggccatgcagctgctgctcacggtgctggtcatcttcctggtctgtttcacacccttccatgcccgccaggtgactgtggcactgtggcccaatgtgccttaccataccagccttgtggcttaccatgtggccgtcaccctcagcagcctcaacagctgcatggaccccatcgtctactgttttatcaccagtggtttccaggccactgtccaaggcctcttctaccagcgtggagaagaattcaagcccagcactatggatatggtcagcatgcacaagagcaccaagggctcagccccattcacatcctcagcaccggttctcacaccctcacccagcctttga

SEQ ID NO: 3450 - DNA, 1323 bp, Rattus norvegicus
  Genbank Accession No. NM_022220
atggtccatgggtacaaaggggtccagttccaaaattgggcaaagacctatggttgcagtccagaggtgtactaccagcccacctccgtggaggaggtcagagaggtgctggccctggcccgggagcagaagaagaaagtgaaggtggtgggtggtggccactcgccttcagacattgcctgcactgacggtttcatgatccacatgggcaagatgaaccgggttctccaggtggacaaggagaagaagcagataacagtggaagccggtatcctcctggctgacctgcacccacagctggatgagcatggcctggccatgtccaatctgggagcagtgtctgatgtgacagttgctggtgtcattggatccggaacacataacacagggatcaagcacggcatcctggccactcaggtggtggccctgaccctgatgacagctgatggagaagttctggaatgttctgagtcaagaaatgcagatgtgttccaggctgcacgggtgcacctgggttgcctgggcatcatcctcaccgtcaccctgcagtgtgtgcctcagtttcagcttcaggagacatccttcccttcgaccctcaaagaggtccttgacaacctagacagccacctgaagaggtctgagtacttccgcttcctctggtttcctcacactgagaacgtcagcatcatctaccaagaccacaccaacaaggccccctcctctgcatctaactggttttgggactatgccatcgggttctacctactggagttcttgctctggaccagcacctacctgccatgcctcgtgggctggatcaaccgcttcttcttctggatgctgttcaactgcaagaaggagagcagcaacctcagtcacaagatcttcacctacgagtgtcgcttcaagcagcatgtacaagactgggccatccctagggagaagaccaaggaggccctactggagctaaaggccatgctggaggcccaccccaaagtggtagcccactaccccgtagaggtgcgcttcacccgaggcgatgacattctgctgagcccctgcttccagagggacagctgctacatgaacatcattatgtacaggccctatggaaaggacgtgcctcggctagactactggctggcctatgagaccatcatgaagaagtttggaggaagaccccactgggcaaaggcccacaattgcacccagaaggactttgaggaaatgtaccccacctttcacaagttctgtgacatccgtgagaagctggaccccactggaatgttcttgaattcgtacctggagaaagtcttctactaa

SEQ ID NO: 3451 - DNA, 2175 bp, Rattus norvegicus
  Genbank Accession No. NM_022229
gcagaaatgcttcgactacccacagtccttcgccagatgagaccagtgtctcgggcactggctcctcatctcactcgggcctatgccaaagatgtaaaatttggtgcggatgctcgagccttaatgcttcaaggtgtagaccttttagccgatgctgtagctgttacaatggggccaaagggaagaacagtgattattgaacagagttggggaagtcccaaagtaacaaaagatggggtcactgttgcaaagtcaattgatttaaaggataaatacaaaaatatcggagctaagcttgttcaggatgttgccaataacacaaatgaagaggctggggatggcaccaccactgccactgttctggcacggtctattgccaaggagggctttgagaagatcagcaaaggggctaatccagtggaaatccggagaggtgtgatgttggctgttgatgctgtaattgctgaacttaagaaacaatctaaacctgtgacaacccctgaagaaattgctcaggttgctacaatttctgcaaacggagacaaagacattgggaacatcatttctgatgcaatgaagaaggttggaagaaagggtgtcatcacagtgaaggatggaaaaaccctgaatgatgagctagaaattattgaaggcatgaagtttgatagaggatatatttccccatattttattaacacatcaaaaggtcaaaaatgtgaattccaagatgcctatgttttgttgagtgaaaagaaaatttctagtgttcagtccattgtacctgctcttgaaattgccaatgctcaccggaagcccttggtcataattgctgaagatgttgatggagaagctcttagcacactggttttgaacaggctaaaagttggtcttcaggttgtagcagtcaaagctccagggtttggggacaacaggaagaaccagcttaaagatatggctatcgctactggtggtgcggtgtttggagaagagggtttgaatctaaatcttgaagatgttcaagctcatgatttagggaaagttggagaggtcatcgtcaccaaagatgatgccatgcttttgaaaggaaaaggtgacaaagctcacattgaaaaacgtattcaagaaatcactgagcagctagacatcaccactagtgaatatgagaaggaaaagctgaacgagcgacttgctaaactctcagatggagtagccgtgttgaaggttggagggacaagtgatgttgaagtgaatgagaagaaagacagagttacagatgctctcaatgctacaagagcagctgttgaagaaggcattgttctaggagggggctgtgctctacttcggtgcatcccagccttggattcattaaagcctgctaatgaagatcagaagataggtatagaaattattaaaagagcacttaaaattcctgcaatgacgattgctaagaatgcaggtgttgaaggatctttgatagttgaaaaaattctgcagagttcctcagaggttggctatgatgccatgcttggagattttgtgaacatggtggaaaagggaatcattgatccaacaaaggttgtaagaactgctttactggatgctgctggggtggcccccctgctaactacagccgaagctgtagtgacagaaattcctaaagaagagaaggaccctggaatgggtgcaatgggtggaatgggagggggtatgggaggtggcatgttctaactcctagaatagtgctttgcccttatcaatgaactgtggcaggaagctcaaggcaggttcctcaccaataacttcagagaagtcacctgaagaaaatgactgaagagaaggctggctgatcactgtaaccatcagttactggtttcctttgacaatacataatggtttactgctgtcattgtccatgcctacagataatttattttgtatttttgaataaagacatttgtacattcctgatgctgggtgcaagagccagtgtcctgctttcaacttaaatcactgaggcatctctactgttctgttagcatcaggactgtagcgctgtgtcaccacatgagaagttcagaagcagcctttctgtggagggtgagaatgattgtgtacagagtagagaagtatccaattatgtgacaacctttgtgtaataaaattttgtttaaagtt

SEQ ID NO: 3452 - DNA, 832 bp, Rattus norvegicus
  Genbank Accession No. NM_022239
ctttggtgtctgagctcagcaagaggcgctcgggggacgctgagggacagctttaacacccgcacaacacagggtacctggttcccagtccagagctgcttggagggcagagatgtcgcgagcagctaatcgccgcccagggctctccgcaggacaattggccgctgcaactgcatctcctctcctgtcactgctgctgctgctcgcctgctgtgcggacgcttgcagaggtacgccaatatcgcctcaaagattaccaccagaacaagaactacaattgtggaatgagattcctgaagcttgtgcgtcctttctgtctgttgattcccagcctcaggcatctgttgcattgaggaagctttgccgtgtcctgatggagattttccagaagcctcaggagcaaactgagaaagataatgctaagaggttcttatttcattattcaaagacacagaagttgggaaattcaaatgttgtgtcgtctgtcgtgcatccgttgctgcagctcgttcctcaactgcatgagagaagaatgaagagatacaaagtgaatgaataccagggtcctgtagctccaagtgggggattctttttatttaggccacgcaatgggaagaggtcaacaagtttcatttaaaatggatgccaaatgatcttttcattgaaaactctgctatgggatataaaatgtactcacattttgttctcaaaaaaaaaaaaatgatccctccgaaatgtagtctgttgcaaacccctgtattgtaacattctctgccatggttgagattatgaatgtttaatttgttgaaaataaaacagcatcttgaaatgt

SEQ ID NO: 3453 - DNA, 1315 bp, Rattus norvegicus
  Genbank Accession No. NM_022241
ctccttcacagctgtcctggctgcagccttccctccaggcagacgtggcaagggctagctatgaatgagtcctatcgctgtcaggcagccacctgggtggaacggggctcctcagcgacaatgggtggtgtgctcttcagtgcaggactgctgggcaatctcctggcgctggtgctgctggcgcgatccgggctggggtcctgccggccagggccactgcatccgccgccctcggtcttttatgtgctagtgtgcggcttgacggtcacccacttgctgggcaagtgtctgatcagcccgatggtcctggctgcctacgcgcaaaatcggagcctaaaggaactgctgcctgcctcaggcaatcagttatgtgaagccttcgccttcctgatgtccttctttgggttagcctcgaccttacagctactggctatggcactggagtgctggctgtctctgggacaccctttcttctaccaaaggcacatcaccgcccgccggggagtgctggtggcgccagtcgcaggcgccttctctttggctttctgtgcgctcccctttgctggctttgggaagttcgtgcagtactgtccaggtacctggtgcttcatccagatgatccacaagaagcgctcattctcggtaataggcttctctgtgctctactccagcctcatggcgctgctggtcctcgcaactgtggtgtgcaacctgggtgccatgtccaacctctatgccatgcacaggcgccagaggcaccatccccgccgctgctccagggaccgcgcccagtcaggctcagactacaggcatgggtccccgaatcctttggaggagctggaccactttgttctgctggctctcacgacagtgctcttcaccatgtgttccctgcctttaatttatcgtgcttactatggagcctttaaacttgtggacagagctgacggagactcggaagacctccaagccttgcgttttctgtctgtgatttccatcgtggacccctggatcttcatcattttcaggacttcagtattccggatgttatttcacaaggctttcacaagacctctgatctacagaaactggtgcagccattcctggcagactaacatggaatccactttgtgagggctttgcatgttctggcaagctgaaaatacagcacacattcggacaaagaactgtggttggaaaagccttacaattgaaatccttaaaaaatacctcccacggggagctaaagagatgcatcggccctgaaagagcatttacttttcttccagaagaccggagttcatttcccagcacc

SEQ ID NO: 3454 - DNA, 751 bp, Rattus norvegicus
  Genbank Accession No. NM_022245
tccggcccgggacattgcactaccctgcaagctgtgttgcagggcccggaaggctcactgttccgaaatggccgagcagtcagacaaggatgtgaagtactacactctggaggagattcagaagcacaaagacagcaagagcacctgggtgatcctacatcataaggtgtacgatctgaccaagtttctcgaagagcatcctggtggggaagaagtcctaagagagcaagctgggggtgatgctactgagaactttgaggacgtcgggcactctacggatgcacgagaactgtccaaaacatacatcatcggggagctccatccagatgacagatcaaagatagccaagccttcggaaacccttatcactactgtcgagtctaattccagttggtggaccaactgggtgatcccagccatctcagccctggtggtagctctgatgtatcgcctctacatggcagaagattaacctgtctgtccgaagccaaggaaggaaaagactgccccagagaggggagaaaagaagccagtgttaatcacttccactgacagaaaccctccccctgagaatgtaattgtaatatatctgtctccctctcctcctatgctaggagaacaaagatgggactctttgtactcttaaactttcaaatgtgcctttttactcaacttcattttgacatttcttcactacgtaatttacttattgtaaacatgatctttttaaataatatctggcttgtaaagt

SEQ ID NO: 3455 - DNA, 4075 bp, Rattus norvegicus
  Genbank Accession No. NM_022251
tcgaggctgacagaggtttggcaaaatctccacctctcccaacccccacatccctgcccgcgttagccgataggctcaagccctgttttatatttaactcactccagttcaggaggggcgggcctggggagacgctgtttatacagagctgggccaacactctcatccgtcctcctccgtcaagtcagcctctcttctgagccttcatcccactgcttggtttccgcattcatcccagagtggccggtgaggacgtgcaggactgggaagagacaccggacaccagacagagaggtgtgggaaagcgaagtcaggctgccaaactaggggacgccttccaattgaaaagggaagtcagctgacgatagttagttaaatttaacatcctttcatgggtagtatctgacttcaggggagaaaaatgaactttgcagaggaagagccctctaagaaatactgcattaaaggcaaacacgtggccatcatctgcgcaacggtggtagcagtgggattaatagtaggactttctgtgggcttgaccaggtcgtgtgagccgggcacaacccccgctccttccaaccctcctccccacaccagcactgccctgcctccccaggatcagaatgtctgccctgacagtgacgatgaaagtggagaatggaaaaacttcaggctgccggacttcatccagccagttcactacgacctggaggtgaaggtcctaatggaggaagacaggtacacgggcatagtgagcatctctgtcaacttgagcaaagacactcgtgacctatggctgcacatcagggaaaccaggatcaccaagctgccggagctaaggaggccctccggggagcaggtaccgattcgacggtgctttgagtacaagaagcaggagtacgtggtgattcaggctgaagaagaccttgcggccaccagcggggacagtgtctatcggctgaccatagagtttgaaggctggttgaacggctcccttgtgggtttttacagaaccacctacacggaggacgggcaaaccaagagcatagcggccactgaccatgaaccaacagatgccaggaagtccttcccttgtttcgatgaacccaacaagaaggcgacttacaacatatccctcattcacccgaaagaatactcagcactttccaatatgccagtagagaaggaagagacactggataacgactggaagaaaaccactttcatgaagtccgtcccgatgagcacttacctggtgtgctttgctgtacatcagttcacctcgatacagagaacatccaggagtggcaaaccactcactgtttacgtccagcccaagcaaaagcaaacagcagagtatgcagcaaacataaccaaagctgtgtttgacttctttgaagactacttcgctatggagtattctcttccgaaactggataaaattgctattccagattttggcaccggcgccatggaaaactggggacttgtcacttaccgagaaacaaacctgctttatgaccccctgctatcggcctcatccaaccagcagagagtagccagcgtggttgcccacgagctcgtgcaccagtggtttggaaatatcgtgaccatggactggtgggacgacttgtggctaaatgaaggatttgcttcgttcttcgagttcttgggagtaaaccacgcagaagcagactggcagatgctcagtcaggtgctgcttgaagacgtgctacctgtgcaggaggatgactccctgatgtcctcacatccggtggttgtcacggtgtctactccagctgaaataacgtctgtgttcgatggaatatcatacagcaagggagcttctatcctgagaatgcttcaagactggataacaccagagaaattccaaaaggggtgtcagatttacttggaaaacttcaagttcaagaacgcgaaaacttccgacttttgggattcactggaaaaggcaagtaatcaaccagtgaaagaagtaatggacacctggactagccagatgggctatcctgtggttactgtgagtggaaagcagaacgtcacccagaaacgctttctgttggactacaaagctgacccttcccagccaccgtcagcacttggttacacatggaatattccaatcaaatggaccgaaaatggcaattcaaatatcacagtctactataggtcaaacagagaaggaatcactttgaatgctaatcttagcggagatggttttcttaaaataaacccagatcacattgggttttatcgtgtaaactatgaagcagaaacttgggattggatagctgagactctctcctcaaaccacatgaacttctcttctgctgaccggtcaagttttatcgatgatgcttttgctctggcaagagctcaacttctggattatgagaaggccctgaacttgaccaggtatctcacatcagaaaaggatttcttaccatgggagagagtcatttcagctgtaagctacatcattagcatgtttgaagatgacagagagctgtaccccctgatagagacatacttccgaagccaagtgaagcccattgcggattctctgggatggcaggataccggaagccacatcacaaagttactccgggcctctgtattaggattcgcatgcaagatgggagacggagaagccttgggcaatgcttcccagttatttgaggcctggctgaaagggaatgaaagcattcctgtgaacctcaggctgctggtgtatcgctatggaatgcagaactctggcaatgaggcagcgtggaactatactctagagcagtaccagaaaacatctctagcacaagagaaagaaaagctgctctatgggttagcttcggtgaaggatgttacactcttggcaaggtatctggaaatgctcaaagaccccaatattattaaaactcaggacgtatttacagtcatccgctacatctcctacaacagctatgggaaaagcatggcctggaactggatccaactcaactgggactatctggtcaacagatttacaatcaacgacagataccttggccggatcgtcaccatagccgagcccttcaacactgagctgcagctctggcagatgcagagcttctttgcaaaatatccaaatgctggcgctggagcaaaacccagagagcaagtgctggaaacggtgaagaacaacatcgagtggctaaaactgaacagaaagtccatcagcgagtggttcaccagcatgccctaggagcgctgatgccttccgtttgtgcctccgctgcactgtggaacctgaggcgacctgttttacagactgcagagggagccttcaaaaccagttctgcttttgctaagtaccgtgtttatgtctcgcaaagctttttaaattattcctctttgtcgttgaaggaagatactaatagagtatttaatatactcagggatttctgctaagtgtactttatagggatgtctttacaaactgaagggtttaatagtcacattaatgtctttaaatatcattccttgtatcttaaatctgtgaaaatggagcaatttggtcccagctttacattttcagtaccaaagaaacaccacttaatcttctctcctgattgatttttaaagtttaaataccagtacgtgcaggacgtattgccatcttaatctttattttattattcagaattacatagacctaatatcattttattcacaaacgtctcactgctttaaatcctaccaaagtaaccttggcttaagttttggtgcaaacggatgtatctgcatgttggaaagctcgcaggaggcatgttggcaagatgagagtgcatgtttgggattactggggcttactgtccccacgccgggcggaagcttccagagatgtcttatagacaggtgtgtgaaggctgagagacagagtttggagccgtaacgtgtttgaaacaggaaagagtcagttctcggtggttaaaaatgagaggtttgcaggggatttttggtattcgacagccaagagtcagccagagaaaactcactcaccgggcccaacccggctttc

SEQ ID NO: 3456 - DNA, 2345 bp, Rattus norvegicus
  Genbank Accession No. NM_022266
cacagctcttctctccaagaagactcagccagacccactccagctccgaccctaggagaccgacctcctccagacggcagcagccccagcccagtggacaaccccaggagccaccacctggagcgtccggacaccaacctccgccccgagaccgagtccaggctccggccgcgcccctcgtcgcctctgcaccccgctgtgcgtcctcctgccgcgccccgaccatgctcgcctccgtcgcgggtcccgttagcctcgccttggtgctcctcctctgcacccggcctgccaccggccaggactgcagcgcgcagtgtcagtgcgcagctgaagcggcgccgcgctgccccgccggcgtgagcctggtgctggacggctgcggctgctgccgcgtctgcgccaagcagctgggagaactgtgcacggagcgtgatccctgcgacccacacaagggtctcttctgcgacttcggctcccccgccaaccgcaagattggcgtgtgcactgccaaagatggtgcaccctgtgtcttcggtgggtccgtgtaccgcagcggcgagtccttccaaagcagttgcaaataccagtgcacttgcctggatggggccgtgggctgtgtgcccctgtgcagcatggacgtgcgcctgcccagccctgactgccccttcccgagaagggtcaagctgcccgggaaatgctgtgaggagtgggtgtgtgatgagcccaaggaccgcacagtggttggccctgccctagctgcctaccgactggaagacacatttggccctgacccaactatgatgcgagccaactgcctggtccagaccacagagtggagcgcctgttctaagacctgtgggatgggcatctccacccgggttaccaatgacaataccttctgcaggctggagaagcagagtcgtctctgcatggtcaggccctgtgaagctgacctagaggaaaacattaagaagggcaaaaagtgcatccggacgcctaaaattgccaagcctgtcaagtttgagctttctggctgcaccagtgtgaagacctaccgggctaagttctgtggggtgtgcacggacggccgctgctgcacaccgcacagaaccaccacactgccggtggagttcaagtgccccgatggcgagatcatgaaaaagaacatgatgttcatcaagacctgtgcctgccattacaactgtcccggggacaatgacatctttgagtccttgtactacaggaagatgtatggagacatggcgtaaagccagggagtaagggacacgaactcatttagactataacttgaactgagttacatctcattttcttctgtaaaaaaacaaaaaggattacagtagcacattaatttaaatctgggttcctaactgctgtgggagaaaacaccccaccgaagtgagaaccgtgtgtcattgtcatgcaaatagcctgtcaatctcagacactggtttcgagacagtttagacttgacagttgttcactagcgcacagtgacagaacgcacactaaggtgagcctcctggaagagtggagatgccaggagaaagacaggtactagctgaggtcattttaaaagcagcgatatgcctactttttggagtgtgacaggggagggacattatagcttgcttgcagacagacctgctctagcaagagctgggtgtgtgtcctccactcggtgaggctgaagccagctattctttcagtaagaacagcagtttcagcgctgacattctgattccagtgacactggtcgggagtcagaaccttgtctattagactggacagcttgtggcaagtgaatttgccggtaacaagccagatttttatggatcttgtaaatattgtggataaatatatatatttgtacagttatctaagttaatttaaagacgtttgtgcctattgttcttgttttaagtgcttttggaatttttaaactgatagcctcaaactccaaacaccatcgataggacataaagcttgtctgtgattcaaaacaaaggagatactgcagtggaaactgtaacctgagtgactgtctgtcagaacatatggtacgtagacggtaaagcaatggatcagaagtcagatttctagtaggaaatgtaaaatcactgttggcgaacaaatggcctttattaagaaatggcttgctcagggtaactggtcagatttccacgaggaagtgtttgctgcttctttgactatgactggtttgggaggcagtttatttgttgagagtgtgaccaaaagttacatgtttgcacctttctagttgaaaataaagtatatatatttttataaaaaaaaaaaaaaaa

SEQ ID NO: 3457 - DNA, 2715 bp, Rattus norvegicus
  Genbank Accession No. NM_022268
ccgccacccgcaaccatggcgaagcccttgaccgaccaggaaaagcgacggcagatcagcatccgcggcatcgtgggcgtggagaacgtagcggagctgaaaaagggcttcaatcgtcacctgcacttcactctggtcaaggaccgcaatgtggccaccccccgcgactactacttcgcccttgcgcacacagtgcgcgaccacctggtggggcgctggatccgcacacagcagcactactatgacaagtgccccaagagggtgtattacctctctctggaattttacatgggccgaacattacagaacaccatgatcaaccttggcttacagaatgcctgcgacgaagctatttaccagctcgggctggacatggaggagttggaagaaattgaagaagatgctgggcttggcaatggtggtcttgggaggcttgctgcctgcttcttggactccatggcaacgctggggcttgcagcctatggatacggcatccgttatgaatatggaatcttcaatcagaagatccgagaagggtggcaggtagaggaggcagatgactggctcaggcatggaaacccttgggagaaggctcgtcctgaattcatgctgcctgtgcatttctacggaagagtagagcacacccaggcaggaacaaagtgggtcgacacccaggtggtgctggctttgccgtacgacacccccgtacctgggtatatgaacaacacggtgaacactatgcgcctctggtcggcccgagcacccaatgactttaaccttcaagactttaatgtcggagactacattcaggctgtgctggaccggaacctggctgagaatatctccagagtgctgtaccccaacgataacttttttgaagggaaggagctgaggctgaagcaggagtactttgtggtggctgcgaccctgcaggatgtcatccgacgtttcaaggcctccaagttcggctccaaggatggtgtaggaaccgtgtttgatgcttttccagatcaggtagccatccagctgaatgacacacatcccgcactcgccatcccggagctgatgaggatctttgtggacattgaaaaattgccctggtccaaggcctgggagatcaccaagaagacctttgcctacaccaaccacacggtgctcccggaggccctggagcgctggccagtggacctggtggagaagctgctgcctcgacacttgcagatcatttatgagatcaatcagaagcatttagatagaatcgtggccctgtttcctaaagacatcgaccgcatgcggcggatgtctctcatcgaagaggaaggaggcaaaaggatcaacatggcccacctctgcatcgtgggctgccacgcggtgaacggggtagcgaagatccactcggacatcgtgaagacccaagtattcaaggacttcagtgagctagaaccagacaagttccagaataaaaccaacgggatcaccccgaggcgctggctcttactctgcaacccagggctggctgacttgatagcagagaaaattggagaagactatgtgaaagacctgagccagctgacgaagctccacagcttcgtgggcgacgacatcttcctccgggaaatagccaaagtgaagcaggaaaataaactgaaattctcccagttcctggaaaaggagtacaaggtgaagatcaacccatcttccatgtttgacgtgcacgtgaagcggatccacgagtacaaacgacagcttctgaactgcctgcatgtgatcaccatgtacaatcgcatcaagaaagaccctaagaagttcttcgtgccaaggacagtcataattggtgggaaagctgccccaggatatcacatggccaaaatgatcataaagctggtcacctccgtggcagaagtggtgaacaacgaccctatggttggcagcaagttgaaagtcatcttcttggagaactacagagtgtctcttgctgaaaaagtcattccagccacggacctgtcagaacagatctccactgctggcacggaagcctcggggacgggcaacatgaagttcatgctgaacggggccctgaccatcgggactatggatggggccaatgtggagatggcggaggaggccggggaggaaaacctgttcatctttggcatgagggtagatgatgtggccgctctggacaagaaagggtatgaggccaaagaatattatgaggcccttccagaactgaagctggtcattgaccaaattgacaatggcttcttttctcccaatcagccagacctcttcaaagacatcatcaacatgttattttatcatgacagatttaaagtctttgcagactacgaagcctatgtcaagtgtcaagaaaaagtcagtcagctgtatatgaatcaaaaagcctggaacacaatggttctcagaaacatagctgcctcggggaagttctccagtgaccgaacaatcagggagtatgccaaggacatctggaacatggagccttccgatctgaagatctccctatctaaggagtccagcaatggggtcaacgccaatgggaagtaaatgctaaaatatattcttattcaataacttcttactggacttgagtactcttagagcttccctgagtctgttttgttattgaatggttagtaaatgtatttctgtattagagctaaaaataaaatgtcaacttcgagttgtcaaaaa

SEQ ID NO: 3458 - DNA, 853 bp, Rattus norvegicus
  Genbank Accession No. NM_022271
catagtttgcaccttccaaaggcacatgctgaagcccccagtgaaacacactgcgtaacagaacaatgagtgaagacttggctaattaattctcattatcaacagctagtcttcagaacataatggtccaaagttggctccaggggcccaagagttctcccggattgtccttggacacctgcagatctgaagcccccaaaggagctgtacatgcacatcacttggctgttcacatgtgtccctcacagacttgtctcctcacacactctgacagggatgttatagtgccgatcgtcctcagctatgagggtcaccattggccagtccttggggggatcagtgggatagactgtgatgaattcctcagtgttatacttggacagccggtacacctggatggtgtggcgaacagcataggcaagaaggaacatttcaacctgttcaaggccgccagtgtgtcccacctggttcaggtggttcctcaggagctgttcagggtcgtttgatgtgtctcgggcaaacaagagcacagagaaaaaaggaacttcctttcccttttccttgtcatcatacagttggatggctccggctaacatcaggaacttcatagcttcgtagaggctgtactcctcctcctcgtttgtgaacagctcgtcacaggctgtctgccttgcttcagcggcttccattgcagccaggctgacccacttcttccttagcagggcaagggattccttgattctttcaaccaggtcctcactcttcccatcaaatttcagtccaagtttccactgcttgatccaggtatatttgtttatcagcttttccggtaacagtatgagctccaaatccc

SEQ ID NO: 3459 - DNA, 1255 bp, Rattus norvegicus
  Genbank Accession No. NM_022278
gttccttcctgggaagctgcagcctgtcagcatggctcaggagtttgtgaactgcaagattcagtctggaaaggtggtcgtgttcatcaaacccacctgcccctattgcagaaagactcaagaaatcctcagtcaactgcctttcaaacgtggtctcctggaatttgtggacatcacagctactaacaacaccaatgcgattcaagattatttacaacagctcaccggagcaagaacagttcctcgggtcttcataggtaaagactgcataggcggatgcagtgatctactctccatgcaacagaatggggagctgacggcccggctgaagcagattggagctctgcagttatgaaaggggtggcaggcccatactgacagcagtcgtccagccatgctaatggccagtgcccctgagagttgatgtgcatcacacaggatgtcagtatataccggtgactgggattttcaacaaattggcttttatttcttcttttcctcagtgtcaaaaactgttgctgtttgcctctaaccatggggctgagaagcttaacggagcacacggtttgattatccactcttcatgtgcccacatgtctcttcctctaagctcatgtttcccaattcagtggatataaatctccagtgaatctgttgctggtttcctgccactgctggtcagctgaagtcattttgcagaagtccacttcttaaatgattgttaatcaatggatattgtgaaattgagtcacaggcctttccctccctcatgcatgcaccatcccacttctgcattcacagctctcagccagtgttctcaaccttgccctcccacaacccacagaagtccacacttggatgaggatgctgtttgaaaaatcaaatgaagaactttagcatagttggttctcactgtagccatattaacagagcagatggtgcgttcagctctgttcgtaaaggtgattaattgcccagaaattcccaagcagttgtgtgttgatcctaattagagtaacagcaaagtcaaatatgaaatgcaaaactgcagagctctccttccaagaatgtctgtgaaagaagttgtttgcaaaacactctcctagataatttcttccattcgcattttgacattttgctttgatgtcttactatgacatttaattatcatggaactgtaggtctcttctctggtctccaatgagaaggactcattcattcctaataaagatgtatctggagatgaaaaaaaaaa

SEQ ID NO: 3460 - DNA, 5358 bp, Rattus norvegicus
  Genbank Accession No. NM_022280
acgcggggaagcaccgcccaccccaggcgcgctacctctccagctcctctagcgggggtgcctctgttcccgcggctgaccaacactacatcctctctttgatctcctgcaccgggtggtccttggcttctcctctagtcttttgctctcctggccccgtactgtcccggcagtgccgtcggcaggtgagcagcgctgcagcgcggcgatccggaaagctcaccttgcacagaccagttgccgccagcgagaaactctggtctttaaaggatgaagaactcaatgctggaggctgcgtccctccttctggagaagctgctccttatttccaacttcaagatctttagcgtgtgcgccccgggaggaggcacagggaagaaacatccctatgaaatcaactcttttctccggggtgacgtgttggaagtgtcacggacccattttacccactatgggatctacctgggggacaaccgtgtcgcccatctaatgcctgacatcctgttggccctgaccagtgacaaggaacgcactcagaaggtggtctccaacaagcgtctcctcccaggagtcatttgcaaggtggccagcatccgtgtggacacagtagaggactttgcctatggagcggacatcctcgtcaatcacctagacgagactctcaagaagaagtccttgctcaatgaggaggtggcacgcagagcagagcagcagttggggctgaccccctacagcctactgtggaacaactgcgaacactttgtgacctactgcagatacggctctcctatcagtccgcaggctgagaagtttcacgagactgtgaagatactcattcgtgatcagagaagttgtcttgcttcagctgtcttgggattagtgtctattatctacacaggcctggcatcatatatgacccttcctgcagtctgcatcccgttctgcttgtggatgatgtctggctagcttccaacccccatgggaatgtgtgaaaatatgtttatatttacagagcacaaaacattataagcattgtcgataaaatgtggcccacaacacgttctagataaaaagtgatcgagaatcatgcaaagtgcttaccatgtaagccgaacagagcctttctgcatcttctcaggctgcagaacaccaggagccctggaagcttgtcagtctgtcagaggtcagcggccccagaggaatggcacctgaggtgaaagccacaggagataattcaggttattctttcctcctgtaatcattctgttgttaggcttatcagctgagatcaccaactttattgtaatgtattcttatgtaatgaccgatattaaagtgaacaatttccctcatttagatgaatatatgtttgaaaattagctgaaaggaaactaaagctcacattcccttttgcctttctttgtataataatataatcttaagtatgtcaagaatactattttcattatttcattatttcaagatcagtgttgaaagagcttactgaagtgactggtcagaaagcataggagtgtaggaacagccacagtagctatttatatttacctttgaatagcctgagattttgttttcttcttttctttccatatgactgtatggctactttcaaaaaggtgaacagaattattaaaataattctggtattagatatacacatgtgccaaatgaatacaccaatacctgcactcacatattgataggtaaactgtatttctggttgctttattatactagtgtcatttattaatgaggatctacaaaaatgaatataaaaccaaatccagtgtcttttcctgtcccttgaatctctctctctctctctctctgtgtgtcactggatagttttaaagctaaatttactaatatccttttttaaaatacaagttacatgttttacagttaattttccactttaagtataatttatgaccataagagaggtatgtcacagcagtatataaagcttaaatgaatagagccaaaaaataattattctgagaaagtcactaatgccaagcattgcaggtgtgttcactcactctactagatcagaggggagacctatcttgttaaaaagcacaccttcaagactgtcactaaaatgacacaggttggagttacatttcaggtactgaactgttatcaaaggtggtacatggaatatctgttgtccttagaaggttggagcagcaggtagagagctccaggcctgtgtgggctggaagacaatactgtctgttgtctggtaactgttaaaaggtacaaaacaggcactgaagagatgactcagcacttagagctattgctactcttgaagaggaccaggatttagttgccagcagctcctggtagatcacagccttctgtaactccaatttaaaaagattcaacaccctcttctggcctccatgtgcataacatacatggtagacaaacatgcatgcaggcaaaacacacacacacacacacacacacacacacacacacacacacacacacacacaaaataaaacttaaaaaaaattgaatcacagaatagccaagcatgtaatcccaacccttggaatgtagaggaaggaagattgggagttcaaggcaaggctgcttacacaggggatttaagatttgtttgcactgcccaaagggcttcaagaccagcttgcactgcataggtagttcaagactagttttggctacatgagacccagtctcaaaacaacagaagaaccacagaacagtgactcttctgtcagaaaagaggattttttttttagtcagtgatcgggctagaacaaacgaaagtacagattttagtttagctgaggtcttatgacctagtattttcctacaacaaatttagttggagtataatgataattaattaaaatttgtttaatattcaaattaaatgtttaactgcttaagtgttttatatcagtaaacactgaatggaaaaatcaaataatacaggtgttctttgggcctgattcaaccacttaaattacctgaagtatctgtgaatgtggacagccactgtgttagtgcctttttcttttcaccatgggagttgtttatgtgacttcattataacccgcctcccacagacatcagtattgtaggtagtagaaaatagtttgaaattaaatctgtgttcacagatagtggttcctccttatatactatgagaattcttggggttagagttaacataaataatcttgactctcttcatattattagaccaagactcattcatcattcaatggatgctcactccatgctaagcattgaagtgctgcaacttcatgctccggtattagttttccttttttttttttttttgagacagggtgtcactcagtaaagtaaatttacttagaatgaattcactcacagagagttgtgtgcctctgttttccaagtgctggaactaaaggtgtgctcaccactcctggcctaaaattactttctagctagctataacagcatgtatatagtgtggggaaaatacagagaaaagaacaagtaatttctgcctcaggagtcaggcattttacgcgacggaggcaataacaaccaggaagctgacaaactgtgaggtaactttgttacattgacatcattctactgtccttgggaagcaaggaaaagaagaaaggttctatttgttaaatgttacacaacaccagaattgctgaacttgtagatacgaaagtctcttttgttctttccatttgattcgttggttaacaaggtagaaataaacatgttggttatgggggaaaaaaaacttaggccaatcattgctttcctaacccatggtggcaggtaatgaatttctctagactttatcagtcaaagctcatatttatgatccaagttcatgatattatattatttctattctgtcttgacagtgatagctaagtcatggtgtattatatcttttgatttgttctttgcatagatgaaggacagagggcctcctgggtttaagatgacttaatgccagagtcagggagtaggttgtatagggaatggatgatatatgagatgtggactgagatacagggcctaacagacatagttgcactggagtttcagtgattgacagctgaatagagctaactgaaggcacacagaaagaagagaccaattttagctgcagaacccaaaatcaggcaggggatactgagacttaaatgatcagacaggttttggatgggacattccacacatgggaacggcatggggaatacatgcaaattgcctagaacacacaccatgaatagctgtgaggtcttcgatgtcagacaaatgcaagtggtttaggggctgcagaggaagagtggtgactagacatgcagaaacacaaagcagtgctgaggggcctagtcttctgtagatcaagatgtttggactttatggataggcagtggagaacgagcatagaaaggtaacttccaagaataaagcagaaggatggatggggttgaggtgggatagagagactggagaggtttagctaaggtctttgttagatttaaggtctagatcagtcttctcagtctccctagtgcagttcttcatgtcgtggtgagctccaaccatataattatcttcattgctacttcacaactgtaatcttgctactataatcttgctactaatcataatgcaaatatctgatatgcaggatatataataagtgacccctgtgaaagacttgttagatgctcaaaagggtcctgacccacaggtagagaatcaccagtgtaaatggtgagatggctcagtgatcacccaagttcaaataagggtctgcacttgcaagtgtagaaagcagtgtcaaagaagtgccaagcaacttggaccacttagatttgattggtgaacaactgtgatggattgttagggaatatcatgcatccttgcttttcctaagaaagagttgattactgtaacataaattaacttgtcaagtgtgtatacactcctgatagtcaatttgctaggcatgctccttcctaaggacatgtaaggaagtttggattggttgttttaatttttgtcacaatgtatttcttactttcctgtttgctatttcatattgttcatgtccaagactaaaagctgtttttcaggaacacggagttactgtaatggcaaagtttttgttatggatgagaagcatctgaacagaatttttattttatataatctatctggggtttcaataaacttagactttttttagttaaactaagtttatacacatgtattttgaataaaagcagtttacatatcaaaaaaaaaaaaaaaaaaaaaaaaaaaaaa

SEQ ID NO: 3461 - DNA, 1617 bp, Rattus norvegicus
  Genbank Accession No. NM_022298
gcgctgtaagaagcaacacctcctcctcgcctccgccatccacccggcagccgcgaagcagcaaccatgcgtgagtgtatctccatccacgtcggccaggctggtgtccagatcggcaatgcctgctgggagctctactgcctggaacatggcatccagcctgatggccagatgccaagcgacaagaccattgggggaggagatgactccttcaacaccttcttcagtgagacaggagctggcaagcacgtgccccgggcggtgttcgtagacctggaacccacagttattgatgaagttcgcactggcacctaccgccagctcttccacccagagcagctcatcacaggcaaggaagatgctgccaataactatgcccgtggccactacaccattggcaaggagatcattgaccttgtcttggacagaattcgcaagctggctgaccagtgcacgggtctccagggcttcttggttttccacagctttggtgggggaactggctctgggttcacctccctgctgatggagaggctctctgtcgactacggaaagaagtccaagctggagttctccatttacccagccccccaggtttccactgctgtggttgagccctacaattccatcctcaccacccacaccaccctggagcactctgattgtgccttcatggtagacaatgaggccatctatgacatctgtcgtagaaacctcgacattgagcgcccaacctacactaacttaaacaggttgataggtcaaattgtgtcttccatcactgcttccctcagatttgatggggccctgaatgttgatctgacagaattccagaccaacctggtgccctaccctcgcatccacttccctctggccacttatgcccctgtcatctctgctgagaaagcctaccatgaacagctttctgtagcagagatcaccaatgcctgctttgagccagccaaccagatggtgaaatgtgaccctcgccatggtaaatacatggcttgctgcctgctgtaccgtggtgatgtggtccccaaagatgtcaatgctgccattgccaccatcaagaccaagcgtaccatccagtttgtggactggtgccccactggcttcaaggttggcattaattaccagcctcccactgtggtccctggtggcgacctggccaaggtccagagagctgtgtgtatgctgagcaacaccacagccattgctgaggcctgggctcgcctggatcacaagtttgatctgatgtatgccaagcgtgcctttgtgcactggtacgtgggtgagggcatggaggagggagagttctctgaggcccgtgaggacatggctgccctagagaaggattatgaggaggttggtgtggattctgtggagggtgagggtgaggaagaaggagaggaatactaaattaaatgtcacaaggtgctgctttcacagggatgtttattctggtccaacatagaaagttgtgggctgatcagttaatttgtatgtggcaatgtgtgctttcatacagttactgactttaagtgtgaatgatttgtcagagacccgagccgtccacttcactgatgggttttaaataaaatactccctgtctta

(The sequence listing continues in the following parts.)

1. A method of predicting at least one toxic effect of a compound, comprising:
(a) preparing a gene expression profile of a tissue or cell sample exposed to the compound; and
(b) comparing the gene expression profile to a database comprising at least part of the data or information of Tables 1-5.

2. A method of claim 1, wherein the gene expression profile prepared from the tissue or cell sample comprises the level of expression for at least one gene.

3. A method of claim 2, wherein the level of expression is compared to a Tox Mean and/or Non-Tox Mean value in Tables 1-5.

4. A method of claim 3, wherein the level of expression is normalized prior to comparison.

5. A method of claim 4, wherein the database comprises substantially all of the data or information in Tables 1-5.

6. A method of claim 1, wherein the tissue or cell sample is a liver tissue or liver cell sample.

7. A method of predicting at least one toxic effect of a compound, comprising:
(a) detecting the level of expression in a tissue or cell sample exposed to the compound of two or more genes from Tables 5B, 5H, 5J, 5P, 5R, 5Y, 5AA, 5CC, 5EE, 5KK, 5OO, 5QQ, 5YY, 5AAA, 5CCC, 5JJJ, 5QQQ, and 5WWW; wherein differential expression of the genes in Tables 5B, 5H, 5J, 5P, 5R, 5Y, 5AA, 5CC, 5EE, 5KK, 5OO, 5QQ, 5YY, 5AAA, 5CCC, 5JJJ, 5QQQ, and 5WWW is indicative of at least one toxic effect.

8. A method of predicting the progression of a toxic effect of a compound, comprising:
(a) detecting the level of expression in a tissue or cell sample exposed to the compound of two or more genes from Tables 5B, 5H, 5J, 5P, 5R, 5Y, 5AA, 5CC, 5EE, 5KK, 5OO, 5QQ, 5YY, 5AAA, 5CCC, 5JJJ, 5QQQ, and 5WWW, wherein differential expression of the genes in Tables 5B, 5H, 5J, 5P, 5R, 5Y, 5AA, 5CC, 5EE, 5KK, 5OO, 5QQ, 5YY, 5AAA, 5CCC, 5JJJ, 5QQQ, and 5WWW is indicative of toxicity progression.

9. A method of predicting the hepatotoxicity of a compound, comprising:
(a) detecting the level of expression in a tissue or cell sample exposed to the compound of two or more genes from Tables 5B, 5H, 5J, 5P, 5R, 5Y, 5AA, 5CC, 5EE, 5KK, 5OO, 5QQ, 5YY, 5AAA, 5CCC, 5JJJ, 5QQQ, and 5WWW, wherein differential expression of the genes in Tables 5B, 5H, 5J, 5P, 5R, 5Y, 5AA, 5CC, 5EE, 5KK, 5OO, 5QQ, 5YY, 5AAA, 5CCC, 5JJJ, 5QQQ, and 5WWW is indicative of hepatotoxicity.

10. A method of identifying an agent that modulates the onset or progression of a toxic response, comprising:
(a) exposing a cell to the agent and a known toxin; and
(b) detecting the expression level of two or more genes from Tables 5B, 5H, 5J, 5P, 5R, 5Y, 5AA, 5CC, 5EE, 5KK, 5OO, 5QQ, 5YY, 5AAA, 5CCC, 5JJJ, 5QQQ, and 5WWW; wherein differential expression of the genes in Tables 1-3 is indicative of toxicity.

11. A method of predicting the cellular pathways that a compound modulates in a cell, comprising:
(a) detecting the level of expression in a tissue or cell sample exposed to the compound of two or more genes from Tables 5B, 5H, 5J, 5P, 5R, 5Y, 5AA, 5CC, 5EE, 5KK, 5OO, 5QQ, 5YY, 5AAA, 5CCC, 5JJJ, 5QQQ, and 5WWW, wherein differential expression of the genes in Tables 5B, 5H, 5J, 5P, 5R, 5Y, 5AA, 5CC, 5EE, 5KK, 5OO, 5QQ, 5YY, 5AAA, 5CCC, 5JJJ, 5QQQ, and 5WWW is associated the modulation of at least one cellular pathway.

12. The method of claim 7, wherein the expression levels of at least 3 genes are detected.

13. The method of claim 7, wherein the expression levels of at least 4 genes are detected.

14. The method of claim 7, wherein the expression levels of at least 5 genes are detected.

15. The method of claim 7, wherein the expression levels of at least 6 genes are detected.

16. The method of claim 7, wherein the expression levels of at least 7 genes are detected.

17. The method of claim 7, wherein the expression levels of at least 8 genes are detected.

18. The method of claim 1, wherein the expression levels of at least 9 genes are detected.

19. The method of claim 1, wherein the expression levels of at least 10 genes are detected.

20. A method of claim 7, wherein the effect is selected from the group consisting of carcinogenesis, cholestasis, hepatitis, liver enlargement, inflammation, liver necrosis, liver steatosis and peroxisome proliferation.

21. A method of claim 9, wherein the hepatotoxicity is associated with at least one liver disease pathology selected from the group consisting of carcinogenesis, cholestasis, hepatitis, liver enlargement, inflammation, liver necrosis, liver steatosis and peroxisome proliferation.

22. A method of claim 11, wherein the cellular pathway is modulated by a toxin selected from the group consisting of acetominophen, 2-acetylaminofluorene (2-AAF), acyclovir, ANIT, AY-25329, BI liver toxin, chloroform, bicalutamide, carbon tetrachloride, chloroform, CI-1000, clofibrate, colchicine, CPA, diclofenac, diflunisal, dimethylnitrosamine (DMN), dioxin, 17α-ethinylestradiol, gemfibrozil, hydrazine, indomethacin, LPS, menadione, phenobarbital, tacrine, thioacetamide, valproate, Wy-14643 and zileuton.

23. A set of at least two probes, wherein each of the probes comprises a sequence that specifically hybridizes to a gene in Tables 5B, 5H, 5J, 5P, 5R, 5Y, 5AA, 5CC, 5EE, 5KK, 5OO, 5QQ, 5YY, 5AAA, 5CCC, 5JJJ, 5QQQ, and 5WWW.

24. A set of probes according to claim 23, wherein the set comprises probes that hybridize to at least 3 genes.

25. A set of probes according to claim 23, wherein the set comprises probes that hybridize to at least 5 genes.

26. A set of probes according to claim 23, wherein the set comprises probes that hybridize to at least 7 genes.

27. A set of probes according to claim 23, wherein the set comprises probes that hybridize to at least 10 genes.

28. A set of probes according to claim 23, wherein the probes are attached to a solid support.

29. A set of probes according to claim 28, wherein the solid support is selected from the group consisting of a membrane, a glass support and a silicon support.

30. A solid support comprising at least two probes, wherein each of the probes comprises a sequence that specifically hybridizes to a gene in Tables 5B, 5H, 5J, 5P, 5R, 5Y, 5AA, 5CC, 5EE, 5KK, 5OO, 5QQ, 5YY, 5AAA, 5CCC, 5JJJ, 5QQQ, and 5WWW.

31. A solid support of claim 30, wherein the solid support is an array comprising at least 10 different oligonucleotides in discrete locations per square centimeter.

32. A solid support of claim 31, wherein the array comprises at least about 100 different oligonucleotides in discrete locations per square centimeter.

33. A solid support of claim 31, wherein the array comprises at least about 1000 different oligonucleotides in discrete locations per square centimeter.

34. A solid support of claim 31, wherein the array comprises at least about 10,000 different oligonucleotides in discrete locations per square centimeter.

35. A computer system comprising:
(a) a database containing information identifying the expression level in a tissue or cell sample exposed to a hepatotoxin of a set of genes comprising at least two genes in Tables 5B, 5H, 5J, 5P, 5R, 5Y, 5AA, 5CC, 5EE, 5KK, 5OO, 5QQ, 5YY, 5AAA, 5CCC, 5JJJ, 5QQQ, and 5WWW; and
(b) a user interface to view the information.

36. A computer system of claim 35, wherein the database further comprises sequence information for the genes.

37. A computer system of claim 35, wherein the database further comprises information identifying the expression level for the set of genes in the tissue or cell sample before exposure to a hepatotoxin.

38. A computer system of claim 35, wherein the database further comprises information identifying the expression level of the set of genes in a tissue or cell sample exposed to at least a second hepatotoxin.

39. A computer system of claim 35, further comprising records including descriptive information from an external database, which information correlates said genes to records in the external database.

40. A computer system of claim 39, wherein the external database is GenBank.

41. A method of using a computer system of claim 35 to present information identifying the expression level in a tissue or cell of at least one gene in Tables 5B, 5H, 5J, 5P, 5R, 5Y, 5AA, 5CC, 5EE, 5KK, 5OO, 5QQ, 5YY, 5AAA, 5CCC, 5JJJ, 5QQQ, and 5WWW, comprising:
(a) comparing the expression level of at least one gene in Tables 1-3 in a tissue or cell exposed to a test agent to the level of expression of the gene in the database.

42. A method of claim 41, wherein the expression levels of at least two genes are compared.

43. A method of claim 41, wherein the expression levels of at least five genes are compared.

44. A method of claim 41, wherein the expression levels of at least ten genes are compared.

45. A method of claim 41, further comprising the step of displaying the level of expression of at least one gene in the tissue or cell sample compared to the expression level when exposed to a toxin.

46. A method of claim 10, wherein the known toxin is a hepatotoxin.

47. A method of claim 43, wherein the hepatotoxin is selected from the group consisting of acetominophen, 2-acetylaminofluorene (2-AAF), acyclovir, ANIT, AY-25329, BI liver toxin, chloroform, bicalutamide, carbon tetrachloride, chloroform, CI-1000, clofibrate, colchicine, CPA, diclofenac, diflunisal, dimethylnitrosamine (DMN), dioxin, 170α-ethinylestradiol, gemfibrozil, hydrazine, indomethacin, LPS, menadione, phenobarbital, tacrine, thioacetamide, valproate, Wy-14643 and zileuton.

48. A method of claim 7, wherein nearly all of the genes in Tables 5B, 5H, 5J, 5P, 5R, 5Y, 5AA, 5CC, 5EE, 5KK, 5OO, 5QQ, 5YY, 5AAA, 5CCC, 5JJJ, 5QQQ, and 5WWW are detected.

49. A method of claim 48, wherein all of the genes in at least one of Tables 5B, 5H, 5J, 5P, 5R, 5Y, 5AA, 5CC, 5EE, 5KK, 5OO, 5QQ, 5YY, 5AAA, 5CCC, 5JJJ, 5QQQ, and 5WWW are detected.

50. A kit comprising at least one solid support of claim 30 packaged with gene expression information for said genes.

51. A kit of claim 50, wherein the gene expression information comprises gene expression levels in a tissue or cell sample exposed to a hepatotoxin.

52. A kit of claim 51, wherein the gene expression information is in an electronic format.

53. A method of claim 7, wherein the compound exposure is in vivo or in vitro.

54. A method of claim 7, wherein the level of expression is detected by an amplification or hybridization assay.

55. A method of claim 54, wherein the amplification assay is quantitative or semi-quantitative PCR.

56. A method of claim 54, wherein the hybridization assay is selected from the group consisting of Northern blot, dot or slot blot, nuclease protection and microarray assays.

57. A method of identifying an agent that modulates at least one activity of a protein encoded by a gene in Tables 5B, 5H, 5J, 5P, 5R, 5Y, 5AA, 5CC, 5EE, 5KK, 5OO, 5QQ, 5YY, 5AAA, 5CCC, 5JJJ, 5QQQ, and 5WWW comprising:
(a) exposing the protein to the agent; and
(b) assaying at least one activity of said protein.

58. A method of claim 57, wherein the agent is exposed to a cell expressing the protein.

59. A method of claim 58, wherein the cell is exposed to a known toxin.

60. A method of claim 59, wherein the toxin modulates the expression of the protein.

61. A method of claim 1, wherein the level of expression is compared to a Tox Mean and/or Non-Tox Mean value in Tables 5A-5WWW.

62. A method of claim 61, wherein the level of expression is normalized prior to comparison.

63. A method of claim 62, wherein the tissue or cell sample is a liver tissue or liver cell sample.

64. A computer system comprising:
(a) a database containing information identifying the expression level in a tissue or cell sample exposed to a hepatotoxin of a set of genes comprising substantially all of the genes in Tables 5A, 5C, 5D, 5E, 5F, 5G, 5I, 5K, 5L, 5M, 5N, 5O, 5Q, 5S, 5T, 5U, 5V, 5W, 5X, 5Z, 5BB, 5DD, 5FF, 5GG, 5HH, 5II, 5JJ, 5LL, 5MM, 5NN, 5PP, 5RR, 5SS, 5TT, 5UU, 5VV, 5WW, 5XX, 5ZZ, 5BBB, 5DDD, 5EEE, 5FFF, 5GGG, 5HHH, 5III, 5KKK, 5LLL, 5MMM, 5NNN, 5OOO, 5PPP, 5RRR, 5SSS, 5TTT, 5UUU and 5VVV; and
(b) a user interface to view the information.

65. An array comprising probes which individually specifically hybridize to substantially all of the genes in Tables 5A, 5C, 5D, 5E, 5F, 5G, 5I, 5K, 5L, 5M, 5N, 5O, 5Q, 5S, 5T, 5U, 5V, 5W, 5X, 5Z, 5BB, 5DD, 5FF, 5GG, 5HH, 5II, 5JJ, 5LL, 5MM, 5NN, 5PP, 5RR, 5SS, 5TT, 5UU, 5VV, 5WW, 5XX, 5ZZ, 5BBB, 5DDD, 5EEE, 5FFF, 5GGG, 5HHH, 5III, 5KKK, 5LLL, 5MMM, 5NNN, 5OOO, 5PPP, 5RRR, 5SSS, 5TTT, 5UUU and 5VVV.
